United States Patent Application Publication US 2014/0057251 A1 - sequence listing, part 129

SEQ ID NO: 236115 - DNA, 1241 bp, Cannabis indica
gggctcacgcagccacgcattcttaaagcggaaatgccgaaatggaactacagagttactaaagataggctcaagaaataacgggcagtgatccgaagctgtgatttcaagatcagtgagcttgacaagattaaaccgttgaaaccattgagaagacaccagagcacgatccagtcggacttctatccaagcatcagtacctcttccgcgctcccaagtaaacggataccctaacaagtcaagatcaatgagatcacacgcagcaagaacatcattaaatccatccagaagccattgaggataatcatgaccgcccctcttatcaagatgactagtaacactatttaaatcgctatgacacaccacggaaaattagactccaacctcagagttcgcaacaagtcccaagtcctatacctcaaacttctattgggctccccataaaccccagtcaatctccaaggagaagaagcatcttcagatatctcaatatcactatgattaaaagaatagccaagtagtcgagcttcagaatcattgcgccaaagcatagccaaacctccactatgccctctagcatcaaccgaaaacaaaccatcaaagcccaacttaacacgaagtctttcaagtttctctttaccagaaaagtttcacaaaggaaaagaaaattgggtttcttttggaccactagatccacaaggaattgataaacccacgggttcccaagcccacggcaattccaactaatgatacacataatatactttttgattcatcaaaaaaaaaaatctctaagtcattggattggtcatataaatactatcaacccagcccatgctcaggcctcaaacttaaattcataggaagttccttttactctaagatattgttatattgatgccatttgatgggaattgctgctgtgcttcaatacatgcagggctctgtcatagatgctagtttattctggttctgattattcttttaatcttcttgatggtgaacttaaggcgattttggaataaattagccatttactcggactcaagagtcaagacatgatattttgctgctttgacttgctagaatagctcctttgagatttgcataactcgttatgatgaaatattctgtcatggtgtaaagtctaaggccaaagtctattcttagagtttgctaggcataaaatagataaagaaaactacatcctataatatagattaaaatacaaattgaaactc

SEQ ID NO: 236116 - DNA, 934 bp, Cannabis indica
aatcttcatgatttcctggaatttgaggttcgagagcattaacgtgttctaatatctcctcacagaaattgtcttggaggaggtcttctttcaattttaccatcaaaccgagtatcccttctcattgcatgattacttggcaagaaccttctatgataaacatatgaggtcttcccgattactcaaatggacgttgtgtcttcattacaagtatgacaagctttataaccttgaccactccatccagacaagctactacgagcagaaaaatcattcactatccacaaaagcgctgcacgcattgtacacattgagttggtcaacctatctctcgttggtaccccattattccacaactcctttaattcatccaccaacggtcttaagaatatatccatgtctttacctggagattttgcaccaggaataaagacggatagcaaaaaataattgtctttcatacataaccaaggtggtagattataattagccaacaccaccagccacatactgtatgcaagactcatgttgccaaatggattaaatctgtcactagctaacccagtcgaacatttctttgatcgcttgcaaactcaagatgctttgcatcaaagtctttccaagcaagaccatcaatcgggtgtcgcatcaccccatcatctttagatttaccagtatgataccaagctcttcgctgtaatccttgaactatataatattatgagtcgaggtgtcaatggaaagtatcgcatgactttgcaaggaacttttgttcctttaccattctcgaaagtaacccaacgactacttctacaaactggacaagcctccttagatacattctccttataaaataagcaacaattatattcacagacatggatagactcataacccaaagctaatttcttcaatctctttttcgcctcgtagt

SEQ ID NO: 236117 - DNA, 3572 bp, Cannabis indica
ccttatctcatttctgatggtggtaacgtcgatgttgtgtccgtcgaagagggtgtcgtttctctcaaactccaaggtgggtctcgtttctttttatctatatttccttcttttcacttaaagtcatattctttttgtctaattcaatcaatcacaaggttcaccaaaattttatatccaatttcaagacatttgttcttgaattgcaactttgaatgttacattgtgtaatttgacggttattttattttagatgcaagtatatggttgacaatatggttattattattgcttatgtcgctaatgtgtggaaagataatagaattatgagccaattgttggaaccaccttacaattataacattatgcacattagaaaattttctattttgtgggattttcatctgtcaactatgtatatatatatatatatatatcagtatatgttcaactatgagaagttattgtctcaagtgtgatgtatatgtgtgaagtttacatttgaattacctaattttactttgattaacaattttcagttcgttgtttcctttgattctatgtttgagtgtaaccacacaattatatttgatgacgaggtgagatatctgctagataagctggtatggtagattcagattgaaagtgaagtgttttttctataatatgattaatatagctcgaagtgaaagttgcataataattattgctaaccaagttctaaaccaaagttgacacagattatatggtggtgattttggtttccactgttatgaatttacggttcttattgactgagattttgccagtattgaaaaatgattaacaggggcatgtgagagctgtcctagctctacaaccaccatgacaatggggattgaacgtgtactaaaagaaaagtttggagacgctcttaaggaaatccgccaagtctatgatgaagaggcgaaagagacaactgctgaggtgagtcatattagtgctttgatatttgacaatagtatttgagggaatgttttttgtaaaaacttgaatctgacattgctgcatttgcaggccgtgaaccgtcaccttgacattttgagaccagccataaagaactttggtggaagtgtggaagttttatctgttgaaaatggggattgctttgttaactatgttggccccgagtcaattggatctggtgtcaaagctgctataaaggagaagttccctgatattataaacgttatactcaaacagtagagatttccctttctcagaaattacttgttctacattgtcaccagaagtaaatagtacatttatttatggatataattttgggaacaccatgttatttctttgcacatttttttcatgaatgattatgtgaagacgtataatagcccttttcacattatttatacatattattcatgaacaatgacctcagcagattcaaccctgatccaggatgatgaattcttttccagcattggattttgttctgtttcgaaatacatgaaatttggttttaaacattgaacagtgttaagattctccctcattaacttgatcagcggcagttaacactgacttcagccatcgagagaaattaatcaaaaatatggtgtaagcaaaatagcaagtgattgtccagctgactagtccctgcattgaagcaattacagaaactcaaatactttcttatattatagtgaatttgatgtgtttgggagctagttctaccatttacctggccaaagatatcgatgttgggttgtggataatgccataggtggaagaacctgcatgaattgaatagaattttaatggatcacaacccatttaagcacacaattaagagagtgaaatggcatggttggttggtcggttgcttacttcattaagggagtctcagccagtgggcaacctattccaacaatgcatgccagggtaaaccccaacagtgttctatccagggatagccatagcaactctgctaatccgaacaatatgtaggcctcagtgttgtacgcaactccagctttgtacatttcagcgcttagttctatgaatgccacaagagctctgcctccattttcaaagggttatatgcaataacgaaagtaatgaatggctgaaagttaatgacattttggtacacattttaaagagtaagatattgagaaactcacataaaagaagtggctgctttcttttggttatcatcttctaaaatctttgaagatcctctttcatccaagtataattgaagcaaaccaacagtgcaatagaatgaaccaaggagaaaaggtacctatttcaacagatggagtagctctgcttgcatcaagtgttaccaagaaaatatcacatggctttaaaggaattcacattttttacccagatatttgtatggagtggaccaatgttaatggcaccattgtcatacaccacaagatctacccttgagtgaagcccatcaagcaagggacccaagaagaagcctgagccaaatagggtcactgagattgaaggccaagcttttctgaggcttcttctctcctgttttcttaggctgcagtaggctgctctgccaagaaaatgcttggacttggcaatgtttggtgcactgtgtagaaagcaagaggattttaacaaaatcatcgaatggtgaatggtttcacatgcacactctaacaaccgttagtagtgttagtagtctttggttaagtccatatgatgataaaatttatgtggtgcaagttttttcagggttccactacaattattattgaagggcgaacagaactaataaaacccataattaggattttttttcttcataaatcttacctattatataaaatctaactccatgttattatacatttaacaaattgttgtgtatttaataggagagtattgttattggacatcagtggtgtccagcactttctatagttggcgtctcataattagttagtgatattgtctaaaaactattttcttaagttatatgagatctgatacttaaacaccaatagcgataagacactgaggaagatgctagacactagtggtaccttttaacaattctcttaacaaaatatacccaattaaaatgttaactttaatagaatatataatatattacttttaataatgaaatttttatataaaaaatataaattgatattttatttacaaaaatacctaaattatggacaacaattttatctttaatgagcttttatttaccaaaatactacttacacatatccattcgtgtcagtccaaatttaacttttttgttctagtttttcttttatttttcattttcgaatttaacattcagtttctttttccttttctttctcaattttttatttcaaaaccaccttccagctattaccttttgaaaacccacaaaaccacctcccagtcataactttcgccattttcttcttccaactgcctcctttatcaatttatatatatatatatatacatatctttcatttcgtatgtataatggctattacatgtggctctgcttctttatctctattagcaaaaaaaaaaaa

SEQ ID NO: 236118 - DNA, 684 bp, Cannabis indica
ctgaaacatattctttgtaaatatcttgacagttgtaactagaattcattttgtcttccttagttatctgcacgacattatctcaagattaatataactataaggggagtaggtcattacccatatataaggggactacctctataattccaaagtcctttctatttgtttattatttctttattggtgattaattagcgtaatttagactctgagtcagttggaaatttttccagtcaacaagtgtgttttctaatctcaaagttgcttgtttgtatctctcccgtcgtccaaaagtcgatttacgtcattctttatataggcctataaagataaatagaatttatttagaataggatttaaattcaaaaatatatgtatgacgctatagcgccttaagacacagtgctatagccatgcatgacttcccgatacaacccacgtactaaaattatttttctttctctgttttatctttttttagttgcggtactatagcaccacatgccatttttcgtcgcccttttactgcttcaaccttgcttagtaaatcatgcataactttcgcgtcctgactccaaatgagatgatttaacatattttgaaaagatagtaacgagctccatcattttgggtttcataagctcttcgagaaaatgataaaaatattgtcaaaaattagct

SEQ ID NO: 236119 - DNA, 1770 bp, Cannabis indica
aggctacattttcatgatggctgtaggagttatttcgtgaaaaatatcaaacaaacactcacaacatcctcaacaatggaggcaaagtatagtgttatgaggctacttgtcaagtaatatggttgcagaactttatttcaacattgggtgttatagactctatctctagactgttgaaattatattgtgacaattccgcagtagctttctctaagaatgctaaaagtacttgtggctcaaaatatattgacttaaagtactattttgttaaagataaagttattgagtctctcattttcattgagaacacgcctaccactagcatgttggtgagcccactaaatgaaatgcttatccatatgtgtatttttggagcatgttgctcgaatgagattgttaggagtataacttgttgagctcagtgagagttttattattttgtatttaacgtgctaatattttgtatggaatacttatgacttatattttgaacatgcataataatgttgtagtcattttttattgttattgtcatatttatatatatatatatatatatgttgtttactgaaagtataaaaggagatagatacgcatagtcttaattttatttgattgttaatggttgttattttattatatgtattcgaagccaagttttatgcaatatgagtaatagtatcttatagatgtttgatttagttgatcgttatatgagttggataatgttatggtagttgattatattgtctaagtaaaaaaaatattagaattattattatggactattataattataggcataattctataatcacaaccattaaatatgtacctaataatgtttgtcaatagttataatatgataatagtcactaaatatattagaggcacatgaaagcacctttatagctataattatcccattaaaattatagtctaccattaattaaaccttattgatccaattagctcataatctcctagggttagaagggtgttatatattaagtgtatgagggtttaattgatggtatgaggattgtagacaagggttactttacatttgcttctatcttgcattttacctttgatcatggttttgcattaatcatattgggagatcctaagtttaaatgactcatatagacaatatggcattatggggtatgttttattaatcataaataaatactttgatgttggattatatattagcattattgtgattattgtttgattatatgtagaatataatgctcaaatgagttttagtatttttaacatttgatacaaaaaaaaaaaattatggaaacttcataaattaagtttttgttgttctcaaaattatctattttttgtatttttgtttttaaaagtcattttcttataacaatgtcaaacaacctattatttatttgttttgcatggttcaattttaaaatattgttcaataatggtcaattagctggaatattttttcaaaaaattctataatgaacactcaagatgagtgtatcaatggacatccttcatatttttgatagttataacctcatttatattatacataacagtgtacatcgtaattatttaatacatcctgtaaagttttaagaagattagaacactttattgtgttaaaaaaaagttcaaatagtttattgtaggtacacctcttattttatacgcatgtgaaataaattatttaaattatacttaagatttacattgtcacataaaaaggttaagaatataactatttagatc

SEQ ID NO: 236120 - DNA, 880 bp, Cannabis indica
cccccgtactttaatgaaaaaaaaagtttttggacgaagataatggagcttggcctcaagtttggggggccttggttaattcttggtgatgtgaactttgtgatgaatagctccgagcggattggtttgagggggagagatcaattcttgtcgttcatttcaggattgatcaatagaatcggattaattgatctcccagttaaaggggaaagccttacatgggacaaccatcgggatggcgaagctcatatcaagtcagctcttgacaaagctttggtcaatggggactggcttggtcttttcccgaaggcagttgtccagtcctaccacacttgcaactcggaccaccggcccctgtgtatcagcactgtgtgccaggacgctaaaccctctaggccttccggtttgaggtctggtggacaagagacccccgtagtgatttgattgtggagaatgcctggggctccttgtctcatccttgggaccctgggagaatttttaagaaagtgggggccactcgccttgctcttagctagtggagtagaaaccaattcgggcaattcgattcccgcattgcccaatatgagagtcagttgaaccgcattcaggttcttcttgctggggacagagtttgggccgaggaattggaaaccaggaagtgttgggttttgtgccctaaataaaactcacttcaatataatcagatttacttaataataaagatcagaaacaatagttttatgttgcatggttcacatgatttatttcatgattatatgcatatactgtatgaattctctttaagtccagaacatatgaatttgttaatgattatagttttgtcagcttagtggaatataatcttaattatatgttcgaa

SEQ ID NO: 236121 - DNA, 1034 bp, Cannabis indica
acgtgtcacagtccggttggtccacttattttggacaaaatcaggggcaacatttacataatcgaaaaactatcgatactccattgacatatcatcgataagaaatgttaggatttcgagcgattgtcccatcgacagaatgtcgacatatcatcgttatcaaatcgacaaggtgttctatcaaaaaaatatcgacacacactcaatataataataaatgcatattgcatgtcatacacgtgtacaattggacatttaatgctaatttgttcccacctttccaacttttgttctatctcgaggcaatcgacaatgtcgacatatcatcgataaagtgtggcctcaattttcttctattatcgacaacctattgacaatgtatcgtaattatatcgataaatgcacattacataccatacacatgtacaataacagatttaatgttaattaatttgtcctaccttcccaaaaattattctgccctataaaagcacatttcatcttcataagttacatattttcgcattcttcaaccatagagtattcttgtcttataagttctatatgtctagtaaagagaacaaacacaaacttctatctgttgaagagatcaaacaggaatctaatgacgaaattactccagaaaagcaagaatatatagaagcttttaaacgttttgaaaataaaggggtggcaaacaaatggaggttcctatggagtcaaataaatgatgggtggaagaaatatccatatccaccaccagggttccccgaagggtgtagccgttgcagattagattattttaatagcgaaccggtcaagcttggatctttatgcccgtattgggagtctcacggacacagtaaagacttttaaattgttatgttatgattgttttaatgtttgtctttacttatttactatttaaaaattttcacttatttcgagtctactgtttaaaagtttttaatcttctttgtcttaaagtcgataatttatcgacattctatcgataaattgtcgacaaacataaa

SEQ ID NO: 236122 - DNA, 789 bp, Cannabis indica
catgccagccaggctctagccaaccattattatgactctctctcctagggtatccgagaacatgtttttccaaggtctagagaccctgttcttgacaagctaggtcctaggataaccaacaacactcgggaaaataataactcgtgaagtgagaattgggatgactttattccaccacagaataataatttcaggcatgtggatcaaccaaactcaagaaattagaaagatcaacctcccattaccccgcaaaccaaccttatcgactatgagactctcgtcggtctggccagctaaggaagcataaccagccaacggctggtggccatggcccataacttggaaagaagatggccagccaagacttattgactagctagaggttgactggccaagaaaaaatgttcagccaaggacagatgcccagcacggagctggctagccaagcatacatgtatcgccctaagtaattaggcacgctacccaagttatttacgtaaccctaatcccctaagcagaattactaataaaaataccgcagaatttaaacttttgtaataaatggaatgaaaataaaaattgtaataatttaaactttacaacagttgggatcccaaaaatatttacaatttttattacaagtctctttcagttatccggcctaagcggcaaaatagagtttcaaaagttcaacactggtagacccttaacccgcttggtctgatatggcctggacatgtacattcttcgcccagctcctaaactcatggctgatcagctaatgcctta

SEQ ID NO: 236123 - DNA, 1354 bp, Cannabis indica
ttgggtgtgtgggcctgaccatgcgcgaaggtcgtcccaagggtcattagcaagctgaccgttgaaagtgaggaaggaaattacatctccgacaaaaccctttttatctaagtatgtaagccttttgattgtgaggttggacgtacgataaatccacattggcttaggcctttcgtggtatacggaagggttagcctctatatactcctcagtaacataatggatcttctcgaccatttattatccacgcacagtaataggctgcccgacctcattgtatcgaccgagccctacgaattgtgtaagagcgaagggtacatgactgaggacctttttctcctcatcaacctggactgggcgagcgtcaccctagtcttctacttcttgcacctcagcattgccgacatgcacctcgacgattttttcttcaagtacatgtgggtgcttacttgctcttgcatctatggttcaccatttgggtttatcttgtaaggacagacaccgaagaaatcaactatggatgtaagggaaagtaagcacccatattcatgtagaatctcaaccaagcattacaacaagtgtttaaagagccattaggaccaccgtatagtggcttccaaacgacactttcaagaagacaataatcatctcgtattaattgagcttgatcttcagtaagagtgttaaacacaagaggtcttagcctgaaagcttgatctcttagatcatcactcttaatggcagctttaagaagttcagttgtcatcaccttcccaccacgcaccttgtctaggttcttagacttaggcatagttagcttagctcaaataaattgagccacatgggggtcatactcatcaggaaaccttctacttctcttcatcctagccatgaaagctcaacagtacaagtcgcgtacagcccaagaaaagtctagttggattgtgaaaaaattcaaacaattttgaggaaatttttaattcactaggaaagtgttttgaaatttttgaggtcttagaaaaaataatttaagggtttttgggagtttgagaatccttggagtaagatcaacaaaggaggagaaggaaaaatttctcgttgaaagaggtattgtcgccgaaaaaaattactaccttagaggatgaagaacacttcaaggcttgattttaaggctttttctaatgcttgggtgtggagaacaaagtgggaggaatgagaaattcgattgaaaacactcttgtttatttatgagttcaatctcttaatccgagattgggaagcttttaaatttaaaactttaaaggaagaggtaaatgacaagtaaaagatatatatatatatatatatctttcct

SEQ ID NO: 236124 - DNA, 946 bp, Cannabis indica
tagttggcttttcactatatggtgcaacatgagtaggttattgaaattgtggatgattttgttccatctaaatagtagaagccaccaaagtgttgagtagatcagtaagagaatgatcttgatcttgtggtgctacaggatgatagtaagaagtttgttgaatatattgattgatcccactataggaagtgcttgaataatctctccattgttgattgtaagtgtaagtatcgtagtagtgatcatatcgatacacttgtggcgagatataatatggatcacaatattattgattgtacatagccatatttctaaagaaagatctgaaattaaaaccacaacttgaagaacaagttagtaacaaaaattaaatatgaataataaaataaaacaatagaacccggtaatggtgccaaaaattttgatgcgtgtcataagccacaacaaatttactaatatttatttctaatacctccaattattttagcataattgtaagtaaatgtcgattccacgagaactatgtttatttaattactcaaaaattaatggcagaaattagaaaatggggttttgagatttagaataaaatagcataaataaaaataaaaacaaattaaaagtgagatgacgatatgagaaattagttaaaggttattcgacaccctcaacaatcattcctaattcatattaacgaatgtaatttcagtttctaatcaaactattagtcccgtagataaagttgaagcagtcaattatctcaatctccttattacaaataatcaaggtgaagcgctcaataataattaactcttttacctaagcagtaaatctacgaagcatgcaatttatttaacttaaataaaactttaagatttatagagatagattaatctaggctgaaaaaccgtgtttttgcaaatgtcagttgtatataagaaaatat

SEQ ID NO: 236125 - DNA, 742 bp, Cannabis indica
ggtctagttgatattgtcactgacatgtgtgaggcatatggggtgttgcaatactcctatgatacgaaggttcctccacaacgcgtgattgatatgggaacggtgcttagacttaaagctccacatccacatggccaaccacctcctccaccacagcaaggagccccaaagcctcctcctgaatgcaaagatgagcatgttgaagaagtaccacaacgtattgcaggccctcttgatccagccatgcagtacacacatgaccagttgaattatcttattcagcagaacattcacatgcaaacttacatggcgcaaaagagtgtctttgacgaaaatcaagtgcactagctgaattcacttatcacaaggatgaatgttgggattgagaagcctaattactttggaaatccaccctgtttttatccttatgaccagccacctccaccaaaccccttctgatgggggttcatgtaagtctctctcacctagaatattatatcacattagggacaatgtgcatctttagtttggggggatggatttaaaattttcatgtttatgttttgtttagtttagcttttgtttaagtttcatgtgttgataattgagccaaaatattgattgaactgttgttgtttatttgtgcaatggattgaaattttaaccgtgtgcttaattcataaattctttagattgaattggatgccttgtaaaaaaatttcatatagatgtgaaacattga

SEQ ID NO: 236126 - DNA, 1490 bp, Cannabis indica
atggtagttattttgtaagatatttaatattacctttaatggcattcctttaatggacaaaattgtcattatatatttaatattaaaaaataaaataaaaatgattaaaatccattatctttaatggcgttccttataaaattggtgggggaagttctctctttttttctctcttatttaatcaagttctctctttcttaattttaataatgtaagtaaacaaatgtaagataataatcaccttaccattgattcccattacttattagtaaacatgccattagtgatataagcttgattctttttggaacttattttgtatgccaaaattattcatgtttggtgacttggccagattatcctatcttttatcagagattttattttggttaaagtctctattaatattaattctaatacatcgatcattttagagcgttttatttaggtagtttttccgatgctattattctagaagaatatagtcatattattaaaatttattgactaaatttggacctaaatagcattagttattaaatatttatttaactattttaaaatatagtcctaaaacggaaactaaaaaaaaaaaagtaccataccattctctactatttctttcgtagaagaaaagaaaaattcatttagctcaaagtagagattttttcaagtagagactagagagtagacatagtaaacaaccaagcaattgaaaagctcttttgttttgctttttccaaattttgtggtcaaattaatccctctccaagcaaaagaaaacccaagaaagaaacaaaaacatggaatttgaaatagttttggcggacataacaatgaaaactaaccgttgaactaagcttgggtcttggccataaaaaagactctaaacatgccccattgatatccaacaaaacccaaacatgagccattatcattattcattaataaataggggaattcaatgtgcaacaccctttttgtgatgtacttctacaacactctcccaaaaacatgttttttttttgtaaaaaatgtaacaaaattgggagaacacctactataattattctgaaaatatatagaggttgtaattataattacataaaattaaatcaaacataagaaagtaataatcacacgttgtagcgttgtcgtgtaaagtgtttggttcttttgacaaagacgtgaccgcaacataagccgcatactcgtcttcattaattttaaattaaaacccaacttttccttttaattatcattctttaccattaataataaataaattaattaattagaaaaatagtgtttaatttatttgttcacatggaataatgtgacaacatcatcatcatcatcggcttccacgagctgtgacctaatttattaagaatacaatatacttgttcaaattaaagttacaagaaggccatttcaatcttgtgacactttcaaaacccaacttttatttaaaaataattaatgtatat

SEQ ID NO: 236127 - DNA, 1002 bp, Cannabis indica
caacaagattatgaatagcagcaagagcaataagtacacgaataggtgtaattctagtaacatgtgaattatgtaaatctatatttttctctttgtttaaactctttcgcaataagacgtgtctacttttcaacagtaccattggatctcaatttctttttaaaaatccacgcttacaacgtattatcttacaacctggatataacacaactaaatattccaagttctgtttgactcaagagagtccattccacgaagcgcaaattaaggaaaaggacttttgggtggagaatgattttctgtataagaattttattttaaatagtctctctgatgatttggatgattatttatagttttgaaaaatttgccaaaaaaataagagaaacattacagaaaaagtatgatgttgatgaggccgaaacaaagaaatatactgctacttaaaatttcaaatgactaatgataaatcagtcgaagatccattcgggtcggtagttcgaccttcacagagggaggtcatccggctttgcattgttgatcttatagatgttttgctaatatcctcatccaggacctggatgagagtcttgactttccctgatgctgacgagtaaggatataacttggacttgactagttctgttttgtgagaacttccttgggctgaagatgggcccgtatcttgttgggccttcctgatgagaaggcaacgtgtctccgggtataaacactaacaacactaatatataatttacgttcagggccggccctgggcataggcgggctaggcctgtgcctagggcccacctagtccaggggcccaaaaaaaaaatttgcccttttaaaattacacaatttttttgctgattttgaaaaataccatttttttctaaataagggcccaaaaaataatttttaccctatagcccactacatttcagggccggcattacgttgtatatgtattgttactatgtaacatattgcaatattcacatg

SEQ ID NO: 236128 - DNA, 1049 bp, Cannabis indica
gagttgtccttcttcctcactctcatcctcattctgatctcgttcaacaacatttttcttctatttaagggatttgattttggcttttaatttctcaatctccttctatttctgagccacagcatcagaaacttctcttttctcctgccaaacagtttagatgccttggcaaggaacctgcaaattaataaataaagttagatataatttatattctataactaatgaaataacatttgtcaagtactagcataccaagcagccttaacatgtccaagatgctttagtgtcccgagcgcatgtgttagaatgttattttggcaatggacctaaacttgtccctgactaacttgctcctctagttgagcctaatacatatattcaagcaattagtatatgatttatacatactaacttattattacttgatcaacgattaatatatacttactatcttatcagcaattttcttgtcataattagtgacaagtttcgtttacttggtttgagatttaatccaaacacgattgcgtgggggatcctcaacctcaaggtcatttttcttcattattttataaaaattaaatgagtacttatattttgatgcacattattagaaattcattatatcaattacttaccacatcttcccttacgttcaccattgcactctgactttgatgtctaaattggatttttgctgaacgttccctttgtacttaactcaattcctacaatgcaaaaaaaaatgttagctaccaatacttgtatttaaaagtttatcttagtacaaatataattagtacatgaaattcaggagttagtcgactttgaaaaaatttcaaccaatcctttgtcaattttaggatgttttttagggacatattcgaactgttgcaaatcattttttttttctaatgtgggcataatgatgtattttttaattctcttcttgaagtctttcatttacttcctagcaataatcatcaattatgtttgaaatcatctcgaactacaaaacccgtctagttttaaggaaaacaaacatg

SEQ ID NO: 236129 - DNA, 1525 bp, Cannabis indica
tcagggccaccaagatgcatcaatagaaacgatgcccacaacgagtaatgatcgtcttggttgtttttggtgtcgtcgcctttgacaatactcttgatgatttgtcctataattgtagcagcaatccagtctgctaccaagtaaaatgcccagacaaaccttgctatgaggttgcttcttgaccattttctaacaggtgccaaaactaacaagaaagcttgcagtgagaggcttaccaacatggtcaccttcagtaacttctccacagtagaattgatgactgaagacattgatcaaaccttgtgttgctgttgtcaaaacagaattagcacataattatatagcaaattaaaatggtcaattaactaattaaaccagtactagtgttcaacttaccagacagattttagcttcgatccaatttctaatgtagtatattaatagatatgttgaatatgtctatggcaagttttatataaattaagagcgtgtttgttttatttgttagctataggattaggtggagaaatcattagtataataatacataatatattattgctgctgtacactttgagttgtgtatttatattttatattctccaacagtatgtaggggacaataattatcaatatttttagggtagtttggtatgctatgttaaaaggtcgtattctatagtacaatgtttggactttgatagaattttgtattacattatacaatatgaatatttaatacataacaaataatcaggatcaggctaatgttcgggatttggggctaggaccaaagccaaggtctagacggatgctagggtcgattcgcactatttgttatagtgcattcaatttacattaagtgttgtgtagatttcatattttagatccaatctagttcgcacaataatttaaatttaatccaatctaatttataaaagtgtagattcaattaattatctatatttttttttgaattaaggttttatttattacaatacataatttgaaattcgaatttaagactttcaatacacacgcagcttcttatagccacttaaactagcttcaagtcattttcaattaattatattagattagtcactttttgttgttgtattatttttttgaacattgctatttgttatcagtggtgcctagtacattctcgacttgttgcgttgcgattagctagcgatactccctaaaaactattatattaaattatatggaacttcacgtaagaggatgttaagaactactaatgtcttttagcaattctctatttttttgttgtacaaaagaaaataaattattattgttttattagtattccacatagctagttagttttgcaaatttcacattttttcccttttatttggactatactttgactagtgccctgtgctcttctgatcattcttacctcactttgttctgagtttgagtttgagtctgaagcttaagctttgagcttagtcctttctttctctttccaaatgggtttcttcttcaacggtgg

SEQ ID NO: 236130 - DNA, 977 bp, Cannabis indica
atccatataacagtcccaacgtaaaaaaattaaaaacgagtccttaaacgaaaaatatcattaaagcttgagctttgagctttaaaagctcaaacactattatcatctcaaaactatctcaaattcagcaagtaaacattgtaattaatctcgtagcaacccaaaaataaaatcatgaagtcacagattccacaactattccaaaacacaaagttaacatatagaaccaaacattttcaacttaaaacaaaaaccaattcttaccttaagctctccctcttcaatcgttcactatccagttactatcagaattaaatcactcaatttttggttgaaaattaaagaaaatagatggtgggagtgagggtttcgtcgcggtcgaagagagtggggttcgttctctttttcttttgatttttataaacttaaaacatatatattaaactgataagtataagttttattataaattataataataataataataataataataataaaaattattttactatttcttagccactaagaaatctctacttctagggcattaagtcaaatccaaatacatctaattacctcaatatgtatactatcgacttatcatgatattcccatcaaagtcactaatttaacttgttatgacattttggccctcgatcgagcctccatggtccccaaacctaaaaatatttactccacaaacaattcatattatattaacacatgctatataaatatctgtaattaataaattacgcttatttattcacttactaatttaataaaaatctaaattaatttctgtaaaagcttaaatttattaatttttcatcttatttctagaaaaaaaatactttcaagacgaaactaaaaatattttccatttaaaaatcgtaatttacatacattcatcaaataagcacataaaccaacttgaacacattcaaattgtcacaatcattattttaaat

SEQ ID NO: 236131 - DNA, 1433 bp, Cannabis indica
atacttttcaagcacacatagttgatgatgaaacaaaggatacacttctattttgtaaatgatatttatggggattctagctaactgatcaaaccccagatatcaaaataatagctttgtatcagcaagtgaatagcatactccaatactctttatgactgagtaaaataaatttgatgccttaccgaagctacgaaaactttagccgcagcaagaaaatcctctgttttaccaccagtacaagatccgatatagactctatcaattttcacgtctctgcactctcttgctaaagcacgattatcaggagaatgaggctgcaagtatagtcaaaacccaggtgaagtacaatattgacaatacaagagaggatattatcgagatacattgaaatacaagacatgaggagcttgcatggaacatgaagatactaatagataaaacaacatatttcatttaacattctttaaaaagggtgttcctaagcaagcctaaggcaatccacaagagattattgtcctaaattttcttgacacatgatttcttgctataagttattcatctatttataattagaaggtgtttaaaaatctcacctttgccaccaaaggctccaattttgagatgtcaaatctgtactcagaaagaaacctaaatgcaagcaaaataacttgttcaaacacctcaagaacaaactccatttatctaagttatattagagagataaattttaattatgttcaatgacataaattaccttgcttgagcatcactaaacacaggctcatagggtacagatgtcttatcctgtgaaaaaaaaaaagacggattaaaataagaaagagaatcatgccgcaatacaactcgtaagtgaacatctatgatgagttatgcatgtatataaaaaagttagtaaattgcaccaattaagcaattgtactcacctccaggtacttgtatgtagtgctatctgcaggaactataccattctttcccccggcttcgacaaccatgttgcacaatgtcatcctttcttccatctattaaagagaaaatttaacccattagatacatattctatcaagaaaaaaaaattgaaaacaaacaagctttcatgtatgcttgaagtgaatatcttttttacttacacttaaactttcaactgtggagccgacaaattccatagctttatatgttgcgccagcaacagatatttcaccaataatctacaagaataaaaagagttacttatacagcacaatgatatggaaagctaaaatattcaagaaatacaccaattaacttaactacaatcagtatcacctcagtaaacattaaaacaaagatgacacatgattcgataatcttacttgcaaaattaaatctttaagcaagaatataaatctggcatttctaccatccataacaaactt

SEQ ID NO: 236132 - DNA, 688 bp, Cannabis indica
tcgaagaaaagaaaaataactgttacaaatttacaacatgttatatgggaaaaaataaaacatgtgaatgaaagtaatgacccagggtagaaattgtgtatgtatctcattatttcacaaaactaaatcttcaacagacccaatctctcaacacttcacacttcttggaacaaccttagagtcttgctatttagttgaaatcactgcacaaaatatgaataattagtcattattatatatatatatatgatattaccaaaaaaaagtttgtaaatatagtttcctttattgtccatataagtctactacatcaatatcatattatcatggtgcttcttgtgcaaacttggttcctacaaagttcagaactgatcagaatttaaccattttgcagcatctaggcatgcaataatgatgttattatgtatctaagaaatcttgataggacaaaatctaacaccatgaatttaatgctcaaacctagtaaaaggcaacatagtgacaacaagcctagtaaaagcgtgtagtgtttacacaataacagtgtccagtaaacatactacttgaaattatgttaaaaataaagaaagcttaaagaagaaacacagtaacaactagtttacatatgccaatgtatgttggaactatatgacagtttctgtaatcttaccataactggagaagtttg

SEQ ID NO: 236133 - DNA, 2922 bp, Cannabis indica
attgttgttgttacattgatattttttgatatttcaaatattttttcaagtgtaattctatttaattataacctcaattagaatataatttacttttaagtgtattcttaaatagaggtattactatatatatgggatatgattttgttccgtgatgtagtttcacggaatgtattccgtggtacattagatgggtctcagggtacattaaatgagtgtcagggtacgtttctattttttaaccctaattacccctaaatcaatctcaaccgtcagatcaaataactctctcatttgacggctgccgtaaatcacggattacaatcgtgaaaataataacaggacaaaatcatatccctatatatagacaactttaatgataggcatccgttacagtatgattagtagaggagaaaattgagaggaaagaaaagtttggaagaaaaagtagagagaaaaaaaaaattatttggttggaaagaaaaatggggagaagagaaaaattggtagaaaaaattgaggtgggacccaccaaaaatatttcctccaaattgaagagaaaagttttacaaaataatattaacataaacttactaatttatttttacaagaaaaaaaaaacatgttaataatttaaggatatataatatagtaattttaaaataattttctttcatttctactaacaaataactaagaagaaaatagattttctattctttctttctatttttctttccttcacaccaataatataagagggaatagtatactaataagaattttttttctaaagaaaaaatattttttcatttatctacaattttatgttctaaaatttttatttacaaatataattttaaaattttaaattacaaaaatataattttctcagcaaaaagtaaaaagacaacgataaatcaatctcacaacaattataaaacaacgaaaaacaacaagaaaactaatctcaagacaactataaatcaattaattactataaaacaataaataaaaatatcaaacaacttctatatttttgtaaataaaaatattcaaaccgcaaaaataaaatttatccgtgataatgtatatttatatattttttttcaaatttgtggtctattatctaaaaattctactaataatagtgtgtatatatatataatataagtatactcacttgcagttgttagaactattagtagacagttttgaagatcttcttttggggagcaatgatattggtggcttagcaaaattactaaacaattttggagactcaaaagagataatcagattcaatgccatatctcttatcactatagccttcttcaaaattataataagaatattgcagtgacaatgacaaaggtacatatttataagtgtatatgtatgcatttattatgtttttcctaacatattttgatccataaaatgttgtttataataattaagagaaagcattgttataaaattcttttaatagtgacataccaataatttattccaacctcttaaaaattaagctacctaaaaataaggccataatgtttggtagggtgtttatagtggttattttaacgaacttattattaattattcgttagcaaaatgaaaagaattaggagaagaaggactcacgggtaagattcaacatcgagcgagtctgtcggttagcgggggtttcaagttcaaaaacttgtatccagacccggcccgtgaaatggtcaggttggccgggtttgcaagtcacgggttggcaggttggttcgggtccaacccaaaacttgatgactataaaaaatcaacccgcgaacatgcccgaaagtgtaccaggttgggtctgacccgcacgaacaaaacaagttttttttaattttaagggttggtctggtcgagtccaggagggttggccgggtccaggtcaaatccagtctaaatgttcagtactactcacaagtaatcaatgggctgatcgaaaagttgaaagaagaaaagatttttcagatagatacagagaattagctaagcaattttatttgaacaaatatagaactagaattgataattttatggacattttcaattgtagccaatattattacaaatatatccgacaactttgggcaagagagaggcattcgcctattacgagatggtgcaacttgattattttttattgaatttaagtatttatatcttttattttcttaatcttaaaagaaagacacattattattatttggaatggaaagaaaaaaaatattttaaaaaacataccttgttaaaaattattgagctgtatgtctaatcataaagaaaaaaaaaataaaataaaaaagataaattttagctgtttagtcggattaaatatttaatcaatcgaatcattttttttaattattattattgttattttttagtatttcaactgaaatgaaatgttttggttgcataaggtagtttgattgccggttttaactaaaaattttaaacaagacattaatggcacatttactatacagtattcaaaatcgaaataaattaatagagaaatgtaatggaataaatgaaaaataatcggaatcaatatctgtaatatgttgtttactaaattttttttgaaatggaatagttatgatttgtcttgtttactttattacgaaacataatcggaatgcttaaattgattaaattgtcatttaagttaaactatattatatggtagttattttgtaagacatattttaaagtataaaattgtcattatatatttaatattaaaaagtaaaataaaaataattaaaatccattacccttaatagcattccttacaaaattagtgaggaagttctccctttctttctctcttctttaataaatgctctgttttctatttttaataatgtaagtaac

SEQ ID NO: 236134 - DNA, 954 bp, Cannabis indica
tggcctcgctgacttgtaattttacttcttttttatagttgtctcgaaaagaccaacccctactcccaagagggtcgagcgacgcaggcgtctgctaggttttccctttggcctctgatcagttgagtttctcttgaacgaggccaatttgagatctgttggcctacttgccaaaaacgagtacacttgcgattataagtatgtcatgtatgcatcgtggaagcaggttttagtcccagctgatgaggagactcaggactatgtggctcgggcgcattgcctttagaacaaagtcccttaggaagctaaagaatgagcatccccaagtaatcaatgtggatggtcaccaacagtgcttaggaccgagcgtaccacactagtttcttttcgagatagccagtataatttttacacctagaatcaatttctcatagatcatatggcacataggtttgatagttggtacccaaaattctatgttcagattagttgtaccagctcctattatgggattgtcgagcagtatgggaccatgatggataggtcagctcatatagatttgagttgggatttagaaccaattaatccatatgacgtattcatgatcacaggatctagagaatttagtaaatactatagtcctccttcttcgtcttcttatgtttatggtaaatcccttaagtgtgaaatcattctccattttcccctttatctgtttttttaaacaagtgttaatatattgtcttgtctcgcaacttcctaggaaacctcatcggatgtcgacgtggagcccctaaaaaggcccaggaagacaacggccaataagaagcgagcctcacagaccatcgaccttgaagctcctatgaacctagttcaaactcaccctcccaccctcgcacataccgaagagcccattcccaaaacaagtcaggttgcagctgttggaaattattt

SEQ ID NO: 236135 - DNA, 1797 bp, Cannabis indica
aaaacggacattataacggcataaaaaacatgtttcataatccctgttttaaaaagttttactaaagaaatatatatgacaaccatttaaacataaaattaaaatacacagcagatacaactagcccagaacaactcctggtaactcggcacgtaggccagtgaagtcaatatgtacattgccggagaaggtagtcaccttatggcagctttaactttttcttgcccttacctgcaccatatagcacacgtgagccacaatgactcagcaagaaaagcaaaaataataatcatatagtttattatttgaatattatcatttatacacgatcggaatcaaaccattacgtattgttcataagatgaaatacaaatcactactggtatttgccataaataagcactagtatacagatatctggtaatacaaaactataacattcaaccttagataatataaccagccatgtgcataaaaatagatatgctcatatatttgcattgcctaatcaggcaagctcgtatcataatgcaatatcatatacaatatcataaccataacattcgactgtagataatataactagtcatatgcatagaaatagatatgcttatatatttgtattgcctaatcaagtaagtctgtatcataatacaaaattatatacaatatcataactataacattcgactgtagataatataaccagccatatgcatagaaatagatatgctcatatatttgcattgcctaatcaggcaagcccgtgtcataatgtaatatcatatacaatatcattgcaccacctaattaggtgagcccgtgccataacttggcaccaatatattgcatcgtttaatcagacgagcccgtacctacaccaggtacttatcatatatcactgacgcccatacctacgcccgatacgtcgctaggaagaaacccaccaatggtttcaatttatgtcataaccaggcaatttcatatcactaacgcccgtacctacgcccgatacgtcgtcaggaatattgcatcacctaatgaggtgagctcgtacctacgctcggtacttatcaaatgtcactgacgcccgtacctacgcctgatacatcgctaggaatatcgcatcacctaatcaggtgagctcatatattttgtctatagtatcatcacattatcattgcttaaccaattaatctttttattatataacaataataaccatatctcaatattaatcaattcacaacaatactaattgtattacaatacaacgtactatgcagttcaatatacttttcttacctttaatctaagttcatacatgtcggccaacctaagttaagaactatcctgatgatctcggccctatgtcataataacggtaaatcaataagtgtttatcttaaaacactacttaatattcacataagataatctaggttttctaccaaacccgcggtataaatacactaaaataaaacgtttatttttgctctaaaatgtacatcatattgtagagctcgttgcaagctttgaaactgtatatagaacgtcgaaaacggacacccaagttaaaagttatgacaaaaatacgatttctaatctcttaggaatttctaaaaatggtgaaactcgaaaatcccaatttttgctctcaccgaaacattaacaaaacttatccaaatcactccaaacttcacagggcgcatataaaccataaatattaccattcttacataataaaaattaaaattgagcccttaaatgaaaaacgctattaacgttcggactaag

SEQ ID NO: 236136 - DNA, 552 bp, Cannabis indica
cagctggcttcgatcttcaatgaatgagaacaattcttaggtcatctgctcaataataactcctcctatgaagattggcgtgctctggaacaacggtttgcaagtcaatccaaggcccgattacttcaaatcaagtcccaattatccacaatccagaaaggtaatctatccattaatgattactatgacaaagtgaagattcttgctgattcattatcaactgctagtcaccctcttgatgatagtgatttgataatgcatcttttaaataggtttgggacccgaatacgatcctgttgtggttcgtgttacaagtcttgtggataatttgtctttagaatctattcaatcttggttgctaacccatgagtagcaggcttgaaattaagacactatacattaagtgattcttcatccaagatgtaagcaaatctctctcgatacactcctggttatcgttcttatgctcctcaaggtcgtggcactgctaccaacacagatctcagggtcgatcctttggtcgtggccacccctccacttccacgcctacta

SEQ ID NO: 236137 - DNA, 846 bp, Cannabis indica
aattggaggatattatttaaagcacatcggccgtgagttggaagttgtaggattcttggttggcgggaacttctacttaattgatgttattaaataatttttattggaaatcacaaaatacataaaattatatcatatggacaagattaatttcagttgtaaaaattgaaatttgtaatagcaaaaacataatcccaacaaagcggcacatatgcttagagaaactcgacaagcgtaggtacggaaaaaaaaaaataatctccagtaactataaatttaaggacaacaaactctaattttatttttcaaatgtatacaaattcataactaggattagtaacctttgtatagtataatgtaatgttgacggttgaatgggaagtacaaggagtaattgagttttgtatcaaaataggagactagtttatagtataatctagttaatctaatctagaaatcactaaagttttttaagaattttttcaacaaatgcctaaaacatcctagagtaattgtcattgtagaaatgtaaaacaacttctaatagatttaattgagatcattttttttttgaagttggtaaaaacgcgagaaaaaaaaaattaactgccgctcttgaagagtaataatattagcaatactgagttttcaatgataaatttcgttgagtttgaccattgaaccaatattgtgtctagaagggtttgaaggattaacttgcccaaatagctctaaacgtttagttagatataacttgactttcaaatccaacatgaacaagcaaagaaccaaggtgtaaccaagcatttctaaaaactcagaaaaaaggtactcaaaacaatgaat

SEQ ID NO: 236138 - DNA, 2014 bp, Cannabis indica
aggccttgtacacaaaattgcatacatcaagctcacaactgctgatgcataagggtactttctcatgtcctcttcgttttgatggacattgatccttacatagagtaactccatgtctggacggtaattgtcctttcttggaatttttcattaagaatctttcgagtaccttattaatataagtttttttgaaaaagtgctaatgttctccactttctagctttatagattttgatcctaagagcgtagcttgcttctcacaaattcttcatttggaatttatcggctaaccacttctttatatctgataacttctctacattgtttccaataagtagaatatcatcaatataaagaattaggaatactactacattacctttaatgtatttgtatatacaagcttcgtcttcattttattcgaagccatactctttcatatttttattaaaggtgatattctaagatctagaggcttgcttcaaccaataaatgaatttaagaaacttccatactttttgatctttccttggtaacacatacccttatggttgttccatataaatgacttcatcaaaattgacatttacaaaatcattcttgacgtccattttccatatctcataatcataagtggcagctatggaaagaataatgtgaatggatataagtattgtcacatgagagaaggtttcgtcatagtcgacgccttcgcgtgtagcctttagcgtagctttaaaggtctctactttcccttcagtatttctcttcttcttaaaaatccacttacacctaatgggtgtaatatccttaggtggagtttcatactcccagactttgttggtgcgcatggaatccatttctgaatctatggtattgttccacttgtctaagtcagggtctttcattgcttctttataagtcaatggatcgtacttgtctgtgtcaaagacaagaacatgtgcttcatgttcatagcagacatgttgtctcacaatcctcccagtacaacgatgtattggggtttccttttcaagaactgtggtaaccactgtcggtcgttcaactaatggtgctaaaatcgttggttcaaaaatctcatttatgattttctcaataaccatttgactatgtggcttgtgacttttcatataatcatgttcaagaaaagtagtatttgtcgatacaaatactttattatcttgatgattatagaaataggcacctcgagtcttatctaaatattctacagacatacacacttcagtctttggagcaagcatccaagacttgggaaatagtaatttgtgaaattattattttgattaattatggtaattatgaattgtataattaatagtatttaactatttagttttattggataaaactatattaattagttaaatataatattattcttaaataatattaaagagagaaatatattattttagagaaaataatatttattttaatccttgttaaataagagattaatgagaattaattaattattatttagtggcataataaataataaattttatttatgacaaaattgagaaatcaattttcgacatcaaaatatggcccgcatgtgtaggcctaatccacacatgtaggatgatatataaaggctcatgattaatttagtttaattattttattagttaaaataatttaaattacattaagctaattatcttttaattattaattaaataaattattagataattatttaattaaaagaataataattgacataaaagatttaactgatatttgttatttggttattagatatttatatttgaatttgaattctaatttaaattaaattataattttgttttttttaaaataaaagattaaaattgtttatttataacactatatatatatatatatatgatatatagtatcataacttaacagccaaaaagagacaattagtaggcagttaagttcagaaatagaattgcttttcactcactcactctctctctct

SEQ ID NO: 236139 - DNA, 1135 bp, Cannabis indica
ctagaggcttacttcaatccatagatggttttaagcaacttgcacacatttcgatcttcccctggtaagacataactttctagttgttccatatatatgacttcatcaagatcgccatttagaaaagcattcttgacatccatttgtcatatctcataatcataagtggtaggtatggaaagaagaatgagaatggatttagcattggcataggagagaaggttttgtcatagtcgatgctttctcactatgtgtaggctacaagcctaactttaaagatcttttccttcccttcagcatttctcttcttcttgaaaatctatttacatgtaatggatgtaatatcctcaggtagagtttcatattcctagactttattggtccatatggaatctatttcttaacccatggtattgttccacttgtctgagtcaggtcttccattgctttttttgtatgtcaatggattgtccttgtctgtgtcatagacaagaacaagtacttcatgttcattgtggacaggctgtctcacaattctcccactacaacgatgtactagggtttcctttttaggaactatggtaaccgttgtcggtcgttcaactaatggtgctgaaatcgcttgttcaaaaatctgactatttttctatttccttgataaccacttgactgtgtggcttctgatttttcaaatagtcatgttcaagaaaatttctcgatacaaatactttgttatcttgatgcctatagaaataggcacctcaagtttcatctgaatatcctacaagcatacacacttccagtctttggtggaagaacataagcaggacaaccccaaatacaggaatgtttcaaactgggttttttcctattctataattctattagattgttgcttatgctttttgagggtactacattcaaaatgtaggtagccgctagaaatttgtatccccagaagtttagtaacagtaatgagtaacacatcattaatttgactatctataacatggtccagttttttctctctgcaacagctttctgctaaggtgttctaagtgttgtaagttaggataaaatcccttcttccaacaaatagtctttgaattcaaaatcaaaatattcaccaccatga

SEQ ID NO: 236140 - DNA, 1263 bp, Cannabis indica
gagctatcgaagaacaaagaagaaccaacaacaaaataaaataaaacaaaatcatgtcacacagacaagaccaaaacattcagaactatgtcacagagacaagaccaaaatgctcgaaactatatcacatagacaagactaaaacactcaaaatcaagtcacagagacaagactaattacagtagcgaaaattgaattgcagtagcaaaatacaaccctaaccaagccacacctaagcccaaggaagattggcggacctggccagagaaaaaaagataacctccgatagctatagatttagaaactggataatactagtgttaggtttttctttataaaattattatagttttaatttgaagtaaatataattttttttggttatttagaattttagcacttgaactatgacctaagtattattgtgccatatgaacttttcagtccgttaaaaatagtccttgaactattcacagtgtcctaaattggtctttctatcaagttttgtcgcatgtgacaaataaaatgatgacatgactgcttaaccaattgccacacaagttccatgttaacgctacgtgtgtaattaatttgaaaaaaatatgttttttaaacttagttttacttaattttctaaagagtattgctattaagcaccagtggggcctagcaccttttcgacatgtcgcgttgcgattggctagcgataccccctaaaagctattatattaaattatataggacccgatacttagttggactaatagcgatattgacacataggagggtgttaggcaccactggtgccctttagcttatcaattgatttttagtttactgatttttaaaaatacatttttaatgttaaattatacacgtggtgctgatgtgaccattgactaagcatccatgtcattattttatttgccacgtgtgataaaacttaaccaaatgaccaattttacattactgtgaatagtttaggaactatttataatgacctgaaaagttcaggaggcacaataatgcataggccaaaattcgggaagcgaaaatcctaaataaccattatttttttttttcatataacaattaagcccgcacataaaaaaaatttggtttgttcacaggtgctacctaatagcaatgctcaaccttacgacgaaaatgactactattttcgttattattatttttcttaattagacgggttgtatttagatttttataactcgatctttacattgagttaaataaaatgta

SEQ ID NO: 236141 - DNA, 2097 bp, Cannabis indica
aatttattattttttatatttttaatgataaattatacatgctgatatggtaattagataagcaactatttcactattttgtttgtcacgtgtgataaaatttgatagaatgatcaatttacaataccgtgaatagtttattgaccatttatgacatagtaaaaatttcaggagcacaataatgcataagatcactcttaacaacttttctactatcttcaaaatacataatcaaactctacttttctttgttttacaatacacttttatattataccatatatcaatttttttaaaatacatcaccaaaaccttatttttttttaaattgtattataatttattcattttaaatatataatattaatatatacacatatccccatacaaaaataatcattaaaattcaaaataattaataaaatatatttaaaacaatgaataatatttcataaatgtagagcataaatagtaaatttaaaaaaaaaaccttaaaaataaagaatgagtttagagcatcgacttttagaataattctaaaggctaattaagatttttacctcccgaattttaacatgtaccaaatcatgctctcgaacttttaaggtcgttaaaaatacccccaaactattaaaattgttgaatttaagaatttttgtctaattttagtaaaaaaagtctaagatgaatgaaagtttaggagtatgatttagtatatgtcaaaattcgaaggacataatttggtagatattaaagtctgagagcatgatttaatacataaacaatcactgaaatagtaaaattgaatgaaattaaacaaaatccttaaatctaacaatctcaaattcaaggataatttttaatggcaaaaaaaatttaggggcataatttggtacatgttaaagtttggggagtaaaaatcctaattaaccaattctaaaagttaagtaccaaaaatcctaataattttcttttccaaaagccaacctttaactatattaatttataagtcgtccctaaaactctttaaaattacataaagccccttatttctatagtatataacttaactctccgcgcatttcttcatttcgtgttttgttttttcggcttggttgaaattgaaagctctctctcgcagtttcattcgacaaaatgaggtattcttcttacttactctttgatttttctctctgataatccaataatggatagtagaaatgtgtatatataggggaaattctttgaatatttttgtgttttatatgtattatatggctatatagtacaatgctcttttttatcttgtttcttgggtttagtgttagggtttagtttagcagcgttgaagaatctatgcttaacttcaagaatctatgttgaatcatatgaaaggaaagtccaaaaaaattggggaaatttaataagaaagtatttagatattttattaaaaagttgattaagagagttaaaccatatgaaatgtgaatgaaaatgtgacctaagtagttgtagttttattctagcaacagagatttacacatgttctaattgatcatcttactcaggaaaggaaagagagaaagaatttgggtttgcttcggaattttttttaagataaagccttgtttctaagtttagataatgaaagtaggaagagtttgtttgtttttaatttttcaatgggttggtgtattttccatttttggttattggaattctgctcacaaatcatgcaagtcatattgttttcttcaagccttcaaaacattcttcacatgctaaggtagtaaccggtttgcaggctattagctctatctttatttgttaatcttgctttaaatcctttacataaaatgatgcagttcttgtagttttaaaacatatgcatatgcagatttcccaattgaaatgttaaaaagaaaaactcatgttgtattagaataatgataaaaacatatatacagctagtttgtagctaagtataatggatgagtggctggtgtaaagaaagatggtatcatctgtcttcatgatcaaaaggtttgatccttttactgttacttactttccattatgattctgatttgagtttaa

SEQ ID NO: 236142 - DNA, 2909 bp, Cannabis indica
aaaaatggagtttctaagccaccacagtcccagtctcgacctcaggaccataacaacacccagctttttgcttataccatcaaaatttgcactgcccaattcgccttctctgccttttgatcgatatcaaacctcaaatcggcgtttgatggtggagtgacattgatgagagcaggcccaaccagaacaataatccatctgaattaattcgaaatcggaatgagtggcggtggtgaaggtgagtccttggagtatacgaatttatgcaaacggcaggggtggtgaattggcgatcgcatctcaagggaggtgaacggtaagcaatggcatctctctcaatttttaactttatttttggattgcaggcagcaaaagactctgacggaatcaattgctattgattctattcttgatgttgtttacttgcttgagaatcttcgttttaagtagtcttgaatattttgtagtcaattttttcattatttatgaagatttcaaaactaactaccgatctttgagttctccatatgggaggatagaaacacaggctttatcttgaaatgtaggctctctatgttcagtaaaaagttgaaatgaattttcatccgttccttattttgttccaaaaatttttgtacaggatttcttatttttgtattgtcttttgcgatctaccatttcaggtgtcaccccttgaaatgatttttcagaactttaagtgttgctctctagcaagtgatatatatatcgattggaaccatacatgcagagacgaattaatcaaaatgaaagaatattaacaaaagttttcaaatccatatgatcactttgttttcatcattccaaattccaatcatgaactttgagctttgattgttttttcatctttaggtctctctatgccatatttttcttcgatgattttgtctttctttagttcaaaatatttattattgtgcaaaacatatgtttgaaaaaatgactcaaaggaagtttttgtcactctgtcaaattgtttgaattgatttattataattgagagtaatttgtaaaggtaatataatactatttcaaatttctattttgctaatgtttttcattaatttggtaattgcaattatcatagttaattacaatttcttttttgtaacgtgttgttgatgatttattttttgttccaacttttcttctttctatagttgacatggaggaagcatccaaattttcaatccagttcaaccacaagtcaaaggagtacaagatgaaatttatatgttctgtaaatgtttaacccaataaaacacatcttttctaactttggaagagtagagattttgatttcaagaaaaagtgtcatatcgagttacctttttttgttgagcatctattgagaatctcatctcatgaattgaatctcacttgagagaagatacaataaaagtggcatatcagtagaaagaaagataagtgccaatactgaaaactcttaaagattttttgggtttctacatttccttggtatatatggaatttttccaattttttgaaggtgatattttgaattttctagatgtataatcctatatatacatgctctagaataatctaaaattttgcttgcaatcattatgctctagaatcactgaaaccgaactcttgctgagtctcttactgttgcttttcctgtttctcgagctcttgaggtgattgaaattttgggatctttttttatgtttgggctgaaaatttggatgaatcactgattgaatgaagtgtttttgtcttgtttgcttaggtgaatagagttcaacgaactcttgtggaggcttggggtttgattagagagacatttgttgacccaacatttaatcatcaaggtaatgggttgtttgtttcactaagttatagctctattcggcaaccattttgttttttgtttttttaaatttcacttaacaaaatcttgttgtttgttcatggtttttgattaattaatcaaaaaattgattttttaattcttaccgaacaatacctataatttataatttgcatgtgtttagtgaactaaattgggatctgaagttgcagcagacaatggtgtagatgtttccccttaactcagctgatgcagcatataccaaaatcagtgcaatgctctctacacttggagacccttttactaggattatcagtcccaaggttttactattcatataattcctttggtgttaaaatttgtatttggttatgattcataaacataattgaattttttggctataatacatgtttatgtagtttcatttttgtttacttggtgtttgaacttaagtattgagttggaatcaacaaatttttctttaatgaattgtgaaactctacatcagaaatactcattggtgcccaactaataatctgttgtacttgcaggattatcaaagttttaggattgagagtgatggaaatcttcagggagttggacttttcatatctgttgaaccaaacactgggcatttggtaggtatatttagaaaacaatactttgtggcccttctaatcttaattgcatcgatatggattctttttgaatcatctgttcttctatattcctcctagcttggatgttaatctttgggggtgcatatttatctgaatctaatactaccaaagttcgagctttctctattctacgccaccacacgaagccgttcctcagcctccaccgttacctccatagcctacaacgagcaaggtaagattttaaatttgattttaggttttaggttcaattgttatgttaattagacccttgtgttgccactataactcctggtcatataattaaattatttttaaaaaatgagcaaaatataagaagtgggacaaaactctaagaatcatataattta

SEQ ID NO: 236143 - DNA, 1422 bp, Cannabis indica
taaccattgattcatccaagtataaccacaatttaactacatcccaagttcctgattcattaataaagtaagacaataaacaagaaaaaggataatcactgttattaagagatttatgtttgtgattagggagacaatgatcatcaagagttctaatacaacttccattacgtacttccaaatgatccccgaagccattaagtctcttccccataaaatacttctccaagagtaagaagggttatgaccagggacaacctcaaggatagaaaaatgaggaaaataacgagctttaagaaccgaactaagaagggaattgggatttttaaggattcgccaagcctgctaagccaccatggcttcattgaaatgaacaagagaacaaaatcccagaccaccacgaaattttgattgacaaagaaccttccaggatttccaatgaattttcctagacacccagtggaaccccaccagaatttcgccatcctaccttcaatacccttacaaatcttaatgggtaacctgaaagaagccatagcataagctgggatagcttgaatcacaactttcaaaagaacctctttaccagccctagaaaaacacttggaagaccaagatctaagaacagaagcaaccttatcttgaaggaaagcaaaagagtgatatttagatctagagagacattgaggaaggcctaagtatttacaaacaatggcctatcttctaggttaaaagttcgaaaaaataaattacgaatctcttgaaagtattgggagaaaagagaattgaggatttggaaaaattaatagcctaaccttaagccctagaatagatattaaagatctcctggagagctaaacaagagcttctatcaccagaacaaaaaagaaggctatcatcagcaaaaaagagatgagagataggaggagcatgtcaagagatagcaatccctttaagaagatcagcttcctgcctaaccctaagaagagaggacaaacccccaacacaaagaataaaaatgtaagggataaggcatccccttgccgaagacccctagaaggtttaagggaacctttgacaacaccattaataaggaagaagagattagtagtagaaatttcataaccaaagtaacaaaattaatagggaagttaaagtggaacataatactctccaaaaaatgccatcaaacgcgatcaaaagctttagccatatcaagttttagagcagaccaaccccttttaccattctttcgagagttaatggcatggataatttcttgggcaataagaatattatcaaaagtaattctcccaaaaacaaaagaactttgaaaatgagagataattttatcaagaaccactttaagacgattagctagcactttataaataaatttatacatagtagtacaaagactaa

SEQ ID NO: 236144 - DNA, 1236 bp, Cannabis indica
aaaggagttccagctggctagttgtcattcctaaaatggcagatccagatagtcgactctagtagactttatcttatctgaaagtgtcttcagcaagtacccttggttcgtgagtccagaagctcgttcatgttcccggaggccctggtacttaagttgacggagacttcgcttaaggagagtaaagttagttattaattttaactaacttaacaatctcatttcttgcaacgatcgactttaggatcttgatcttaagcctataaataccaccttgtctagttatttcaggtgacacactttagagatgagattaagagtttgagagaaaaaacattaagaggtagagagaggtgcagagaaaagagatgtagatgaatattcttgggtgtaaagtgtaaaagttgaaacactttgtggagtcaacaaaaagtctcgtctcggctgcattgtgcctattcttgttcaatcaataaagaaggattacggtggtgttccagaactaatatttaaaattgtggatttaagcctcaaggcgttttttttggtgagacgaggtgtaagcctcaaggcgcatttaggcgtaaattgaggcgttattaattaaaataatatttttagagttactaaaaataacaaaaataaataatcttataaataccaaaaataccataaaatatctcataaaacaaagagcatttatttttaaaattgtgtatgtttagtttagttggacttttttcttaagttttttatttgaattttattgagttttattttattttattgggccttcttttaaataagttaaaaatattattggtccttttttttttttttttttttattttttttttaaattgctgaataaaaataggctaagaaaattcttgttttctaattgaggcgtaccctcactgaattttacgcctcatgaaatttcaaactgccttagccatatgaggcgcatgcaatagagcgttttctttctgccacaatttattgcgcgcagtgaggcgcgcctcaaaaacacaattttagacattgttcggaattggagtagagccataacattaatctatcggacttgaactaatatatatcttggttgttgtttttttttttttatttactgtcatttggtgttttatagttttatattctgtttgtctcttgttgttcgtattattgtttttgtatttgtataatcctatctattactaattgttgtaattg

SEQ ID NO: 236145 - DNA, 1266 bp, Cannabis indica
aagtggggtctgcacgcgtcagaccgttgtcctaaaaatagctatcaaccgtataaatgtaaaatactaaagaaacaaataaaaaagtaaataaaaaaagtttttagttagtttctgtaaatattcctataaattttatagtcatataatttattaaaatgtattttttttttccattgtacacaatttatattcatttttttagttattactaaaacagcgtaaagcccggtttcattgtctagtttaatataaatcgactacaaaattacttttgaaaaattctacaatacacatccttaaaatggatatattgatgtacccttatctgtgttagcatccgtaataattttttagtcaaactttttctcatgatcatgtacgttatagttatttaagacatcttgtaaaattttaagaaattcgaaaaagtttaacacgtcgaaaattacgttcaaacagtgtgttgcacgcgtgaatattttattctatactcgtataaaataagttgtttgaacattattttctatattgaaaattattccgaatttctcaaaattttataagatatcttaaatagatataacatacatgaatatgaaaaaaaattagactaaaaaattcttctagatgcaaaaacaaattaaaagatgcatcagtacatttcttttaaggacgtgcatcgtagaatcaccgattagttttatgttaaatataacaaaatttatctatctctatctaaatttttagttgcaaataaatttcctcaattattgaaagtattttaagcatagaaactcgaatttcccaataaaatttctaaagtttcacacggcgaaccaatcagaccctaccatcaaaccgccattcatttcccgtttcgaatatataagtagtagggtgcttcaaaatgaggaaatggacataacaatggcggagacagttcaagatattgtagtccgtacattgagtggcgaatctaccatcgtcagcctccccgctgactgcactattgaacatctcaagattcttctcaggcagaacttccctgcggccactcgttaccccaattttcacctgtatttcaaggcaaactctctttatccttcttctatccatgtattaattgtttaatcaattatataatttcacaatttgtgtataactgtatgcgatgaatgtatgtgggcatttagcttttctgagttgaagcttcaaatgtaatttttctttcttcttttgtttttggtttcgattgtggacctg

SEQ ID NO: 236146 - DNA, 734 bp, Cannabis indica
ttcaacagggtggaaattggagatgtggaacagaagtatcatcaagctaaagcggattaccagtgtgctttaactattgctcaggaggatccaacagatgattgtgctcaattacaagagagaaatgcggccgctatgtttcaacaacaggctgccatgtatcagagttttctgatccagagaagtaagataacttggttgtccaaaggtgatgataatactgctttttttcatgcttgcatcaagaaaaggagacaggagaacaggattgtctcgttcattaatgaagatggagaaactgtggaagactacgagcaggtagttaaccattttgtctctcattttaaacattatatgggcagcaagagttctagttctataaagtttgatgacagatgtatggagatgggccctcggcttagtatggagcttcaattaaacttaataaagaagttttctaaggaggatgtccggaaagcaatctttagtattgctagcacaaaaagtccgggcgcagatgggtataattctgagtttttcaaagccatgtggaagttaattggggatgagatatcggaggctgtgcttgatttctttgacacagggaggatgcctgaagagttaaacgaagctgttattgcccttgttccaaaagttgagttacctagtaaagcggtggattatagaccgattgcctgctgcactactctgtacaagtgtatatctaaaatgat

SEQ ID NO: 236147 - DNA, 957 bp, Cannabis indica
acgagatgttgtatggtaggaaaagtagatctccagttctttgggatgaaactgtagaaaggaaatacctaggtctggaatcagtgcaacgaaatattgaagctatagaaaagatcaagcccagaaagcttgcctctcagagtaagcaaaaaagttatatagatccgaaacgtagacatgtagagtgtcaagtaggagatcatgtattcctacgagtgtcttcgatgaatgggatcaggcatttttggaaaaagggcaagttatggcctaggtttatagggcctttcgagattcttgagaaggttagactggtggcttattgcctggccttatctccaggactttcagcagttcacaacgtattctatgtctctatgttacggaaatatgttttagatctcactcatgtgctgagttatgagaaccttgaacttcagccagatctatcgtacaaagaacaactagttcagattttagataggaaagaaaaagttcttcagaacaataccatagttttggtcaaggtattctggagaaacagtaaggtggaggaagccacctggtagttggagtctaacatgagggctcaatatctagagtggttcaagttagattttgaggaggaaatctttttaagggggagataattgtaaaaactgcttaattttcttggttcaaaattagcagataattagggcttaattatgaaactagattattaattatgatttatgattatacgaagatttatttgaattcaggatgtattattgatgccatatatgaaattttacttttttcatgttttgtgcccagtaacattggaacgtggcctttggacaatagaattacattttagtattttagttttagcgaggaaatatagttagacattggaaatgtcaagaatatttgaggttttagaaataactaaatacccctaggtggtaagtggcc

SEQ ID NO: 236148 - DNA, 642 bp, Cannabis indica
ttatggctacgaggcaatgttgcatgtatagttagtgccacggtctcacagaagaataacctatgaccaacaaacaaatagcaccttgctggcggagtcccttgacgaagtagaagaaagaacagaacgagccaacctaaagttgcaggcctaccagcaaaaggtagcaaggcactttaacaaatacgtaaagagaagaaaattctttataggagacatggtgctctgaagagtgttcctaaacactaaagactcatcagcaggagtgtttggacctaactgggaaggcccttatcaagttacagaaagaactagtaagggagcctacaagctggtaagatacaacgagaacatggagctcgttctcctactaagatactgaaaaaactctacgccaaagtagcagttatatctgctcaaaattaaagtacaaaaagcactagcacccacagccctttatgggcgtggtctcccactgttcttcaatagtggcctctgcttcactaagcgagcaggggtagccacttgacatctagaagctaaatttgtgtaatataggcttgtagattcaatttatgtaagttgtacagcaacaaagaccaattactgaataactgcaatatttatattttgtttattgtg

SEQ ID NO: 236149 - DNA, 751 bp, Cannabis indica
agacgtgcctaccttatagtaggatgtccctattctttttatctttttaggttaattaattatataattaattcaattagataaatatttgaatttgaaaagtatttaaagatatttcaagttggttgagatattttctcatctgaaatatcagtaatcgaatttggttatagatatttatttaaataattaaataggatttaattaattgagatttaactactataaatagaagcttgatttgagaaatcaaaagaagcttttcataattggcagggagaaaaggaaactatttttctctctaaaaatgttcttgctcatgtgttgagaacttaacaagaacaaattatacacttcatcctaatagccttactattctttgtgtgtggtggaacgatttggaagactacagtgtaagtttcttattaaccaaaaggatacaacctacaacaagttttgaggatactctaatagttatcaagaggtatatattcttttcttgtaatttttgttttgatttaatgtatacacatctagatatccatcgggactacggtacaataataattagatatacaaaaaatttcgctgcgtaactgatttagtaccataaaactaataaatggtatccagaatagttccatgaatgtatatacattaaatatgctccaggttacccacaactggtctcgccgggctccgaaaatggccatcaccaccaacgagctaattttcactgttagatcatcat

SEQ ID NO: 236150 - DNA, 1277 bp, Cannabis indica
attgtgtaattggatgaattaatgtgaatgaatgctttgaacatgttatatttgtaatattaaacggttttggagagtttgaaaaggtttggaacagaattggttgggttttggagctacaaaccagagttttcccctttctgcagcagggaaaactagttaaccagtttcacaggcatagtgaaaatcggtgaaccagttttagcagcaggggaaaatctagttttaaggttcgagaccggttttgttcggggtatttcccagagcttagaataggacattttgatgatatttaagttattctgaaccagtggagagttagatatgtctggttgcaaagttagggttattttaacgtttagattaagttgtttttgttgtcgtgacataggacccaggatcatcgagggtagtttctctcaggctggcccgcatacttgactattggactgaggtaagaaaagtactatatataatttgtagttaataattataaatgtgatagtctcgattatgaacgagattcttatgtgtatgctgtgactcgattgtgataaaggggaaatgttatgaaacgattatcatcaatgtgactcgattatgatcgaggggaaatgttatgaaacgattatcatcgttgtgactcgattatgatcgagtaaaagatacggtcattaccgttatgagtaattactcgttgaaaccgcggataggtttttttacctatcgtttgcgttatcgggcaacgatattgacatatattgctcgttgataacgagtggttagggtgcttcataaaacattgagtttaggtgattacagtattgtgtaagtagagtgcttaatgaagcactgatattatgtgattaaaataatatatgactagagtgctttacaaagcactgagattatatggctatggattggatgaatgtctatttagtgacaaggtgaaattgttaattataagttactatgattattcttataatgtattatgaatgtgttcccatagacatactgatatgtatatgcatgttgaatatgtaatgatccactgatatgtaccttatattgtaaatgctagtacttactatactttttgtctagtagcttttcttgctgagtcattgtgactcacgggtgctgcatgatgcaggtaagaggaataacagttgtgttcatccatgagttagagatctcccagcaatgtacatatcaactgtgctgtcttggcttttgagaaacaacaccaaccatttctatgattggatgta

SEQ ID NO: 236151 - DNA, 1012 bp, Cannabis indica
tactctatttgtgacttaggttaaactttggtattttggtgctttaagggcgacatttgttgcctctaatagtactaaagaatcattcttagctgacgcaagttgcctctaaaagaatttttagggttgacaataattatagtgcctaatagttaatcattagaggtgataaaagtcactcttaatattaatattcagatttgacttttaatttttaataattttaatattaaaaatattgaaaatatcaaatttaatttttatttttacaataatcataaaactaaaatcacaacatatgacacactaatcattttgttttggtattatatatgcaactgattgtttgtatgactataaaatataaattttagtaggagtagacatgatttatccaattaattataaaaaatttgatagttgtattctaattagattacattggttattagatgtcaatttaaaaattcaattaaaactcaatctaatttaattacatttaatatatattaaatgattatttatatttatttgtatctatactaacggtttattttttttattattttattttaaatttgtaatatttagttgtttcacatatttattttcataatattttgttttattttattattttatagtgttgatttacttatttcaaatttttagttgcattaaaatttttatatgcattaaaattaaaattccatttaatttattaataattcttttgaaaaattaattatatatattatattaaaaatttcgaaataaacaatatacattacatttttctcaaataatgtttatactattatttaatcatattttaaaaaattaattaaattatacatacacaacttgccaaattactacaacaattttcacattttctctcatcttccactcaatttctcaaatttccaattaatttcctgaagttaataacaattttaatctcagacaattgatcgacaattactatagagacattcgatgaggtgcgcta

SEQ ID NO: 236152 - DNA, 1166 bp, Cannabis indica
gaccccagatgccaaaaaaaaaaagagaggaaaaataatccacaatcacctcagataaaccatgctcccaatccacccaatctccttacaaatttttgggcttcgagattagattattcctcttatggttattggccattagatggaagtactaactattttgatctccttctatgagctaaaattattttgccctttgtttccaaaacgtctctctttgatcaagaacaacagaaagttggtgtaacgccgtaacgaaaggcacgctacaaacaaccattaaacatagtctaatcccgctaaactgggattactagaaataagagcagaaatttaaactttaaatcaaatacatagcgaaaatataacttgtaactatttaatttacaaaccattccaagagattacacatgtttcaggatcccgtaaaaattttcacaaagcattacaagccatttttacgtgccgacctaagcgacaaaaatcgagaatacaaaatacaacatccgctagacctaacccgcgtggtcaagtgtggcccgaacatgtacaatctatcgccaagctctcaaaatcatggctgatcacaaattgatttaccctttcctacacagtagagcacccgtgagccaagcccagccagacaatataaataacaatatattctcaattcaaattaatactgatgccacggcatctattgtctaagtagcatagacctatgtgctgcactcacacatgtatttataataaggccttagattggttcatctcggttctgattactgagtctaacctaattatgtcttacccgcataattctttatctcacatatatggggatactattgcattcaaaatcatttaaacactggagtaataaccctagatcgtataaccactcactttagggtaataaccctaatcccggtttctcacttaatcacatcataatatcaaacatgtgcgacacaatgcttatctctatgtattagctactatcttacctgatatcccaagtatgtggagatttcaaatcccgagtgttcctgagcaagcaccgatagtcgtagtcacacattcttgagatttcacaaatagggctaatcccaaaattcaatttcacataatcacctaatttctattccaattatagataagcatat

SEQ ID NO: 236153 - DNA, 822 bp, Cannabis indica
tatatatatatatacattttttaaaggggtattttagtaggttttatatctatttttgtatttaggagagtttttcaatctaattttttttataattgtatatattgtagttattgaaaagcacatgtaaattttcaaaaatttataaataatttatagtgctaaaaataatatttaaataattatttaccacacgaataaaaaaataattacacgtacaataaaatatttaaattttatttccgatgctaagtatttgaaattttcttaaaaaaagaaagagttttttctcggctaaatcctctcaactatcatttcacttacaaatttaaagtatcatccagttaactgtcaccatgaactgcttatgtgcatacttttgtatacgtggtacgtttatattggtatatcgaatattattattttcaaaattcatttaaaattataaaaataaaaaataaaaaataaaaatattatacattttttatattttttaaataataatattatgtgcattaatataaacgtatcatatatataagagtgtacacataatccgtctatgttggcagttaactgtaaaaaatggatgacaccttaaatttacaaattgttaaataatttggagagttttaccgttaaaatttgaacttagatgattaagtgcaagtagagtaataagataatttaaccgcaaaaaactctaaaaaaaaaaaaacaaagttaacccacctaaactgtcgaactaggggttaatttacggaactataacactttcccaaattttcctttttaatcctttgacctcctttgacttatgcc

SEQ ID NO: 236154 - DNA, 642 bp, Cannabis indica
tttttcttttcttctggcttccaggctgtggaccgcccagagctcctcacagagtggattaggattccacctcttctccgcacggctcctacccggctgtttctccaacatggcaagaccttccccacttatgacaagaacgatctcaacgtcgggacttggtcacaatggagaactgtcgcaaggctaagttgatctctgggagtcagttggtggatgactttaatctctccaaggtcctctgcccgaatgtacgcaccccgaccgcagagaaggcgctccgggctgagattatagcttcggcggaagaccggtaccaaaagtacctctttaggagggagcaggagctggcttatatcaaggcccaagctgcagccgggaggacccttcgcctggaagcgggcacggattagatgccctccaggcctaagtctttggtcctggttcctaacactggtgccccagatgccagcacatctggttccggtaagtctcctttaaaggtctatcatgttccttcggtccaagagtattcccggtataggcctgtagaattcaacaaatgccttcttaagtttaggatgcccccactcggtggggggatcatgccaaggtctttttacttttcccacttaggtcatt

SEQ ID NO: 236155 - DNA, 907 bp, Cannabis indica
ttctaattataaaattgaaaagtaaaacagttttatagaatatgtttttgaaaaatatttttacttttctacttttaaaaaccgaaaagtgattaaaaaagtgttaccaaacgccacctaaattgtaacaaaaatatcaaaattatgtggtcaaatttatgatacgaggtgaatgcaaatttagtttaaggttgcaattggaattgattaattcgaagattgaattttcaaaaaataacgttaatgcaacaattatatgatatcttattttttaattatattaattttattttattttttttcttcttaactcgtattacttaaaaaatatatttatcaaataaaaataaattatattttaaatattataacaaacaaaattgtataaaattttatttaaaaaaattatgaaaataaaattaaaacaagtaataaaattaacacaaaataataataaaaaaaaaattctgaaaaaatatgaagaatgattcttaaaaattattttcaccttaattttttttaaatattaaagtgttttataaggtgcaaataaaattctcttttgtatatacatgtgggtgttagtatataaatagatatttttttttgaaaaaattacacgttgatttgtttaattcagttcgatggcttttgtgttattaaaattcattaatgttattattttattttgacaatggaaataaaaataaaaatataactacgtacgtgccattgctttgaagttagcgtgtgtagatatattctaaggaattttttgtgtgcaagtatagaattaaatcataccaaagtagatatattaattatatattttttttcttaacatattttcccaatatattttctctatttaatttttatggcttcgaaaattataaataaaatacaa

SEQ ID NO: 236156 - DNA, 571 bp, Cannabis indica
tttgagctaaaatgttatgttgtagaatttgatcacacacaaagtggagatcaatctcaatatctttgcatctggcatggtaaactagattagcagctaaggcagttgtaccttggttatcaaaccatataatgagaatatctgaaagtgaaacctgaagtttagttagaagggagagaagccatcgatttctcctacaatattaaccagagcctgaaattctaattctgttgatgatcgagcaactacttgttgctttttagctgaccaagaggtgagattaagtccaaaacatacatcatagccacctgttgaattcttgtcatcaaggaaaatggcccaatcatcttttgaataagcttcaagagatagcctagaaactggtcaaagtaaaaatccttcagatagtgtgccttttagatatctcaatagccgcttacaagctttctaatgtacactagtagaagcatgaatgaactgagatagcttatttataatgaaggaaacatcgagccttgggagagtcaaatactgcagtgcatctaatgttctgtgaagggttttatcttca

SEQ ID NO: 236157 - DNA, 1570 bp, Cannabis indica
tattctaaaaatgtaatgtatgtgcttacccattatagatattgtaagcaaaaaggaaaccttccttcatgcttttagccctataaatagtgatccatcctcactgtaaaaggggtcgaaagaattacttcagagagatctaagaaaaaatactcagagatttcattgtgagagctttgagagaggaaacactgttttgttctcaagttaatacaatccaaggggagtaggctattaccgaactaaaggggtcgaacctctttaaaattttgtgttctttattgcttactgatttttgctctatcttaattacatttcttatcgcttattaattgactcattgtcgttggttaaaagcgatatcaacattttggtgctttcattgagagcagaaatccaagtgtgctctttgtcttaagtttcatcagacacacaaaatggtggtgcaaactcgcagaggtgtggttgatcagagtgacccactgttagcagatcttacattgcagactcctgggaatacaaaggtcccaccataatcctgaataaccaaacatgcaaccaccaactgtgggccaaggtgtaacatcccgtctagctgggatcatcacgattttctatttatcatcttaacctcttatgttttttttttccaggtttttgagaagttcttctaaaagaattttctaattgcatgatattatcttacaatttaaattaatttgcttacattatcatttattaatactctttattctttatatttggtatcattattttttttttataaatttataaatttttatattttgtttttgagatagtgacgattacaaatgagatacgttaataacaacaactttaaatgttgtgacgagtgagatacgatgatgataataattttaaaattgatgagttttctataaatttatcaatcgttatatcttttttcccaattctatttttttatatataaacttaatcacatcaaaataatatttatcaaattactaaaattctatcatgttctaattctaatttaatttatgccaaaaatatatattttgaaacggatttttatagaaatatatatgtctacaataaattaattaataattataatttattgagtttaaaataattagaaaaatcaagactctaaaacattaatttattttttctgtgttattaagagttaaaaaataaaatttcgaataggtactcattattaaaaaaattatacgaaaatgttaaattttaaaatttgatataattttataatttaattatcattaaataaaatacaaccgcacgagaagcgagtaattttaaatgtaacagacggatattctcttcttcatctaccttattctaatcactgatcatatcatgtgatttctgtattttagaaatataatcccaaatttaaaatcttcttaatattaaaaacaagtgtaataatgctaaatacactcaaattgcagacactttttttttgagggaaaatactttattattattaaacaaacaaagattcgtttacaataatagagtatataggtggaggaataat

SEQ ID NO: 236158 - DNA, 3052 bp, Cannabis indica
tatatatgtatatataataaaacatgagaaataatataatgcttctgtgctcttgtgttggctagatcaatactacaaggttggatacttgctcaacattcatactctccaatcatgggattctcaacaaaattactttattggaaagctccaaattacgtaagataattgaaattaaacgtgaatgctgctatttgtagtgataatttaataacattataacggtaatttataactcgactttgatcaatggtttttcgtggtcatttgtcctttggctctttcatttgctctgcaatggtttttgtgatttgttgttttctctttttgaggttatttctcaatgggttgtatcttcaagtcgatcaaaattttgttatttgtctttttaattgtatattttgaacatgtaatgttcaattataataccacacaatattatagtttagcaaaagataatgtgctatattacaaagaacaacataccataagtaaatcatagttatatgttttaagttccaattatataacacttaaaataaaaggaagaaaagggataaattctttggttaaaatgaagtgaagaagtaatgcttaaaggaaacgtagtgttattgttgttctaaaaagaaaagaagagaaacaagtaagcgaggagagtgggaccctatgaaaagcctaacctttaaaaagccccgaaacaaaccctctcatctccacacatgcacagatacgtctcctcttacaacacttcacttcaaccaaaaaaaaaaatactacatccaatccagaccggaccggacccgaccggtcctccggtcccaccatttcccggctcacgcgcttcatctgttcactaatttcaactctcattgatcaaacttcttctgcttctgctctgtcttcgtttcttcatttatgcttgtttaagccaattgggtattcttttcttcttcttcttcttctttcaattgagtgtattggtttattttatttgacttttcaagattcattactagtacccgattttttttggccttcgttttgttttttttttggggccaataataaagtataaaatgttttataattaatattattaattaattaattcatgttgtttgggtttaaatttaatgcgttttgatttagtttctcttaattttcgcctttttttatccgtaacggttttgaactaccgcagatcgatagggacgttgttttcgtctctcgaattcattttcgcaaaatctaacagttaaaaaaatagataacaaattctctctgaatttaaaaactgttaaatgggttttgggtttgtgagcatttgtatgttttaacctttttttctcttttcttgagtagtggaggaagataaggtacgagtgaatttcatcgtatcatatatatatttatgtgtgtggtgacttgggtttcagagaatttaccaagaattgttgtgttggagatcgttaaaggttgaggaagcagagcaattcagcaaagttgaaagagtgtttagtttcgaactcggagggggcggctcatgaattatgaaccaaatttggaacctgaattgaactcagttcgtaattttcagtaatgggttgtgtttactcgagggtttgtataggagaggtttgtacaccaagggacgcaagaatcaaacagacccaaaatgtgaggaccaatgagatcgctgttttctctcctgaatcttctaatagcgaagaaggtgaagccggggaccgtttgaaccagcttagagattccgaggctggtatcacaaggctctcaagggtttcgtctcagtttctacctccagaagggtgtcgaactgttaaagttccttcagggaactatgaattgaggtactcttacttatctcagagaggatattaccctgatgctcttgataaggctaaccaagatagcttttgcatctacacaccatttgggtccaacccagatgaccatttctttggggtgtttgatgggcatggagagtttggggctcagtgttctcagtttgcgaaacgaaagctgtgtgagaatttgcttagaaacaataagtttcaatttgatgctgttgaggcttgccatactgcttttctgaccacgaatactcagcttcacgctgataatatagatgattccatgagtggaacaactgctattacggtattggtaaggggtaagactatttatgttgcgaattcgggtgattcgagggctgttatagcagagaagcgtgggggtgagttctttgctgttgacctttcgattgatcaaacaccatttcgagaggatgagctggaaagggttaagctttgtggtgctagagttcttactttggatcagattgaagggctgaaaaatccggatgtacaatgttggggtactgaagaaggtgatgagggtgaccccccgagattgtgggtaccgaatgggatgtatcctggtactgcttttactagaagtataggtgattccatagctgagtcaattggagtcgttgccacacctgaaattgtggttttggagctcacaccagacaaccctttctttgtgcttgcaagtgatggcgtgtttgagtttctttctagccaaactgtagttgacatggtaaggtaccctgttcccactatcttgcaattcagatttggaatttatgaagtttgtatagtttgcttgatcgaatgttttcaagcttgttttattttgccgtggttgcatggtactcttttaaatggtttttttttttaaaaaatgcctgtattgtacacaagtttaaacaaatattgattttgatattgtagttttgtttcaactattgaatcatttttagattcaagacatgatattcgcttgtcagatctttcaaaaatcatggagcgttgctcactacatttgtgtacatgtatgctaaaaactgcaaaactggtatttagttgtcatttatgattgggcttgtctttccaggttgctaagtataaagaccctcgtgatgcttgtgctgcaattgtagctgaatcttatcggctttggctac

SEQ ID NO: 236159 - DNA, 1621 bp, Cannabis indica
acaactcatagacatgaattctacatcaggataaaaaccaagaattaaaagggaatccttggacctgctcgaagaaactttttagagtctcaaatatgcaatgcaacatatgtcagtgatttagtgttacaaagcaatacacaagaccctaaagttggagtgtttaatccaaattaggaaggtccttatgtaatagtagctatgataggaccaggggtggataaattggcttggccaaatggcttgctagtaaagaacacttgaaaaaatgagcattttcgaccttattaccagtgattaactttcttttgtgtaatttttaaactacaagattctgtaacatatttcatatcaatggaatttacatcttttagttctcaagtgatcataaattttttactttaaaattacttaggggcatactattaataattaaccaactttgtctaatcacattatgaattgggctaagggtcaaaatgttaatattaaaatagaaataaaatatttttttgaaaaattgataaagtggcattagtaaaatcggtccagaacggttcatatattgatgtatgtactttatctttaaacaaaaaatagtaagtagtggatatcacaacgagattgccaagaatcaatcttgaaaataatacaaaagctaaaatgtgaacaaaaagactaattgcttgcatattttaaacaaagacatctaagcaacttaaaatggttgtataagatgttcaagtttattttgttacttgagaaataacaagtaataggaattgagattccctatgaaggatgttaaaatttaaatcattcaaaagaaacagagttctctgtaaaagtgattaaatcatgagttgctttaaaataggaataactcacccaagtttttcacaagtaaagtgcgaataatattttaaccaacatatataagggaaaaagatatgcatataagttaaaatattcatatataaataaaccagttggtcgtccaacgaagtgcaattcattacacaataaaaaaatagttaaaatgaccaagtaaactgtcctggatcgaagaccaatttcttaaactgacaaaataaaataaaaactaactctccttttgaggagacttagagataatgagttctcgttcaccattacccttggcttctatctcttaggcaagttttttagcttgcttggcctcctattctacttccatctccttgaaaattttaatgctctcctagacatgtggcactaagaatgatgtgttcatggttttgttcttttgctaaactctggaaaagagacaactaggcaatctcttttacctttctgtgcgtctctttaacatgatcatggagggctttcttcttttcttcatcctttgcctttaaagcttcctccagttctaaaattttggttcttttttcttcaagatcaagaatttcttagtctttgaaggattttaagttaaaaaatttcttttcgcaaagggaaatattttccaaagcagaatctcatccaaccgcaaggacattcttctattcttcatgatcttgcataagcttatttatgcaagacaagtgttgagtgtgcaaagagaaactcttgcaaaccatca

SEQ ID NO: 236160 - DNA, 988 bp, Cannabis indica
aataatatatgaaataattccctaattattaatagtgatataatattttatagtagtgttaattaagccctattaatgttatttagcatttttcagtaatattactatacaagagtgttcaacatatgcacttatgtagaatttcaaattcaaatttagaatctcaataaaaaaatatgtaagactatatatatatattaaatctaataaaagtataaaattagttctaggtaaagacaaaagacaaacccctagttggaaaaaaaacttaaaactttatattttgagggcaaaccctataaaactcttaaagattatattaattcgattttaaatttaattaattaaccatttagtgtatgctccacatatcaacaataatattggacactatatagtacattttgtctagatcttataaaatggaaaacaagaattgtactagatagatgggccaagtttttgttggtatatatatctctcatttttattttttatggggaaagtgggcaaagatgatggttcaatgtgatttagtcattattaattaatcagctcatcagcatagcgataataagacgagaagtccttttgagaatcataggttttatctcaaaattaattggtgataaatggtacatgttcttatatatagttcaatacttttacatttaattatgtgggacaatattctccaatatccctcctcaagatagtggctatttttgctcaccaatcttgaatcaaccatttgctcgcttaattttattcagatctcaagtatctttgcactatctagacgggtgtggatcgaaagcccgctaaggatatgactctgataccatatgatgagaatcatgagattccatctcaaaaccaattggtgatgagtggagtatatataactcaatacttttacatttaatccatctggaacaatgttctccaataaacctgaatagtcatgtctagcatcctctaatatatt

SEQ ID NO: 236161 - DNA, 894 bp, Cannabis indica
ttttttttaattttttcgttttgagtttagtcgtaatctaaagtaaaattaattatttataaaagaaaaaaaacaaaatcaagaggccatttgctctcatcaatgatgatgactagtgtggagtataatctatccatttaaaaaataattggtgaaaaaaaaaaatcttgaagctacttatatattattatatccactctcatactagctaaccaatttatttggagggatcataactcacaagatgatgaaaagttttgaaactatatgtatgtaagtttatatcaacatataattactctctgtaagaaaaggagtggaggacaaagatttattaataattggcatgtaagaaccattattttctgtagtgacaaattatgtccagttgcatctgtgactcgtagtattttgtctggagttcgtactattagtgttagtccacgttagcaaagatattttggatttttattgttcagatgataacagctgtctttttcgggattcttggtttagctgggcttatatacaacttatgggtattatgttgatgaacttttttggatcagagattagggattacgtttctttcttcttgtttcttctttatgttccatggcaggtgatctttgagcttggaggtattaatccaaagttgcagatcaaagcttgaagatgttaagttcagactgaagggatttcagtatcatcttcatcaccagatctgaagggagttcagattgaagaaaagtgttgaagagaactcatcattcacacaaggggatcttgtgtctccaatcaagggtcttggttggtatgggtatagattcactgtattttgtaaaagagtgtattgtaatattgttggttttgtaagatacatctttgaatata

SEQ ID NO: 236162 - DNA, 1797 bp, Cannabis indica
ttattaccacatgttttttcttttagcagattaaatacctaaagttacgtttacgctgcatctggtatgaaaggaatatacataaagcttatgagactgaaacatgttcttaagaagttcaatcatgagacaattggtgatattggtaagagttttcaacaagccaaagatagatatcaggaagcttgtttgaaggctcaagctcatgctggggatttagattatcaggatcaggagagggtagccgctgctaattttaacagttgtgacaaaatataccagaagttcctcagatagagaagtaagatcaactggattcaaaagggagatgataacacaaagtattttcatgcttgtattaaaaaaagtaagactgaaaacaagattgcttcatttaccaatgatcatggagatattattgataacttctctgaagttgtggatcacttcatgaatcattttaaaggctttatggggacaaggaacgatgctgcagcaagattaaatatggagtgttttgattcgaattctagattgaatctagaccaacaaattcttttactgaagcctttctccaacaaggaaatcaaaaaagctatgtttagcatccctgactcgaaatctcctggtccggatgggttcaactttggattcttcaaagtgatgtgggctgatattgggaaggaagtttgcaaggctatctctgatttctttattacaggtttcatgccagctgagcttcactcatccatgatttcattaattccgaagaatgataaccctactaaggcagttgactttcgcccaatagcttgctgctctacattatacaagtgtgtgtctaaacttctctgttctagactggccaaagttcttccctcgattacaaatcagaatcaaggtgcttttgttcaaggtagatcgattgctcataatgtgatgattttgcaggatcttttaaagaactataacaggaaaaacatctctcctcggtgtgccattaagattgacattaggaaggcttatgatacggtgaactgggactttattgaaagcttattggcagcgtttaatatgcctcagagatttattaaatggctgatgacttgcattgcctcgacctcctactccataatcatgaatggaagaattcagggaagatttaaagatgaaaaagggctgagtcaaggtgatcctctttagcctttactctttgtccttgttatggaatatttgactagattgcttcagctggctagcaacaactccaactatagatttcatccgctttgcaaaaagcttgggcttatcaatctttgcttcgcggatgatatcatcatctttagtaagggttctcaacagtcaattgcagctctaaaacatgttcttgaggagtttaggaaagcttcggggttacacatcaatcacgacaagtctcaaatttttcttggtggagtcaatccgttgaacaaacaaagcattcttgaagaattaaagctcgctgaaggaaagttcccgatgaaatatcttgggatacctttgcgtccaactaagtggaaagctgaagactgtggcataatcatcaagaagatcactcagagacttcataattgggcaagtaagcacctttcttttactggaaaaattcaattaatgcactctattttgcttggcctttgaaactactggatgagtatttttgtgttacctcaaagtgttaccaaggaaattgagaggctttgtagggggttcctttggggttttaatgtcaacggaagcaaagtccatgttgcttct

SEQ ID NO: 236163 - DNA, 2032 bp, Cannabis indica
atgcaacttttgtctaatttttgatttttcaataaaatgagaaaagaattgattttcccttgcttaataatcagcatataacttaactaaattcagattaataaactttaaataaaatccacaaaagacaaaactcacttaggcaaaatgactattttgcccctccaacacaaaaagttataaaatggcactaaggggtaatttgggaaattctaaaatcccgaccaatcccgacattcccaatgtctaactaaactgccccgctatacaaaaatactaagatgtgattctactgagccatacaccgcgttccaatgttgttgggcactgaacatgaaaaaatatgaaatttctatatatgacatataaaatgcattctgaattcaaataaatcctcataaattaataatttagaattaataactatttttcataattaactctaattatcagctaatttctaaattaaagctaagtggtcttcacaagtcctccctctagcaagggaagatctgtcctagttcctgaggaacttggtgatagtcatccttgaagtggatctctaaggagatcttggcctcttctgtcagttctctgattgaaccgtcttattagatcattggcctcccggttggacgatttaattttgcttggtgagatcgaaggatgtactcctagtcatccatccatctcaagaatttacgtctccactgagcggatacatcgcaatcaacagtgcatggttcttcagttaggtctgcacgacctacaatttttttgagtttggccaactgaaggtcttcttccaggtcaaggggaggctcgccaattgttggctcgcctattccctggcttgtctttccattgtagaactggagttgaggtctagtagttgttccaagaggctatcaccccttggtccttccttttgtgggaggcagcaatggtggatctcctcctagaggcatgggcctgccccttggatccaccaggatgctcatgttaggttagccagctgtggtggccatactagttacgcctattgcggtgacaggatttaccacactataatattcatggtcattccaattgtgactggaacttgagtgtttggatctgagatcagtaggtcttgaggaagacccaaagatgcagatggtgcgacaagagttcttccagtgttcaccatggcatttgattagatcacgatatccacgctctcaatgaaagcaccaaattgtttacctcaaaaagtgatcaatcgacagtggggtcgtacaaatccgatgcttgccacgtgtgtgcacaaataagaatgaaaagcactagacaataagattttttatagaggttcaacccctttgtgatagcgggtaatgacctactctccttttagttgtattataccaagggaatgactatcgagatcgctataggtgggatctgttatagtatccttaagattacaatgtatgaatcaatgcccgacaaaactcaaatattggaaagcctagggtgttggactgtctagcgtattggacatcctagggtgttggacaaccttagataggtatgtgggagagaatgagggagagagagagagtacttaagacacttagagagtttaagatcaggtttctagcttagagacaacttaggcaacttaggttttgagtcagagtttaaggcctttatataggaagctttaaaacataggtttacaattcaaatcccttaacaatcgtataattagtttgatattttaaaaaaatgaaatacccttgattctagatattattcagccattctgttgggcttttggggcccaatttgtagcccattatccttggccacgtgtaagagtgtccagtgaggcctgtagagcactccctggctagccaggcccctgtggtggccaagctggccaaccaaggtgttgtccctgggttggctgataatagggcgggcaggggtggccgaccagctcttgagagggagttggtctatcgcttgattcccatttgagtgccgg

SEQ ID NO: 236164 - DNA, 2269 bp, Cannabis indica
atataaaatactaaacaagtacatgtcttggcgatcttcggtagacaagcctagcggctgtgataccaaaattgtaacgccctaatgctaaacgctacaattatttttcaattgcactgctatctttgctaatcaaagaatttcttgaaaatcatgtcaaattaaaacttttagtattaactatgaaactttataaattttacataatcatttacaaaagccaggatcccatttctaaacttttttacaaaatattccaaagtacattaatcaggtcgcacagtgatacaaaatgataaccccagatgtcccaagaccgaacactccaggtcacgccgccgtgacatgtataacctcatcctagctcaagctcactcatgttcagccttcgtctttcctttacctacacatgaaagtagaactgtgagtcgacagactcagtaagaaaagcataaaacatatcacataattacgacttgtatctaggcgcccatacccctatttacaaggcttaacagatgagtaagaacattcttaactaagatacgaccatggaccactgtaccacatgcacttagtaccaccatcgtactagtgtaggtagggtgtgaaccgtaccccgagtactgttaagtgttataccacatacaccatgtaccttcccgtactagtgctggtaacaccgtgatgtactcttcagacatcgtacactttaccaatgcactccgtactgtaaccgtactagtgttggtagtctacaaatcacaacgagcatgcatatacattaaaacatactacatttgcatattcatatcacatattatacgttgtacttacctcttttccgaattcaagtgagttggccgacctgaacagaaaatctcgtgctggatggatgccctaatcacacattaaaaccgggtaaatcacacatcaaaaccctaatctaggaaacccgaacctacaacttaaggttctgttattactaatagggactacaatatcctaagaggcagggaaacacccaactaaggcattgaagtggacatgaatcgagaaaacgagttgtacgaggaatctgccaaaacctattaaccggttttacaggccttggcaaaccggttaaccggtttgcaccaggtttccccaaacaattccaaacttgctcaaaacttttccaaatgccaccaaactttccagaacacttataatgagcatacacaatatattccaaccaacagaactcagaaaaacataccaaaacaaaaacataccatggatgaaccaagcttgagttttcaaactcaaacttgttcatccacaacctcaaaacccaaaaccaacaactagatccataattaaactcaaaataagattagaaaacaaattccaacacagccaaaccctaacaacccctatatctcaaagttgcatactcaaaccaaattcaaagcttctaaaacaaagagtaaaagttctaggggttacctttgcttcaaaatcacaagaatcttgctcaatactcagaaaatataaggttttggagatgatttccttctggttttgcctcagccgaaagagagaaagagagagttcaagaaatgtgtttttggttccaaaatgaatttttgtctttattctccaaataacaaattaattaattaaacattacttggttgaaaactcacataatggccagctgccattctcccaaacaaatacctaagccccttgacaaaatgaccgaaatgccctttttgcttaaacttaggggtaaaatggtcaaaaactataaccccgcttaaactcggtactctatttcccccaatatacattcgactaagaaataagattctagacttatccatatgacatgccagtatagctactattgaaactaccttaaatgcaggaacagtggtcgtcactctgtttcccaatttcaacatgtctctcagagataatcgactgactgatgcttttaaagtagaagtacagacagtaggagtggatcaagacccaacctctcttggcgccacactccactatcagatggcatatcggcttcaggatcatgctcttgatcttaacattcctcaaacacaagatgctttactcatctccgtcgattctaaacaggtaccgacctgcacacatgtcccaaagcaaatgaccactgaagaactcacaaagctcttacccaagtcgtgggtcaccaactatgaaaaacttcacaagccacagcctgtggttcagaccacaactgaac

SEQ ID NO: 236165 - DNA, 3523 bp, Cannabis indica
tttttttttcttataataatttcttgctttttaattacttgattccaatcctatatatagctttaactttaaacactagtactcctatatatacttttgttttcttcgttgaataatattgattagataacatatatatagtagttattaaacaattaataatactttcactacttttgatcataataattgattgagtttctattacagcttctacatgcactcatatataaattattaataatgtcttcttccaacttttattattggttacggccactcagacaaatatatatatagtcaaatctctctctgttttttatttttttattttatataaatatttaaatattggtcaaatattgtgtaagaaaaaggtataattaagctggtaacttttctcttgtataaaaatttatttatgttgaataattgaacatatatatatttctttaattatgtaacattatatattttttcgaggcaacaaaaaaaattaacattattttggactgtacctagttttcaatttcattgcatatatgtatactatatgtatttgatgctctatatttttcagagtgagaaaattaatatgtatatttgtattttattatatgtgtatatatttaacatttcactatatatgacttttttttgaaaaaaaaaaaaaaaaaactctatgatgacaacttttttgttcttccacaatatttgtctgtatataccattatttacgttgaagttttcatttgcattttaattaataaatgagatgaactaaaaataaactaaaagaggaaaaagaatattccaaatagtttatattcatcaaagttattaattaaattatcaaaagtaatgttgtttattcattaatcacagtttattactttggcataataagaaataggctacgaatctttatatatatatatttgcagacataaaaagtaagaaggttgcgtagtaatgaagtctagtaattagcctacaaaaaatagatataaattattctttagtgcttaattaaaatatcataattaatgtattatatgtataagcatatacatacattgttatctataaatgttaaaagaatagtatctaagatcaaatggacaagaactaggtatagtcaaacacaaataaattaattgattaagtaacatgcatgtataattaatagtactttttttaaaaaataataaattgattataatggatcaaaaggcaagaaaaattgtacaaataccatgtgtgtgagtgtggctaatgaatatcacgtacacgtgtttatgagttatatataatgatattactaatccaatgaaaaagaaaaagaaagacctctcaacagcaaagaatccccttttattcaaatttttctaccgaaataacccacaaaaaaggaaaaagaaaacaaaaacgttaacccttttgttaattattattattattattattattttaatctaagattatacatcaagattgattttcaacatcaaatcactacagtagtacccatttcatgttaggttcctttcaccatgcaattaaagatataagtggccaaacaagagtgtggtccacattgacatatagatacaataatttaatctccactccaacattcatgtttttctcttttgattattgtacaatcatagcttcttaagactattactcaaatagatctttgtataacttagttgcatggttgcattgtttagaccaaagtatcataattatggctcatttggctgtgttgggatagaaaaattaaaaagaggtagtgttttaagtatcaggttcaatatattttaatataataattattattaaagaggcattaagttggatctaaggatcattactgatgcttaatatcaatgctcggagtttggatgatgatgcttcatcaaccctctaatcatgcttttttctacttcacccttttctgaaatgctttcattttccatccatcttgtcgaattgggcagaataattagtcaaaataggatttttcacatgcatatgagattttctttcaattcaattgcaaaattattattccatgtgggggcataacatgactacacttcaacataagaaaaatctttaactttacctaagcccatttttagtgcctagtaataacccatttgtcttatgatttgcttaatagtacattaattggattactaaagataattaagctcactaatttattcaaataaaaagggtgaggaattggcatgcatataaagcgaagaataaaaatttggagttaacaaaagtagattgtgattaacacaaatataaagattaacacaaaattgactatttgactatgactaacttttttatccccttaaaggacggattaacctaattttatgaggctaataaaaccactaattctggaaataatcataggtttacaaaattaagtgccttaaagttggaaaaataaataaataaaacccttgctttatagaaaggtgtggacacaatgaattgaacctccttgattatttgattagtaaaataataagaagtttcttcaaaaaagagagattaccatgtaaagatggtagggcacaaggattatctcctgaaatgaacttttgcttttgtttgtgatcttttgaaaagtagtatatagattttcattttctatgtatgtgccagtcattttcccaacccccccatataatttcttcccaccaatttctttaccaaaataatgtaacattgttaagataaataaggtgagacagatcaatgtaaagtttcattcatatggtatttgattggaaaatcaaccttatatcattactcttttttgaaaaaactagagtccaacaggattgatatagccaatcaatatacttgtgaaagcaaaactaagtttgcaaaaaagctttattattacagtaataaaactaagatgcttattctctatggcaaaagcttataatgatctttcacaaaagtaagctagtaaagtaaaggatgatgatctttatcccaatttgggaaggaaagaaaaggaaaactagcatatatgcagatatataaatatatacagaacttgggaattgccagtctggaaaaagaatgagaactaattttattcttatatatgccaagtaactttactaatttgaaacaggatcaaatgacagttggtatgatgtctaattcaaattaattctggtgtcagatcagttagacaaggataagacagtctcaagtggctagaacaaaaatggaatttcaatcggataaattgaattgaaacagatttttgtgatgactgcttcctttacgaaaaaattgcaatgaacatagggtggtggtgtacctttcttatttttatatctcacttccatttcagggactgtctgattccggtatagatgagtcccaatgaccgaccaatcaagcaaactaaaaagaatgagatggcgtcggttactttgttgataacagctctaacaaatggcattccaat

SEQ ID NO: 236166 - DNA, 1614 bp, Cannabis indica
ttgagttgtgcctcttaatgaaagtaccaaaatgttggcatagaaatctagacacatatatctagccaccacccccctgctatattggcgagaatgaattataagttaagtataaataagagagacacaacgatttatatcagttcactccctgtatcgtgataatagtggagctacgtctacttcaagttttatttctcatgagatggacttaaaaaaaaaatggctaagtcaagatgctctaatttctaaagcgagaaactagagagagatgctctcaccttatgactactttttttaacttaaaaattaagctagtggaactctcctttcattgggaatgagatcctattaaaataataataaaatattccaaaaatgtagaaaaatacaaataagatatttttgaccatcgagattatctaatgatattgttattgactccagagatcgatcgtcaatttttgaagcctaagtcacgtctgcatgaaccgcttcgagtaagttgtaccttaaaatcataactcctttgagggtgaaatcgggagtctataattttagaattgtgattagagtgtgatacatgaattaatagagcattgaaatagcttcaaaatttaagtttaattgcatcaatcggatcaatattgagtgagtgatggttgttttaccaaaggttattctgggcccaacactgaggttgatatcctagcgccaaggttgacatccagcacccaggttgacatgtgacgtcaatctgaacgctgcgtgagtaggaaaatatttcgaggatgtattttttgattcgtaagtgatattttgacatcacttagccaattttcttattctcgtgaaggtggtcgctagttctcagcgatgttgctattttgcagaaacaggagactcgaaactccccaatttcaaagtaagtcactttgctggaaaaagtgaaaatatgaagttgtaaatttgaatcttcttacattatggctccaaattattatgaaaaactagacgaacggtcgagaaaaaatcagaactggataactagaacccaacgcatcatgccatatgtcaacctaggcgctgattgctcttgttagagcttttaggatgtcgttttgacacttccaagattcttaaacttgatgacaaggtctcctacccaatttttgaccattttagaaagaatgctcagagtaaaatttgcaattgagtgatcaaaattagcacaccaagttgattgtcaagttgggcgctgggccgagcaccatatcaacctaggtgctgggctcaattttgaagcccatggattttttgttttctccctgagtttacttgtatctttgttatttttgatagaaataatgctcagaacacttttttggaaacaggattggaaatagcccaggttgataatatgtgaacttgggcgctgggtccaatttaagggttcttggaagttctgtttgctccccaaaaatagttgaatctcaatctttgatgaaatcggaaaatattctcaaaagactttttggaaaaaaaatcctcgaaattggcccaggttgacaaaatgtcaaccttggcgctagggccagcaccaagtgccaactt

SEQ ID NO: 236167 - DNA, 692 bp, Cannabis indica
ttttattttatctcttttttatactatttttatactcttaattctaaaatactctaatagtatagcacctttcaaaaattctataattatgatcttacacgttattatttaatatattatttgtattaattatgaatattctcacactacttatttaactttaattttttattttatttaaaaagatataatatcaatgccatgtatcgtcatctacagaattttctatgataacacatatttatctctaatgatttaatatctttatgttttgtcaaataagtaatctacataagcaagcatcctccaaaatttaactattagaaatgctcttaaggttcaagaactccaaaattgtaaaataaaaaattattagtagtatatatataatattaaatagtagtataatgcatcaaaatggtcttcttttttttttttttttgaaagaactacatgttcattaattaagaaagttgatgggaatcatagggggattaccctccccttcatacaaaacaactaattcactagtgatcctagcatttttagctacaccatccgccaaagcattaaaactatggttaataaaaaagaaacgaacaaacgaaatctctttggttacattagcaatagaataaaatgttggatatttattttaccaggatcttagatctactcacaagtatattgtt

SEQ ID NO: 236168 - DNA, 557 bp, Cannabis indica
agcgaaaatcataaacatatatttaactgaataaaataaaaataaatacttaattacatacgctaggtttcatcatccaccttaataataagaaaacttaaaaactcataaaaaaaataaactaattaagaaaagcggtaaactaacactaaacactttaagcattttctctagatttctcagtctgaaattatattgaattctaaaaaacctaaggttttatttataagaaggtaaaaagactaatacgcaattaaacttactaaaaattgcatgtgggtaaaaataaaattaccctatagttaaaacacagtgccacatgtaaagtgttgattggttgctttgggtgaggcggtgccacgaggcacccattgattgactgcaaaaaaaggagtggaagttgatatttaggctgaagggaatcggaaggagagagagcctattcttggggttggtgtgtggggcgcacgcatggcccaggatgagccctgcacatcatgcgcacgtgggagacgaggggagggacaaactgttgggattttatgacctaaataaaa

SEQ ID NO: 236169 - DNA, 1170 bp, Cannabis indica
catttaccataaacacagtcatcgcagaaatctaatttctcccccaattcgcccttgagaatcccttgtttttcaagttcactcatgcccctttcactcacatgtccaagtcttagatgccaaagcctagtgctttccatatctagccccctaacaaccatgccattctcactagtgacaatttttccttttagataatagatgccatttttaagttctcctttcatgacaactaatgagcctttcataaccttaaaagagctatctatctttatgatatatcctttttcaatcaattcaccaatgaaagtaagtttcttttcaaatctgtgacatacctaacatcttgaattaatctgacttgattatcatgaaacttgatcctcacagttccaatccctgcaactttgcatgccttattgttacctaatagcaccgatccaccatcaagtttcttgaaactgtcaaatagttctcttcttggtgtcatatggaatgaacaccctaaatcaagtatccatgagtctcctgattcttagctacaaacaaccattacatcaactaactcatagccatctgtcacagcaccatcatctcttccttttttgcttttgtctctttgtagtttagccttcaataccctacattcatccttgtaatggcctttttcttgcagtagtagcactgtttctctgcctttgaattggaccttggtttgtatgattgattcgagcctttgtgatttgatttttgaaaaccacctttgttttcccatgtctctgatccgcctctaacaaatagcccttcaccataaccatttcacctttgaatttctttagagttcaaagcaaatttcacctctgtaatggtcaaagattccttaccatacaaaatggtgtccacaaagtgctcatagctttttggaaatgtactaagcagcaagatccttaatcttcatcttcaatcttgacacctatattgcagaggtccaagattatcctgttacactcatcaagatgcttccttagatctttagtttcatctattctcattgtatacagtttcttcttcaagtaaagcttattgactagtggcttcttcaagtaaattgaagccaatttctcccatagtctcactgcagtatcttcactcgacacctccctgagtact

SEQ ID NO: 236170 - DNA, 882 bp, Cannabis indica
tcaatgcaatgggataaatattaactacaatattgatgcattttttttttattatacctcatttagattgattggaaactctagatctatttattagagatctacattttatgaatctaaaaattgaaattaggaagattacttttctgcgatttaaattgtaattcatggttgaatttatatttcaaacaattttttttttgcataattttgcatccattagaaattgtagatggttggattgattctgatctttttctcaggaagtcgccagaattaatggtaggtttttgcctgatcgggtttcgtttcggttggcttgctgggttgatcgattgaagcttgtgtctatggggattttgcttcgtgtgtattttggtaatatagttgtattttttgtatatacatgaaaaaaaatccttttatttattgatttttgtaggatggttttgtggagggcttacgattacagagaatttaccgataagtttaattttttaaacataatctgttcgatattaattttcagtagttttaaattagtgggatactagtatgttgttactagccaaagggtaatacttttggctagttatacttaagattttttttggattttagttttttagtagtgttgagagtgttttaaattctaagttgtatattaatttgtatgatgaagattgtcatttatttaatatacttttgttttttgatttggtgttgtgatgtttttattttcagtttcgctagttctggcgacaaccattaataatgggaatgtgctttttaatgtgttggaagtgctgttagaagacgttatggttttattgtctaaaattctgggagtagttttgttccatgtgattcgtgttaacattt

SEQ ID NO: 236171 - DNA, 2095 bp, Cannabis indica
aaattagactaaaaaatttttctggataccgaaacaagttaagggtgcatcagtacatcccttttaagggggtgcattatagaatcacccaataattatttataaaaataaactaaactaaaagtatttggtgcttctgtagtacacaccaccctttatttgttttggcatttagaataattttttagtttattttttttttagagttatgtacgttataattatttaagtacattttgtaaaattctaagaaatttaaaaataaatttataatataaaaataagttcgaacagtctatattgaactctatctctcattctttgataagatagtaacaacatgctgtttaaaaataaaaaaaactcacacgtgtaatagattgtttaaactaggggtatccaatcaaattgaagggaactgaactaatccaatctaatctaatttaatccaattcatttacaaaaaattggatattcaataataattggattggatattaaaagttagattctaattatttatgtttatttatgtataattaaaaatacatattttaatatatatatatatatatactagatttttttgtgtgttgaatttgtaatattcgcctattttgcatatttattttcacgatgttttgttccattttattacttagtaatgttgttgttttagtcatttaaaacttttagttgcattacacttaataatgatatttttatgtagtgttaaagttaaataaagagtgatatttagtttttacgtatttttttttttatatatttttaagataatattaaaattagatgtgtaattggatatctaattaaaaaactgattcaatctaattagtaattgtattagattagattaggttttaagttctaattagatcaaatcggatgataattttttaaattcaattactaattgaattagatcggatgagaaaaaaaaatgtaacgttgtattagatgtctaactctaatttcagcttgttaaatttctccaaatgtcttaaaattttataaaacattttaaataactacaatgtacttgattataaaaaaattcgactaataaaattttttgaatactgaaaatatataaagatataccgataatacatctcttttaaaaaaaattacataaaataaataataaaaatcaatctttaaaggatgtacttgagtgtagatatatattttttttatacatttaataaaataaataaaattgaaaagagaaactcgagataagttttttcttaagtaaaaaagaaaaaaaaaaaagaataaatatttagtttaaaaaaagaaaaaaaaaaagtaagagaagagagtgtaagagaggggggaccgatgaattacgtcgctgttatttcagccactcgcgggacaatgacctatcgacacgagtcagctcctcggcgtctggaccacacgaaacaggggaccagttcaaagcacgcgcgtagatagtcttatcctcaccgtccacgtggaggagccggaaaggtagggaccactgggaatttttgacttctctgacagccgccggcttaatcaatgcgaactgttgcctctgtgtgagtggtcccctaatttttaggcccaagtagggcccaataaggaaggagggagaagatgggtttagaatagaggggcccaccaaagggtgtaagagaagaaagagaaggctgtactgtttggtgtttatggcaaactgtccacccatgagggcaattggcaaagcggaaaaatggtcccccccatcctaattgcaccacctcccccctctctctatatatatattattgtataaattgatttaataataaatgtaatataaataaataaaatttccactagagacctaccgtcagccaaacggcagagattgtaagatattttgataaacacatcaaataaaaaataattgtggcctaaattatatctattttttttttaagtatggtaagcaaattacttattttttattttaatttttttattattctttaatttatatttagttttataagttatattctcattatgtactttagaaattctaattttaataagttat

SEQ ID NO: 236172 - DNA, 1646 bp, Cannabis indica
tcgggattctgctggttgtggtacgattatggaagacggtataggggtgcatattcctattgaggaggaggaggaggctatcttgtcttatgatgctagtgctacggatggtaatgactatgatgacatgtggtgtaacattggaaagttcttgactaaaagacaatttgattttgaggctatgcaacatatgatggcttcattgtggcagctggggaagaggatgtttgtcaaggaattggatactaatcgctatttctttcaattttatcatgagattgacatccaaagtatgatgaatcgaagctcttggacttttaataggttcttattaatttttaaaaggttgcaacggggagaaaatccaagattggttaccttgaatgaagttgatatgtgggtgcaattgcatgatctaagatcagggtttaaaactgctacgattgttaaggatgtcgcatactatattgggaagtttgttcaattggatgaaaggaattttatgggcttatggcgggatatgttcgtgtgactttgaatgttacaaagccattaaaaagacgtatgaagcttcgcaatactgtcgggatcgagttctggactaactttaagtatgaatatctcaccactttctgctttatttgtggaattatgggacatttcgaaagcttttgtccatgatgttttgaggttggagagggccagataatcaagccatatggggaatggatgcgagtgagacctatacgtagaaaccacatgatcggagctaaatggcttaagcagtttaatgctgccatggaagatgattttgcagcaaaaatcatggctcgtggtaaggtgtctcgatctacgatggcaatggttgaggggaatcgtggtgtgttggggtcgggttcgatgatagtggaagaaacttcgggtcaacgtgaggcagggataggatcatcaaaggttgttaatagggatcctataattgttgaagatatcttaccagctgcgaagaataaggaaatatctaatgatatcaatgaggaggcttgtcttttggttcttgacacgaaaaggagaagaatgactttggaagatattgatggggcccatgtgaggggtgatgtggcaacgggtcaagaggtaaatggttcaaagaacttgagtttggtgggtactagtgtccaccccaccaatcattatgaatattttatcttggaattgccatgggcttgggaactcatggactttacaattccttaaggatctagtgatccaaaagaagcccagtattgtgtttctctgtgagactctatccaatcgttctcagatggagagagtacgtgtgacgttgggatttgatggcatgatagtcgtagatgtcaatggtaggagtggaggtattgcgttgttatggaaaattgaggatgaagtgtcttgcttgggttttctgatgcttatatagatgtgagagttgcttctgaagtgggcagcaatggcgtatcattggtgtatatggggaaccgaataggagtaggcgtgcttctacttgaaatctgttacgtactcttgctactcgttctaatctaccatggtgtgtgataggtgatcttaacaatattttatctcatgatgacaaaaggggcggtaatagg

SEQ ID NO: 236173 - DNA, 873 bp, Cannabis indica
tacaaaccggatatagtgttgctcccaaaaaatgaaccaaaaagcagaagctctagagtccaatgtaagtcaatcatagagcaaaagaagttccaagggtccaagtcggaataattctacgaagaaaggaaaaactcaagagtcgagatactccgagtacacaaaccttgttgatactcgaaagaatgtctaaaggaaacttgtaacatggtccattacaagaagcctcagccaatgtacaagggtagaagataaaaaagatatccaaacaagaggtgaaaatatcacggtgatataggacacaccaccaaagagggtgactatttgagggatgaaatcgaaggattgctctgaaatggtcatctattcaattaggtaaggataccggttatttatcctggacagggggttagacacggataactttatattcttggacaatatggaaccattaatcctccttaacgagcaggccacccacaagctcctaaaatttaagctcccaatgcacaagccctttaggtagtgcaaaattctccatcagcaagacctgttgtagctcccagtcctagaaatccctatcctcctagaacagcctagctagcactagatgctcacgtagcaaccatttttggtgaaccacacattgtcgaaagcacctaaaattcgcaaaagaagtacttgaatgaattagattaagttgaaactttcaacttggtacaatcacctgctcagtgtcatcgaatgatgaatttgctaatgactttcatagaagatgacaccaagcatgtaaatttttctcacaacaacccttggtgatagaagctcaaattgcaaataaaagactctatagaatcctcgtagataatggaa

SEQ ID NO: 236174 - DNA, 803 bp, Cannabis indica
atcactccaagtaacattaaaactttattctttttcaaggtattgacacattcagattgaatatgaccatgtcctttgcattttctgcattgaataccctttttattattagggacaaaagaatcagatccatagttaccttttggagtttttgagaaattctttttatttccaacatttatcatgtacttttgaaaagttcttaataaagtcaattcatcatcctcatattcacaaacatatttttcaaaaactttaaagagaatacctttgcttttctcatttgaagagttcgacttaccctttttcttaatttgtttatttaactcaaatgttcttaatgaatccatgagttcttcaatcttcatcttgccaaaatcttttgcctcttccagtgctagtatttcgtgtcaaatctatcaggaagcacacgaataattttcgaaccaacacagatttatttaatttttctcccaaggaaaaaaatttattagcaatatcaaataatcttcataaaattcaaataaagtttcagtttttgacgttcttaattcatcgaatctagtttgtaacatggtaaaacgtgatctctttacaacaacgataccttcaaactgagtttgaaggattttccacgcctcctttgaagattcacaagattatatcaattcaataaagccttcaccaataccattaaaaatatcatgcaaagctttattattatgaccagataattttcatcttcaatactccaattaagtttaacttttaccttagcattaccttcatcatcattttcagta

SEQ ID NO: 236175 - DNA, 941 bp, Cannabis indica
aaaaaaaaagttttaagtttacataatacaataattagtgggcttaggttgggcctttacatattggacctaaataaatataaaaattggtatttttatattatgcggtgcggtgccggtgaggtgcgagttgaacctcatattaacaattcaaaaccgcaaaccaaaccgcaccgcgcggtttaaaaaaaatcaaactacggccgcactgtaaagaatttcaaaccgcattttttttacggtgtgggcggtttgatgaacacccctactatctattgatataatcaattctactgattagtcttccttatgtcggttcgtaattagtgttggtcaaattactttcttacccttctaatattttttttatcttttaatactgttaatttattagtgaaagtttaatttatatctaatctaaatttatgcacaacttttagttttaaaattaacaattaacgaaaaccaacattagatccgttaaaggttttaatacatactccttataaactaatctatagttcctcttcttatatttcagaatatatttaattgtttttcaatttttctttccttaattgaactaatactaaataacaaatatttggtctagttcatacaagaacatacttaagactttttactatgaaagattatatttacacccccaaaacttataactacaccctattactaagtttatcccaattaaatattgtttttataatcacaccccatcacatttactaaataggtattttttagtacaccccaagacttaaaagaaaaaaaaagaagaaaaaacttatgatcaaaaaacgggagaagaagttagacttcaacataatcgacgtcttttcctgagccaagacttcgcaccgaatccaccagtatttcattgtcgcacaagattttgcagtccaccactctcgctctctgct

SEQ ID NO: 236176 - DNA, 600 bp, Cannabis indica
ttttttcgtacctagtcgtgctcgtgcctagctatcggactcatgttggtttcgtgccgtgtcaaaaagcccaacttatatttacagcactagtccacataaaattatttatttattattaaaattattttaaatataaaaatgtataaataaataataaattacaaaagattttttaatatattttctctttcctttccttatttttttgcgctctatccatttcttttttgtaaaccctaaacacgacaccaggttgattatctcaccctctcaaccgtccggctgcaatagccatctctgaccggatgagagaaactagaccgaccacagaaccccaaaaaccctatgagaacaccaaaaccttcgagaaccacaaaactctaacaatccagagaacaattctctctcaagcgatcctcttctctcgcacgattcactctctttgcctacaaaatgacccgagactgtcgttggtctcatcgactctctctcagatttgctttctcggtctcaatctctctcttgcgtggtgggtactggtggtggttggaaagaagataaagaaggtgaagaaataaaggtggtttggaaattagg

SEQ ID NO: 236177 - DNA, 836 bp, Cannabis indica
ctaacccatttactatctgagatcggggtaggccactccagtatctaaccacttgaccacttcctttctgacaacttccttcatatgtcgattgagtctacgttgtgcatctattgtcggtttggtgttttcttccatcagaattcgatgcatcacagttgagggactgattcccttgacatcacccagtgtccaagcaatggccttgttgtgcgcccgaagtagtctaagcaatctatccgtctccacatcacaaagttaagctgacactataacaggaagcttcttatcttctcccaaaaactcatatcgcagatgactagggagcaccttcaactcaagctctggaggtttctcagtgaatggcacaagctcttttggtactactcccagctcttcaaaatactttatgttcaatggcccataggaatcaagccatttaacatactccattacctcttttccctcttgctccatcaattcttcttcaattaagctcagttctagaggatcatcaatcaactttctctcattcataatgatatcaatcagatcaacaaataaacagttatcacttgcctttgggtatgtcatcgcctttaacacattgaaaaccccttcctctccttgtactcgcagctttaattcacccttctgaacatcgatcaaagcttgaccagttgccaagatggtctcccaaggatgattgggacgttgttatcttcttccatatcctagaacaactaaaatcaaactggtaaacgatgaacttgtcaaccttgactaacactatcctcaatcgactcccctaggatcgagctagtgatcgatccgcc

SEQ ID NO: 236178 - DNA, 847 bp, Cannabis indica
gaggcttagggcaagggcccaaagaattctccaactgccagaggctgctcactttgttgacaacagaggccaactttgtgaagtaccaacttaacccgacaaattttgtaccctagtctgtgaaggagaagaggaagaagtccaggccgagcctggctgagggacttgagaaagagaaggagctcattaaactcaagcgtgaggctaagttaaagggtgatgctggagccaaagagtatgctcaagaatattctgggcaggagaaggaggctcaagaatattcagagcaggagaggccacacaagaagaagaaaactctcccgactgagcaagcgcgtatagagcatgctatccaaattagggaacctggcatgcctgctcggccatcgacccctgtggagggaaaaggaaaagctgtcctggaggagcaggaagactcttcggacgatgacgctccatccgtacttgttcaggataattctcttgccagcgtgcagagtactttaacttgcatttattttccctaatttctatgccgtcacatattttatgtcttcttttgactatgttgctttttccgtgcagaaaagtctcagaagatgattgaagctctaaagaaaagagtagggggagctcgggcttgtctcctctggctaagaagtctaagggtgatgagactccgtccaaggagaaggtgccggttgaagaggtcattcatctctctgaggagtaacctgttgggttttatgccctaaataaaactccatttcaatgtaatccgtattattcaatatcaataaagaaacagaagtattttcattcatttgtgtatgttttggttcacctt

SEQ ID NO: 236179 - DNA, 1109 bp, Cannabis indica
tatgccgctatttacccttattattattatttttgaatcatatattttctagatttatcaattacattttttttagatttttattgtgtgaaaatttgatacaattctatctattttctcattattaattaatagattttatttgacatatttcttttataaaagaaaattgtacaaattaacttatttataaaagtgaataattaactcattatttgatttgttttatatatacaacaaacatactggggtcaaacctaatatcatgttgtataggtgagatatgacaataacaacacccttgaatgtaatgttgactacaagtgagatatagtgatgagaacagttttgaaatcatatgataagttttctataaagttatcaattttgtacacctaatttttcatacaaaattatatcaaaaattaaattaaaatttgatacaatttattatttatttgtaatttattaaatggtatgatttattttatatatatatataatttaacaatttttaaacatgtgaagcgcaaattgtttactagtttacaatacatcaatttttttttttaaaaaaaatctccattatttaaatatttgtattttacatatatttcattaattagaacaaaaaaggacaaaaaagagtagtgaaatattaaaaaaactattaaaagaattaaagaaaaataatacataatatttttactgctacatgtagttaaacaaatagttataagctgaacactcccaactggtgctttataatagctaaagtgtaaatttttcaaaaaataatgctaaatattagctccatcagatttatctcatctttattttaattttgagctaaatctttctctacatttcactacatgaatagtggttctttaaaatttttttaatattattttaatttttctaatcaaatcatatacacattacccatacatataatatttattttcatatatataatattttatttataaatatattatttaaataaatagagaataaaataagaaactattgtatgatgtaatggaaaagtttgaggtaaattaaaaaaaaaaaaacgtaaagttttagatgatgtattttgaagg

SEQ ID NO: 236180 - DNA, 1078 bp, Cannabis indica
tgcttattgatgagttgccactcatggctaccctccttaactttcttcttctttttcgaatcattctctttctcttcgtcaacttcctcaatatcaccctcttcttctttcttcgttccttcatcctcatcatcactaatctccttctcggtggtcttcttagtccaaaggtaaattggatagctgatgaattctgaatgcttcttcacgaggtccttaattctcctctcttccaagtactctaactggaataagacaaacgacaatttggttatatactccgtataacattgaaccaattcaacaatccaataaataccaaatcaacaaatcttacctgatcttccttaagaaagagagtgattttggttcctatgcccaactgctcaccgtccacatccctggtaacagtgaaagagccaccagcctgagactctcaaatttattgctcgtagtcattgtgctggttgtcacaatgactttctcagcaaccaggtaagccgagtaaaacccaacaccaaattatctgatcatgctcacgtcagccccgacttgcaatgcctccacaaattctttcgtcccaaaccttgcaatagttcccaaattgttcaccaaatctacaaagacgccaacagaaatagttaaataacaatttaaaaaaaaaaaaaattccaataaatcgttccttaaaacagagagtgtggttacataccagcttttgtcatcctaatatcactgtcaataattgaaagggtcttgtttgccttatcacgaacaagcctaatgaatagttcaatttgcgcatcaagcttgctcttatctgttaagcacccaaacctgatcttgtccaatgcctataaaatcaaagtgaacacttaaatatccgttcaagttatctaatccaaattatacagatagcttccatacacattatatgtaaatacatatatacacacatttacaaacttcaattctaattttaagcacaaatttctaattagataaccccaatctcagtcacagtttgtgttgggttttatgccctaaataaaactccatttcaatgtaatccaatttt

SEQ ID NO: 236181 - DNA, 827 bp, Cannabis indica
gaaccaaaatatatgtatatatatactaaactatacattaatatatgtataaatatgcctaaaagaatcaaatattcaatatatatatgtatagccgaagaggactgaagccaataatgaagcttttaaatcaaattataatcatgtaaaccaaaaggcaatggccaattatcattatatacatatatatatattaacagaagcttaaacgaaaaaggacaaaaacttgattgacacgaaaacaagtataccttgtttcttttatatttattgaagtcacggaacaaaataaaaataaccttacgacatataatggtacggaacatatatcaataaattgaaacatatatattacataaatcaattcgtaaccattaatcaataaaagaaagaaacattcaatatatatttctctgccaaaagaaaactgaaactatattatatcaaatatcatgcctattaggcaaagtgggctgggcttagttatctgaagccatgccgaggagataaaaaaaagccggcatcttaagccaccgataattacaaaaaaacatccaaatcgattgccataaaaaaaaggcaccagtattaaaaatatatcaaaaccctaatttttaaaatccccaaatgaatcagatcttcaatcaatttaataaaggtggctctgataccacttgttaggatttataaaacactcaagaaatatatataaatcacagatccaaatatattcctaaaagtgctttaatatagaaaaccctaaatcataaatcttaaagcctttgctaaattaaagaagaagaagatgataaaatattagcggaagc

SEQ ID NO: 236182 - DNA, 1564 bp, Cannabis indica
cttgtgaccttgaagggtaactctcctcttgagttggttttttcctttcttggtgagggttctcccctttttcctcaatctcgacccctatattccttgaaacatgaggtggtcgcggagatgggtcatgaccgccatgtgtggcacagttttgattatccaatgcatgatttgcatcattgttggcacgaactcccatatcacctctaaggaggttgttatattccatatttcctagagatgcacgcagaggaggaaaattatgtagattgggttcatcacgatttctcatagggtcataggtggcacaactacccatgtgacatcctctctttctttttaaattagaaggttgtcttctttcttcgctgtccatgcccatgtctctaaggagtagccttggagaatttttttttttaccatgtggggcatctccatgcaatggtgcatgagtggcatgagtgtgtcaagtatgtactccaatgttgggtattgagaaattggtattgccaagagcattattggctttgtttacttggttatgggtacctccatggtgggccagagcaccatggccatctccatgcaatggtgcatgagtggcatgtgcatgtttgacatgtacttcaatgtttggcaaagcttggtggcccctctccttagtggattggtacttccaaggtcaccatggaattggatcccttggtgtgccatggtggcattctctttggatgggcgacctcttcttctcctaggggagaaggctctcttagtggaggagtttggtccccacgttgctcttggagctcgttgttgtagtctaggctttctaccaactagacacgcaatgtctcattctcttgggatacttcatgcacatgtatggacctgactcttgggcgctctctagattgggatgaagaactttcatagtcttgaactttcccctcatcatctgacgtaagtggcatgggacacttttcttggcacctagaagatccctctccatgcggttgttgagggacaaaggttccctcattaaggggtttattaactttcccccttaggacttcggcatcctccctaaaattggtcctccggtactcaacaccattgttgtgaaaaaggtaaattaatgagttttccaaaggaaaaatagtcaaattttcaccgcaatgctctcaatgaaagcaccaagctgtattaagagcactctctaatcctctcaatgagagcaccatctaagaagattgtaaaataaaagaggaccacggtgaattaatttgactaataaaactgcaataagttaaatggacaccagggattttgtaaagaccgcttagtttaatttagaaattagcagttaattatgattaattatgaaaattatttatagatatttaaataattatttatgatgttattttagatttccgaatgcatttttatgtcatatagtgaatttcataattttgcatttccggtgcccgacaacatggaacgcagtgtttggctcagtaaaatcacaacttagtatgtgttgggaattattttaccaggatct

SEQ ID NO: 236183 - DNA, 1197 bp, Cannabis indica
atgatcctctatagatgatctacatcgagtaggaacatatttaccgttctacccttcaatgtattttatccttaaaatacttagctccttgtaaatgatatttcattaaactaatataattacttaaatgagtactccaccatttaatctcatttagccaagttcgaaggttctattcatttatagaagttatagactctgtatctattatcagcgctcccactcaattgtactaccatgttccgaagatgtaagtattgaaaagatctaattgttcaacttaaacgaacaagtcaaaaaaatacaaataatataagtttaagatatcttttctatgtaaatatcagtccaatctaatgtataataatgcatccaatacaagcttactttacaaatgccttagaaaagacataccactatccaagtataagtaaactacattgttgattatcatatcagtggaaatcctgtatactagtaaattgtgggacaatatttaatcacataatcttgattacttttcattgtgtagacaacacagtaatcatgaataataatgtgataaggatttaaataaatttataaattaaataaatgatcatgaaacaaacatgtgaatcaagcaatatattaaacaagtaataaaataattatgttcctttattgataaatgaatattcaagattacattgaagtagagttttagttagggcacaaaaccctacaaactcctacttgcactaacataaaataatcaatacatttcaattaatcctgtattctttcagtgcttttcaaatacagtctctgtcaaagtcttggtgaatgggtcggctaggctgtcttcaatattaaccttttctactagcacgtctcctcttgccacatattttctgatgatgtggtacttcctcttaatgtgtttaccctcttgtggctttgaggctctttattgttggctatatcaccagtgttgtcacaaagtaacactagtgggttttctattcctggaaccacaccaagctccgtgaagaactttcttagcaagaccagttccttagcagcctcaattctagctatgtatttggcatccatgctagagtcagacattacagattgcttgacacttctccaaacaacttgtccacccccaagagtgaataccatcccatataagacaagcctagaaatctgaat

SEQ ID NO: 236184 - DNA, 504 bp, Cannabis indica
gaatattcttttatttttaagtatattctgttaaaccaggaatgttaaaccaagaaatgccgttagataggcacttttaatatataaagatatagtcagtccttttcttctgaatttcctaaaactttaatttggcacattagtagagaagctaatgtactcaattaaacttaaaaaagaacttttattgattcatgattatcttccatactctttctcattgtaaactttgtgtgcttaatgctttaattaattaataagttctctatttagattaaatatatattatttttaagcatttgatataagatttataaaaatcaacctaaatcatgtaattaatatttgtgttgattattccttacaaaaaaaaatatatatagatatttgtgttgattattagttggtgatagtgattctaggaatatcataacatgtgcttaatttgtattcaaatatcaattcccaattatttgctaattaagtcgttgacaatttgcttat

SEQ ID NO: 236185 - DNA, 1165 bp, Cannabis indica
tttatttaaacactttcagccattacaatagacttgaaaccagcagagacattatgctgattaaaaacacaatctgacgaaaaacaagactctctagcaagacaatgagcagccctatttgcagatcgtttaacaaattttaacgaaacattattcaaagacgaaattaaagcccgacaatccccaacaagtaatccaaactgagaaggcattaaaattgagctgttaatagcttgtaccaccaccaaagcatcagtttcaattacgacattggaccattgctttctttctatccaactcaaggcctccttaatgccaatcgtctcggcaatttctggtttaaccacaccaaaccgagaggcagaaatggcttcaagaagcattccattcgtatcacgggcgacacacccaaagccaaacttgttttgctcttgaaaaatagccccgtcaacattaatcttaaccatattagaaattggtttcttccaccgctcatctacattattgatatcatcaatcaataacgcccccgtcttttgagtttgagcagaacaatattggttaagcacagttctagctgaacggaccacatccaaagcagagcaagtttttttattccaaagaagctcattacgaacagaccaaattttccaactaacacaagctgcctcctgaactacagcagccgagtaatgctcaagaagagcagtgaaccagctgttaaaatcaccattattcgcaccagtcggagctttagagacacaccagcagctccgtgcgaaacgacaatcaagcagaatatggctagtagtttccacggccatgttacaaaaagggcaatacaaatcgacatgtaccttttttgtactgagctgaaactttgtaggcaagcatccgactaacgcacgccacaagaaatgctgcactttcggaggaacttccaacttccagatagccttgaacagcctttggtcttcatcagcaacattcacaccagcaacttgctgaagcctacggtatgcgcttttgaccgtgtaaaagccattggtttcatcataccagcaccagttatcaacagtagcagagtcactcaattggacagacaacaccaggttcttatctctttcatcaaagagatcattaatgatatcaatgtcccagctct

SEQ ID NO: 236186 - DNA, 834 bp, Cannabis indica
ttggattggatcgatttatgcacaagcagtgagtgaagggaactgctttgataccatgttaaactggttagccattgatgagaacaaaagctaaatgaaagagaaaggaagaaaagagaatctcaatcttattacagaaccaatagagtttatatacaaatgatctaagcaacaaaacagagaaggaaagaactaactaacaactaacaataacaatcgaaaacagaaataacagaaatcagttgcatcactaactaactttctattttaacactctacctccttccttctatgatttcaaactagtcctttgcctccttctctatgtcttttctttgtcggactctctctccctttcgcctcctcttcctccaatctccaatcattgatcttcccttcccttgaaaggtattatatatattctataaatatatgtttttttaaatagcataatcgattaaatttaatttgtagagttaatatatattgaaatatattgcattggaaattattttctattaggttgtaattttaactgagactctctgcttatgttattttaaaattatgtaatcaactggttttgtacttgtttttgactctgtatgtatgtaggggtaaaaatcggtcagttatggtcggtttttataatcgaccgctaagtacggtttttattttacgaaaatagtaaccaactgtttagaaattataaccgtataaaaccgatggtacagtttttggcaatttttagtggtttttcgattgggcaattttagacggtttttggcagttttggacagtttttggcaatttattgcaatttttggcagtttt

SEQ ID NO: 236187 - DNA, 715 bp, Cannabis indica
aatcttttttaattgggcaattgatccacaagatttgattgaatcttcatttacggtgtaaatgcaatcaaatatggtattctcatttgtggtcaggtcacaataatgacactaaacaaaagaaaatacaattagctgtgttcatatgggtggtgcaagttataatattgtaatttttcaaatagcaattaattacaccgcgagatcttaaacccgtaattaatatattatttatactatcaccattatcaaatattataactaaaattttaaaatcaatataataaaattttaataatattaaaacaaatcttattatatatttatccttacatgaaaaaataaaataaaatttatattgtaaaaatcgataactttgtaatatatagtgcagtgcgatttgaaccgtaattattaaatttgaaatcgcactgtatcgtttggtttaacaaatatacaaactacaactgcaccgcaaataatttcaaattgtatttttaaagcggtgcggatagtttgtgttatgggcattttaatgaacactcctaaatacaatagggaaactaactgcaacaacatagtacgtctccctttgaatttcaatattttgaccctctttaaaatctgaaggtcaaaagggatttaatgtgttttgtaaaaccacatatgtcctgaaaatgaaatggtgataattgtaggcttgtagcatggcttg

SEQ ID NO: 236188 - DNA, 1206 bp, Cannabis indica
ttatttataaaagaaatgacaagttaaatataaataatatatccccatccaaggacataatagccatgtttctaaactaacatttttaagcaataaaaattcacactaccattccaataaaaattcacactaccattccaaacgaacatgtttagtttagtataatgtggattgtaatagaatcattattactattacaatgtttgcttttatttttaaagctttgtaatgtctttatattgtaatggtcattacagtatgtattgtaatccccattacattataaaaccaatgtaatgatgattacattgttagaacatatttttttgtcttttttgttactttaatttaaattttaaatattaaaaataataaaactaaaagtatttttgtcaatatacaatttattttatttgattacaatgtttattagttaaaccaatcatcaaaataccatttttattataattcttattccattatattaccatttatattataattaccattcccattacattatattacattaaagcaaaaaccaccatactataaagaaaacttaaagaaaaaaaagaattaaaaaaagttttattatgaatcaagaatacatagtaagtatttatataagtatggaaaaaccagctagagccactgaggtataaagagttacatttaatatcatactgtatttgactctagtttaacaatcatagaaaaaaactcaatataaacaagaaagctgagcttttagttccttctttagcatgttttaaagtaactcctggctgaataagtaggaataaacaaataattaaattccctttagcatgttagcttcctttaaattcccttgtcacatgcgttttgcatcaggtcaaattaaatttcaattaaaagaaatcaaaaagtaaaaaaacaaggaatacatgttaaataataacattacataattaaaagatgcagcctccaaagatatggcgaagttgaccctatggtctttattacttaacaaaagcagtgattggaaatagcaactaagtcaaaacaataacaggccgaataaaatatgttcaagactattaacagtagctacatttaatactcctctaatgcttgttaatgcttcaaaatttctgcattttctaagagaaagttgttatcactaatatttgacttaagcatgaaattcatattgaaattttc

SEQ ID NO: 236189 - DNA, 873 bp, Cannabis indica
taattattttttatcatttttatttctttttttttatataataatttagtaacccctaataaagaaaactgctaatatttattgaaagccatactaatagagtcacacgaactgtgataaaaaaaattaatattatttgattaattaattatacaatcaaatatatttaaaatttagttttatatgtccaatgtgttcataatatttaatatctaaattttactaaatatcaaaacaaaaatattgcacaagtgtttcaataaaaaaaatgcatataaaagtttatttgaagattttttaataaatgaggtttaaggatccacaatgttgaatattagctaactttccttattaggggtcactaaattattaaaaaaaataaaaataatataaaaaaattaattaattattaatattaaataatagagtcacacataataaaaaaaatgtatgtatgtaaagacatttttgctgactcgcattttcttatagtatattcgagaatatatatgaacatatttatagaatctgccaagtgaaaactaaaggaaatgatgcattgcatgggtttgagggcaaaagtcacggtcaccactcaccaacagcaatcgctcaatggatcaactggtgccctagctagcagctatatatatcttaataatccttggccgcactctagatatacttatacctcatttatgatgagctagctagcctagctctaattaatggtggccaaatatgagaaagtgacacccgaggcatcaatattgccccccccaatttcatgtaacactatataaattcgtatatatatgtttatagatttatacatacaatttatattttcaaactaagaattatcttgttcca

SEQ ID NO: 236190 - DNA, 638 bp, Cannabis indica
aaaaaaaaaaattcacataactaacaataaaaaataataatgtattgttgatttatatctccaataacagattaaaataaataaaacaaaaataacaaattcaaagcaagaagaaaaaaattatttgtataaagaaaggtttaatttagttttagattatattttccttataaataaaaatagaatatacatttggtttattatgttttaaaatatattgtatcatatgtatttaattttttaaattactattttttatattaaaatattaattatatgtatatattctttttaaaatatatataaatatgtgtgaatttggttggatcagttacttctacatgtcaaacgcataaatagggattttaaattttccaattcaatctaatccgtactttgcgaatcgtatggattaaattgaattgagtattttatgaacacccctacatatattataaatcaatacaataatataagttcaaaattaattagaataaattattgtatttatcacacaaaaaattaaaatttatattttacccacattaagagtttctagttgaaaacacccctataattatacctttttattaatttctcttttctaatatttctaagaaactttactctttttttgg

SEQ ID NO: 236191 - DNA, 1589 bp, Cannabis indica
cagagagccaacaagatggtagcacacatgatagataatggagcctctacaaatattttgttcaatacaccgtatgaaaaggtggggctccaactcaaagacttaacaaaacaaaacaaacacaattgtatgatgattatgaatagaaaatgaaattccttaaggataacaaaagcatttaaacccgagattaaaagcccggtcagctagttgtctgaaaaatgaaaaataaattctaagtttaaagaccgcttggtcggtcaccttgtcttaaaaaaaaggccttatggccaaacagatatataaaaaaaagatagtaaaaggaagcatttaaacagatggaaaactaggctccttgtatgggtcagttgggtcagaaggagctggaggatcgttagtttgagtagaaggcacttcaacacttagatcagtgggagaggtggaagtggttgcctcaaattcccccgtaggccacctgagcagtacagtagtcgagaaacatgtctttaaaatcgcccaagtaatcaaaatttgccttgggattggccttttaaaagtcataaaagatctcgagactagttgtctctagggcattcactttccctccaagcctcgccactttagacttgtgttgcttagcctccgacttatgcttctcaacctcagccacaagctcttcctccttggttttcttttcatcctccagcctacgaagaagggtccaccttctctttcgtccttgaggctgaacacttcctaagataaagaggcaatgtcagcttcgagcagctcgatggatggcatgtcgtgcaactccttattcagttcggccactttgttctcagcagcaagaagcttcttactgacctctcccagctcaatgcgcacagctccaagttgaacccgggcttcctcggcatccttcttggccaagtccacttccatttgtattgtgttgaaaatggcaaggttcttagcagcagccgacttagctcgggaataagtataagccatcttcagaccagtctggacagagaggggacattaagagttgaactaattaaagaataaaaaaggaaattgtcaaaaaagacttaccctcgaaagctccttcaggactcctcccataactagctccaaagacagatcgttgttcgccccagctagttgctcgttcacctcaaggaccgaccgattcacataatggttgagcatttctctacctcttttggtcttcgggtgcagtactggaggtgcaataggggccttaatctgttcagacccgcttctgaccaacttggatccgccctctgcctgttcaggcttttccgaactacctcctaaggaatctttggacttagtcatttttgaagcaggagggtccacgacagtttgttcctcaggaaggtcaatgaccattcagccggtgcattctctttggacggggttgtctcaccggggttgtctcaccgcccttggacttcttggccggaggagataaacctgagcttcctcccactctcttcttcaaggcctcaagcattttttgagacatgtctgcgtggaataaaagtaacatagtcaaaaaa

SEQ ID NO: 236192 - DNA, 1196 bp, Cannabis indica
aaaataactaaaaaaaaaattagtaagagaaaatttaaaacacaacttttgatatttaatctccataacataaccacttgtcttccctaaccaccaacccatcatatcattgttcatcattttgaaagtagggtcccaaacatgaaacatttggagattcattcttaaaaacgatatagaaactattagtccatttaccgttgcaatttgtcaaattttttaatcttttatttaatcatgttacaagtaattaattggagaccaatcttttatctaatcatcagtaaaatcgttttcaaaagaagaagaatatgactttattgaaaaatgaacttatttaatctaacacaaacaacccagttgaaatattcaaacttttaacaaagatatcacacatcgagaagtcattgtagaattatttgaataactgaacatttaaaaattatacattattttttttatataatataataatccaattacgctaattagaatttttgtttcttaaattttgacatgtactaaatcatactcctaaatttttaaaaatgttaaaaattttgcccaaattattaaaattattagatttaaagatttctagaatttcgttcaattttactaccatgatgattatccttgtaccaaattgtgccccttgaattttgatatgtactaaatcatgctccccaaactttaacatgtaccaaatcgtgcaccttgaacttctatctatgtcaaacttcaaataataaaattaaatggaagtccttaaatctaacaattttaatagtttgagagaatttttaatgacctgtaaagtttagaaatataatgtaatacatgtcaaatataatttcggggatcaaaaatcctaattagcaaattttttaacattagtttaatataccatacagattaggcaagtcagcattacacaaatataataaaaaaaattaagcatcagtttaatatatattagagttagtcacggaaataaaatattatatataatatgaatagactactcctcttgttgtcaataatttttgaaatgaaactcatgcaccttaatcatacaccttttcaaattctaacatggtattcttagcatgaaaaaggttgaggtgtgatagtctagttcactataattacaaataaatagaaaattatttttttatgtatttttaattattttt

SEQ ID NO: 236193 - DNA, 2296 bp, Cannabis indica
gtgtgtgttaaattctaagtttgtttattaatttttaggctaattagcaatttttcctccaaaactttgacatataccaaatcatgccctttgaactttttttgccgttaaaaattccccttgaactattgagattgttagatttaaggacttttgtgtaatttcattcattttactgtttcagtgattgtttacgtactaaaccatgctctccagattttgatatctaccaaatcatgcccctcaaacttttatatgtactaaatttatccccttgaactttcatccatgttagaatttttttaataaaattagacaaaagtccttaaatctaacaatcttaatagttcagggagaatttttaacggtcaaaaaagttcagggggcatgatttagtacatgtcaaagttcggagggaaaaattgctaatagcataatttttattttgaagattgtcattctaatattactatattttttggtttgggttgcaatattttttcagttttgctagttgtaacgacaactattaataatgggaatgtgttttattttaatgtgatggggtgatgtttgaagaagttacagctttgttgtcaaaatttacaggggcaattttgtctcatgtggcttgcgataagaatggtttggcaaaacatgctctttaattagacgatgaactcacctggttcgaaaagattccattgccaattgtgatttgctgctttgttaaatatgtgtgacgctattcactacgtcaaaaaaaataattgtgagcttcaagagttcaaacgaattaggggtgtaaatcatccaatcaaattacaacccaccgacccaatctcaatcgatctaacagatcggatattcaatcataattggatcagattaaatgcatgtaaattttaaaaatccaatcagatcaaatcggttgttggatgggacatccgatctaatggataactgagccgaaccgaaccgatccaattaacattcaatggtcatctaattatatttatatctttttaaaatacatttataattttatatatttaatatgttttatttttaaaaaaaaatatatgaattgattttattcctattattattatgcacatgcacacatgagattatagaaaaaaaaactagatctaaaatattaattctcatattcccaaacactaataaaattatcaatgcgtattgaataagttttattttttggcagaggttatgagaattaggttagaataaacttatgtttattatgtatgttggtttattaaattttaaattatatttttttatatatatatctctatttttaatgaaatcagcttaaatggtagctaaaatggactggatgtatctaatccaatctaacaaaaaaaaaaaataagaaaatacatccaatagttaaaatcgatccaatccaatacatctattggatcagataagataggatgattcaatttgattggattggattggatcggatgataaaatcaaatatccaataaataatttaggaaattatattgtatacccattttatttttacatgttttaattattatctttatttctatattctttgagatgtatccacttttttagtatgatgtctccattatatctcttaagttaatgaacattatgtgttagacttaagtagagggtgaaggtatattaggtaaatccactcacaaaagtaggtatattttaatgaataatatgagggtatttttatataatggatacaaaaaataagtattcgctcaacttatctctaaataattagattgaacttgttaggtttaaatctattaaatatgatccaataaacacttctaaataaaaatacatgtataaatagtcaaagccatacttaaatgaaaatttaggttgcaaaagaaaaatatatatagaattttataaaaatttataatataagaatataagatatttaaataataatttcaacaccttaaaaaaaataaataaataaaataaaataatagtttcatcacaatttatatatataaattaagttattgttaatacttattttttttcttttaaattatctattttgattgttgaatattaaaataaaaatgtgatatactttacttaaataaataatgttatttaataaaaaatatttaatttaaaactaatatatataaaaataatatatatatataaaataattttctgaaatgaaaatacttaaatctaagaacaaaaaatttgtttagtatgtcgtattatatattatattgtattgtattaa

SEQ ID NO: 236194 - DNA, 1540 bp, Cannabis indica
ctgtttctagatgtcgtgagtgcccacttgcattttggatccaagcaataaattttgtatgttcttgcgcaagactttttgacctagtattggaagttgtttctaattgcatagaaactaagcacactttgtagtgtttctttgtccttgtatatttgtgcttcttctatttcaggatgttgtgaatctgtgattagtagtttgtcataatctgtgatttctgtctctctgtcttagttgttttccagttgatcaactatttcctctaccacaattttttcatagtccatgaagtcgaacgttttttcaccatcttccaaaattgtgccttccaatgtatgttgttaagttgttgattcttttgttggttgtgcattgtcttccattgtttctattgcatatgtttgttcaactaatgagttgttatttccaagaatcatggattgatggttgtttttgtattgctgatcgctttcacacatagtggatatgctgtgaagtcaagttccttcagttttagttgtatgtagaaatttagaatttgatcatcctttatcgtcaacggttggtatccttctttcacttggtatttcagtcgtaggatagtgttttcttggttgcattctaggacttctttcagcttgtatattagttcatcatatttacaatccattgagatatattgcccactagcttaataatttgaaaaattcattcgatcatcaaactgtccattacaaaagactaggaatgaaatttcgtatttttcctcagattatgaaattattattattgcaagtcagctaatttgaaattatattaaatctgtaaatgcttttgttataaatgattctgaacatttttgttaaaaacttaaaaaacaaaattaaaattatctgtatgaagtagaaaagaaacttacttctatctgctttcttctattcaagtcatgtcttgccaattttgaaccctatattttacattagtttttgtttgtatcacaactgttttgcaactatcgtaaaactaacatgcaactaattagcaactagttgaataatttcataaaacaaaccatgttgtagaaatatttttgaagtgatatctctttttagctatcaaatgaaatacctgcaatattgataaacaccattatgaaatgataatgcaactataaagcaacctaaaaaatcatggagcatacttctacttacgtagctgtagattcattcgaattttcttttctttttttgtgtataaattaatatattcaatattagaaatctgaaatcaacgacaatgcaattggatataccttagatctattatccatgcttttttttccctgtatttgtattatacctgatttgaattgatggggagctccagatctgtttgttagagatctacattatatgagtctgattttcgatattaggaggagttgttttgttcgaacaaaactgaaatacaatgttgaatttcaattttgacctagtttctctactcttatttttatcaatttcagattcaatcgttt

SEQ ID NO: 236195 - DNA, 906 bp, Cannabis indica
atttttagcaactctaattgcttatcctttctattcagacctctcacattccaccctaacaagttgcacttatctatgattagaataattcaaataagaacctacaaccctgtatcgcccgcacttttataaaaatattaattttatttacaagcgttaaacacggaaaaacataatgtcgcttttttatttaatacttgaaaatgttcacaactggccagttttcgtacaaaagacataataattaataactaaaataattgcgacataagtttaataacgtaaataaataaatcgagcgtcctagaccgcccgcagttatatggccctcagcgagttcacacacacaagcatccaaagttctactcgccaccagttttctaaactttcagttaccttggtctgcacatggtaatttgataagggtgagcttaaagaaggtgagttgtggtcttagttgttgggggagagagataaagttttagaaatcttgaaattatcacaaagagaaagtgttgggtgctatttatagtttctaattctaactaaggccacacttatggtaactcaatattaaccatggttagtatttaaaaataatttaataatataataaaagtctatacagaaccgaaatccatctatgacttccctatcactcggtcaaatttgttaagtaatgagagaagctctcctatataacctgaaatggttttagttggtcttagttgttttattaatatgagcctatttctcacagaaatccacgtagtgacttctcagctagaatctctccattctatcccatcatttaccccactcactgccacatgtccatgcttataaaattaacctaattaatatctaaaaattgtattcattccacttggttctacgtgccataaa

SEQ ID NO: 236196 - DNA, 1149 bp, Cannabis indica
gattcaatagtaaactacaaataaaaaaattagttcaagcaccatacgtttgaacaacttaataaagttatttagaaaactaagaaacctgaattgaggaattaatctctggattagtcaaatcatccaatgacttctgagtatcattctcatttcgtcgaagtgcttcagctgcaagctccttctcaaacctacaaaatccatcagatacccaaaacagacatgatatgcgcgttacacatttaattaaacaaaagaaaagaaatcgatatcgatttaatcaaaacttaatgagattaaaaaatccattgagtgaaccatgtcatgatatgatcaatcaactctcatatcagaatttctcaattaaatttctaatagataattatgtgattcgacaaaaataaatagaatagaaaagcatatcatatacttattgtgttatcaaattaattgattttccttttgacacaaatccttaataggatatagtatattagtattcatcaagcagaaagaagctatcttaaagagatttttgcaaaaaagtctaagacaatgagcctctcatattcaaataagtatgccttataatagtaaatagctatgaagtctgtgttcgtgatcaacacacaaaggttcattaatatgccttaatattaataatagatagctttatagttttgtccttacccaatagagaccaattcattcaacttctggagatccacagccttctttaagggtgtccttccatatgccttttgctccctgcaaaattttggccaaattaaaactacagatagagaaacatatcttataaatcagattattaatgagactcataagactaacatcaactccttttgtttctgaagatcctctacccttttctgtagcctctttgctttttgttcaacaagaaaatcgatggcactctcaatatcttgattgctcatccgcaatgccctctttgcatcgtgttctctaaagcccatgctcataacaagtgacaaggcttcatcaggcacctgtagctgaaagaaaccataaaaaacacacattagataaagtgaggttcattaccactagatggcagccatttcccggtttcccctttgatttgttacataataatgggaagaatttcta

SEQ ID NO: 236197 - DNA, 578 bp, Cannabis indica
gaatttgagtttggagtagtagccaggaatttgtcttatgcgggtagaattgtgttaattaactcaattctactgacgactaattcctgttggtcccaaattataattcatcccaaattgatgattcaaaaaattaaccaagtgtgtcgagtctatctttggaaaggtagtgagatgttaaagggctagggagtgtctcttggatagatgtttgtagacacaaataggaagggggattaggtttaaagatatagctttgtggaaccttggtgccatgggcaagcatgtttgggccatcttaaataagaaagaaaatttggttaaatggattaattcagtgtacattaaacaaggagattggtgtaactagggagtgttcatccaatccaatccatactattttgctcatagtgcatctgatccgtactaagtacgaattttatatttttgattcaattcaatccgcacaagagttcaaatccaattcaatccaatttgcaatagtgcgaacttgatcaattattttagattgttacttttttaatatcaaattacttaatatttattaaaatataaat

SEQ ID NO: 236198 - DNA, 576 bp, Cannabis indica
attcagattttataagttaattatttcattgattctttttatttattagataaacaaaagtttagaaaaacctagatctctctacaagtctctctctcttttgaacaccaaagaaaccaggtgagggtttggagttttcagttcaattttgtgtagttctagcagatttaagcacatcaatccaaggtaaatgattctagcctctttctccttgatttaacttttagtgcaagaatcagttaatagggtgttgtgttgatgaagcttgtttaattttgaattcttgagttattttaggtttctaagggttgttttaagctgaattggtaggctttaggtatggtttgtgtaaattggagtttagagtgctcatcctaagtctttaatggtgtttttattttctgaacttattgttgcattctattacttggattgggtctattatggcataaattggtattctagaggttttccaattgttcgggggttgatttgtggtgcggggagcatttttggtggttcttgcactgaaccgatcaaccgggttaggggaacctgtagcaaccagtcgaccgg

SEQ ID NO: 236199 - DNA, 598 bp, Cannabis indica
gaatcggtgctggagcgagaaacaacgacttgcttctttgaggaccatgagaccaaggtgtctccaaagtaacacagtaacctccaatagatcttcaatcatcaggacaacattcccaatctgcatttgtatagccagtcaaggtgagtctttcacaaggtttcatgtgtagtccatgatgagatgtccccttaagatatcgaagaactctcttaacagcactcaagtgagaagtggttggtgccttgagaaattggcccagtttgttaacagtgaaactgatatcaagccgcgtgtgtgtcaaatattgtagtgctttaaggataatgtctttccaacagacattggagttgggcaaagctttaagtgtatcatggttcatttgagaagatcattgacatattttgaatgtgacaaatacatcccagttatatcacgatgcacttaaatgcccaagaagttatgcagtgagccaagatccttcaaggagaaaaccttgttcagatctgttgtgaattggttgacccttttttgttgttccctgtaataagaatatcttagacataaatcaagaagagaatgatttcactttcagttt

SEQ ID NO: 236200 - DNA, 6110 bp, Cannabis indica
tcattcgatctaatttaattagtaattgaatttaaaaaattatcatccaatcaaatctaattaaacttcaaaatctaatctaatcctatttaattactaattggattaaatcgtttttataattagatatctaagtacatatctaatttttaatattaactaaaaaatattaaaaaaaaatacataaaaactaaatattaccctttatttaagtttaatactccataaaaatattatcgttacaagtgtaatgtaactaaaagtttaaaataactaaaacaacaatattaccaagtaataaaatagaacaaaacactataaaaataaatacatagaataatcaagtattactgtttaccaagatttttagaaaacgaattataagcaatttgaactgaagaaataaataattcaaagaaaaaaatagaacaaacacagggtttttacgtggttggggtgttaacaagccttagttcacgattttatattattatgtatttaagctaggaaagcctttgggaatacaatgagtataagttctctatttttgcctcaacaagtactgcaaaaaaattcaacccttaattcgaaagatttcttaggtatttatagtgtttatatgaattatacttagtttctcttttccctctaatgaggagtttacatgaaaatacataaggtggggctatcttcgtgaggcccaacccatgataggatgaacatgctgactaagcatactagacacgatcagactgtcattaccgtgtcctctaattgtgagcaagtaattataaattaattgtttgatctctattttaggtaatttctctttttagcttgatataatcttctgacaaaaatttgaggagagttaattctttattctgtgcgcttggataaaaaagaaaaaccagactagtcttccaggaacacgttgtatgaccctcttaaatcacaatactggaactgcttctggattcgggttgtccatagcggaagctcgcctaagcatggagctaaaggtaccttcctggaaggtcttgtcttacttgggcttggcccaaattatattttttgggcccagtggcgggctttagatattgacctagagtacatgtgtcctttgccgaaaacacgaataacatttacacccaagcttctagaattctgcgtattgtgaaagcttgccctaatacatatgagtggacatgcggaggttttaaagtaatatttctattgctttctaggtattagttgattacagaaggtgaacttccatctttagttttttagaagtaaatgtggcagtcacctagtggtggaggagtacgtttaccgatgagctgctttctaggaaaaagctttcatttcgatggctattcattgttggcaagaaaatcaagaaaagaattttcatcattgatttgtgtctcgattctagagggcattaattctttgacacgcttagttgttggacttctgagacattggatataccaccttgggtataaatacccctcaaagataccatttaccaccttatccaaatttcatatttttcacacgttagaattaaaattctctggagagtaaaactataatatcctactagctaggcacgctgtagtgttttcttaattgacatgcatgcctttgctaatcaaaggattaattgaaaaacgtgaataattaaaatttttaaataaacataaattttaataaataaacataattcctataacactgggatcccgttaaaagtttacaactataatcaaaatatatttcatacaaaagttgttacccagcgaccaacaaaaagtctaaactgtcccgaagaccctgaacactccaggtctaattgtcttgatatttagaatcttcatccaactctcgactcattctggttcagttctagctcttaccagcacatgcacgtaataactgtgagtcaacaaactcagtaagaaaagcataaacatataaccagatcgtaaccaggtactcatacacctaatcacgatcctataactgggtcaagaatattctcgacaaaagtatgactaacaacgaatccagtctatactcagtactctagttgtactgatgttgtagcaattagttcatactatctgaaagtctaacatatatttgttgatatttgagtgcaagtttatgtgcgcttcactaatctcctaatatgctaatctgatggctacttatttgtctgacatatatatttgttggtatctcggtgcaactctatatatgtacacctcactaataccctgatatgttattctaacgacaactaacatgcacactaaacatgtatacatatatgaaactattatactaatcttacctagattttgaatgcaagcgtgctagtaacctaagtggaaactgctccttgacaatttaaaggccactaagtcacaacatacataaacttgtaagtgatactctaaatcactttgtggggacttaaacttaaaactagaaatttttctatcgataaatagtgtggccataccctaaatatcgagaaaacacgaaaaatgagactttaggaaaaacaccgcaaaaaatggcaggtcgtttttcctagtccctacttgcttaaaatggtagaccgaatctggaaaaatggtctgtcgtttttaactgcacattatcataaatcctcatttctcacacaaatctaccccaaatcttctaataagatccaaaacacctatttgggacattaacaacataattcaaccaaaaattttatcatcacgaaattgtaaataattctactattattgaattaagtttgagatttaaaactaaaaccttgctcaacctaatctatagccaacaaaaccacacaaaaacatacaaatctataaaaataaatcttctaaaaaagttctaaaactacccataacctaaaagatttaaaatccaataggtcaaacatcaaaactcaacttatgcttaagaatttcaaacaaagaagcgatctaacttaccttgatttcacccaaaaccaaccactattcaaaacttgcaaaaacctcttgaaaattctttgaatttacaaagaaaaagttgagtcttcttgggtcttcagagaaagagaaaacaagattgatggtggctataggtgtaatgtttatctaaaaagaattactaacttaataaaaacaaactaatatttaactaaatgtgggtcttatctacataaaacactaaagacaagcttactaatttaaaggtcaaacaataatttgctttttctaagccataaagtaaactaactacttaagggtaaaatggtccaaaatcataactctaataaatcttgatacactaaatgtctaactatcttactgtgctaattctaagatactcaactatatctaattgactctattggccaaatcgtcgcattctactgttactgggcataaaacttgaaaatcataaatttcatatacatcatatattatatacttaggattgaaatatatctccataatttagaaatccttttcatctagcctatttcagacaatacattctagtgtttgctaagaaacacataatcataagttaataattaaaaccttaattatctactaattcccatgatttaattatgcagtcattacaattattccctcaaataaatgatttcatcctcgaaatctaatctaaataatctctggatgaagagtcctcatgttgcaatttaattcccaggtagcttctccaccttactgtttctctaaagtattatctttcttatcgaggatctcaactagttttttctcgtaagatagatctaacgaaagttatggggtttcataacttacgacaatagtcgaatccaaatcatacttcgttaacataaaaatatagaaaatattgtgtactgctgaaaatactagaggtaaggctagatgatatatcactactccaaccttctcgagaagctctaaagactctaaaaatctagggatcttgtcctttttcccgaagtatttcatttctttcactggtaagattcataggaagacatgatcccctattgggagttcaatgtttctgagcttcggatttacatatcttctcctgcctactataaaaaaatacacatcttggccttaatcttctctatagccttacaagcccactgaattgactctgagccttagtattttttatccctagttcatcccaatgatttggggaatgatatttctcacttcccaatacctcatagggagccatctttttcataccatgatcattattgttgtatgcaaatcctatcaacaatggatgcttgttccatgaacccttgaaatccattatacaagctcgtaatatatcctcaaatatctatccctttggagtggtcatttgagggtagaaagtttcacagaattttagttttgtacctatgaccctttgaagattttcccaaaacttagaggtgaatttcagatccttctctaaacaatggaccttagagtctcatcaagtcatattatcccccttatatcaattttccatagtaatcttatgtatgcgttgttttcaattgcaagaaatgcactgataagtaaaccgatccataactttccatatagaatgaaacttacctatggttctacataatctaaccacgaaatctatagtgacatcttctcatttctactcaagaagtgttaaaggttacaataaccctgtaggtctttaatattcaactgtagtttgttgacaaattaaatatttgaaaacataatctaccgcactcttctacataccaaaccataactaatagaatttttaaatcttggtagtactgggattcaatgtacaagaagtggtatgagcttcgcctaggatctctcttttaagctcaatattgcttggaatacaaacttgagtttggtaaagtaacatcccgttgtttaacactgagaaatatttagtttggccgctaagacttcttcttttctactatttcccgatccaccaactaagcgcttctgattctttctaacaaatccaattgaggtgtcaaaactattgagcatgccaaccacaaactcaattcctaacttgaccttgtcagtcgctagctgaaaaagaatcatggttttgttgaaacctgcctgggacctttccttctgaggacattcgccactacattggccttcccacgatggtagagaattcgtaataaaaaccctaactaactccaaccactgtctatctcactttcaagcataaaacatactattctttgtagagacaatgttaacaaatcttaaaagcaaagtccattgccgcgaatcccagatcataagttaggtagtgttgctcatactcctactattgatgagaaaataagcaataaccttgagagtctgcatcagaacatcctagatcccgtctagatgcatcatgataagccacaacctttcttagtctgatgatacaactaacactggagttatattccacttttgcttcagctcttaaaaatttgtttcacatttgtttgtccatatgaactgctgatacaattcaattcaacacaatacaattcagtacaaaataatataattcaacacaatacaatacaatataatacaatatggcgtaccaaaggagcctttaatgtatatacatataatttaattaggttaattttttaattggattttgagattgacattaaataacagattcaatctaattagaatgcaactttaatcatccaatctaatcaaattgtaattgtaaattcaattttttgtaattagattgaattagatcgattcggtcaattggatttaattagatgttgtccactcctagtctacatgttcaatattttcttcccaaaaaaaaaaaacgctcaccattaaaaaagaataattatagtggaactcacattattatagaagaattttaaaagttgaaatatatgataggacttgtttgacatattattattattattatacattctagaaaacgaggaacaaaagtatattttcttataatcatgggttgggttggatgattgttttttctttttcttt

SEQ ID NO: 236201 - DNA, 602 bp, Cannabis indica
tattctcttcggtgcgacaaaaccctcacccccactatctattttctttgattttcaatttgaaacctagtaattcaagcttcggtagtaattggataggtaaaccattgaagaaggagagcttaaggtaagggtttgttttgttttaagttgaaaagtttagttttatatgttgactttgtgatttagagtagttgcgggaattgtgactgcatgaaactgtttatgggttgctatgggactagttttgatgtttacttgttgaatttaagatgattttgaggtaaaaatcaagtttgagctttataaaactcaaagcccgaattttaatggtgttttttgtttaagggctcgtttttaatttttattacattgagactgttgtatatatggtatacatgtatcttgtaaagtttggaatgatttggataggtttcggtggtgtttcgaagagtgcgaaacttgagatttacatttcctatagaaaacggttcaccatttggagtaaatagttaaccgtttcttgctaggaaaccccagggaaaatgattaaccgtttcacaaacggcagaccatttttgttggtgtttttgaagtccgtt

SEQ ID NO: 236202 - DNA, 502 bp, Cannabis indica
gaagaaatcaggggcagcggctgcttcggatcctgataacgtgcaattacatgataaaaaggaaatattttataattcttatatcattcatgatgcaattacttgattaaagtataaaattaacaaagattcctaccccatcaatggaaattgggttctttctacttttccatttgttgtcattggcattgaacttaggggtcaacacaatgggaacactgagaggcacattggtggttacacctagtctctttgcacctaccatctctttggcaattgaatgctccaagatgtagacatgtttggattcatgtaatcttcaaaattgtccacactcaagcagcaacaaacagaacccattatgccagctccacacttttgactcaaattccaacacagtaattcttcaactcattgaaagaaaacaaacgcgaccaaactattgatccaacaacattcctctaaaacaacttaatacccctttcaaagaaggagagaggac

SEQ ID NO: 236203 - DNA, 948 bp, Cannabis indica
tttttgaatcgaaggtgttttccagacctagcttaggggtatttaagtgatgcatagcctatttttgagccatagggagttaggggtttgtccgattatgaattagggtttattctgaaattcgattaaattgtgttaccaagttttgtttcgtgacataggatccgaaattgttgagtgtagttccactcaggtcggtctgcaaacctgaaattggattgaggtatgaaagccaattgtactgctaagcatgttaagtgagaaatgattattatcgtttgtaactcgattatgattaaggtaaagatacggtcattaccgttattgtgaatgagtaattactcgcttgaaactacagataggtttcttacttatcgattggattatcgagcaacgatagtgacatatgtagctcgtggatgacgagtgataaggatgctttatgaggcatcaagaatagtttgtcttattagacaaatagttgtcatgtaatgctcgattatgtattgcataaatatttattgtgaatgatgaaattgtatgctatgcactgttatgatatctcgtgttatataatggctgtgttttacttactttcttgttgagtctttgtgactcacgggtatttcgtggtgtaggtaaagggaaggggaaatggatcaaccatgagtcaaaaggtctcctaacgatgtacatagcaaccgcggtgtctcggcttccaatgaacatgatccactcttttgattatgttttggaaatatagccccattttgtaatacatgttttgaagcatgttgtaaaaatttataagcaaggggatccccgacttcagtaatactttgaatgaaaagtcaaattttttaatttattcaatttttttttaattatgtcacacttttcttaaattggtatgttaattataaattaatttataaaagcatacacgtg

SEQ ID NO: 236204 - DNA, 1267 bp, Cannabis indica
tttttgtgaccaaacagagaaaagaagagtttaaaaatctgctctcacatcaatttttcttatatataaattcatataatattgatttgtttgatagtagaggaccaatatttactatccatggatataagaaaagtagcagcgattgttgaagcattcactgatcacataagaaaatttaatgaattgaaggatgatactgatgaagattcagcaaagttggatgcagctgtgttaaagatgagaaagtcggggaaattcatcaaaagtaacgctgtaaatgctgagtatgttttatcattgcacttacatgatgagaagatgttgtataaggagtacgatggatctccctttgatttggatttgtttgacattggaaaagatgaaaacgataggcttcttcaccaggtcggtcatttattcctcttattctcgtaggtggtatgtgatatgtttcatgttttttattataatttgaaatagataaataatcgcccaggtttgtcaattggaatatgtgcttccgaagactatcctaaatcgtagttctttgaagaagtttttttggtttaaatcaacatatggatgctttgatgaaatatgtaatggagcctaatctaccaccagagtaaatatcctcggttactttctcactactatttgctaagtatttttattttattggagaatgtttttatcttttatttatttggataatgtagtcagataattttcttgggagaaaaagttgttgccaggtaggtgtgacttcaaaacgttgggcgaggacaaattagttgctccaagggtaaggttttgtgtattaaattaaacaaattacacacttaatttatttcatttctttataaaattggcaatgtgattttgttcgttttttgggttctaggtcgtgaattgtttggtggagatactaacagccgttgagagatttgaacatcatgaagagctaagtttttttggttggattccaaccatgttgtccgtaagttattgtgtcaattgtaatttatcttcaaaatttacataatttggtaaaatatttattgtggcgttgtaatttaatgattcttctccttagagacctgaacctagaagtcatgagacgttaagtgaacctggaaagtggaaggagtggtgtggagctatacagatatgtcagaaagtatttactcctcaatatgtctctatttttttttatattgtaagttaatcttttgataaatcttatgatttggtgcaggtttat

SEQ ID NO: 236205 - DNA, 879 bp, Cannabis indica
caatacattcttctctctcatagcattaataccttgatgaccgattccctcattaacacaatccattcctccatgattttcgccattttgagaatcaattctctttccacaatcagctcctttcacaattaaattgtcaatccctctatcactgttgctctccaatgtcaatccctgatttgtagtcattggattagcatcagtattcaatgactcatctctgattgttgcaccttcatcgaaaaactgggcatctgaagctgtccctgttcgaagccaccgtgctcctatcaacttatttttccgtggtggttgggccttcatccacaaaccataaggtttttctatcaattccagcggggtatcatagagtctagaacaaagcctctccgaatggccaatgatgccacatatgaaacagaacgtgggaagaaattcatacttaaaattcgtccacaaccactgtccatctgttctctttaatttcattctccttttcaaaggtttctccacattgatcgtggttctaacccgcaagtagtccctccaaatgccattaaaatttttaggatctgattttacatacgtaccgatgtaattaccaacactccgcaccaccatatcagacataaagccaggtcgaaggttgtgtagctgaacccagatgtccatccgattcagtttcatggtgaaaggatcatcacctttcttcactcgttcaaacaccaattggaacttgttaaaagtccatggactaccctctatcaccctctgcatatcattctcatgataaaattgaaacaagtacaaattagtctgtagttctttcacaaacataccttttccaggttgccaaagagaagccattgtatgctgcat

SEQ ID NO: 236206 - DNA, 1052 bp, Cannabis indica
tgacacggtcaaggtattaggggcgacaatatcgcctcaatagtcgtctctaatagtgtgcacattaaagtcttacacttccccttccccaagccatttcatcttcttcttcccctaatttttattagaataattacataaggcacaattttttgtaaaatatttacatttttacgttcaaataatgtttttttttttacatttttacggtttttcaaaaaataacacaaaaacaatataaaatcaacaagaaaacaacataaaagtaacatgaaaataacatcaaaataacaacaaacaaacaacaaaaaataacatacatataacaaaaaattaacaacaaataaaaaaaatttccaacataaaaataccgtattttatgtaaataaaatcaaaaaaaatcgtaaagatgtttaaaattctgtgaaaccgtatttttgttatttttgtgcatttgtgaaatttaacccatttttatttttatttttctttgaaaaaaaaaaaacccctctttcccaaacccaaacccacacccaacctcaccctcttccccttcactgctcctagccacagccatgaggcccacgacatgacccagcccggagcccaacctccgaccaccaccaccatcagccgcagccatgaggcccacgacacgacccagtcggagcctaacctccgacctccaccaccatcagctgcagccaccaggttagtgcaaaaaaaattatttttaatttttttatatgcaattttagattattaaaattattagaattagctattttttttaaaaaaaagtattaaaattaatagttatatatatttatgtatatttatatatatatatgaatataagtttgtgtgtatatatatttaaataatataagtatatatatttgtgtattatattaaaaaatgcatagtacttaaatatgtatatcatcatatagaagagtttaaatatcttaaatattcatccgtagtgaagtaagttctgtgattaaatataatgcggtagtggattttttttttttttttttagtttttgt

SEQ ID NO: 236207 - DNA, 1430 bp, Cannabis indica
catttcacgagattgacatgtgttactttctcaagtacaaccaaatttcaggtataacaattgccccttaaaaagttcttttcaatgaaaagtgctttttaaatgattaccgagggtatattcatcataatccaatttgaaaaaattcatgcttttagtttggtggttaattttttttaagcacagcattagcattaatgagccatcatttccacttctccctcatttctatctattggatctctgtattttaatcttacggtaattaagccgaagaaccattttcccaccattttttccttttcaaataacttcaagcttttatgcgaaaaacccattctgattttttgaaaccttgcatgccctcattgtcgttgacatatttcgtgcaaatttcctcagattcaatcttcaatctaagacgttcccatagttcgttcagtcgtttttctcaaacccagatatgaaattttcccccgctaaggcgtacctctttaaccaataagttttcattctcttccttctttgtgtattttttagtcataactaattgcatcatcattcttttttctttgggttcgataatttgttatttaattttctgggtaactttttgggtttagatgaggtaaaaacttaggtttaccatatttatatgtttctcgttttaataaatttattctaggaatagggatttctcttttcatagaaatgtcccaattttgttctcaaatttattctctagaattcttagaaacagaatgtcccatgaaattagccctcccatttaaactaacaactaaaagcctctagccttactggaaggaaattatgcaaagattagggaccatttaataaaaataaaccaagacgaagtttctagtcgttataggtgattactgcatgagatatccgagggtaaacacaattttttatgagacgcggcctcgcctaaacctccctttttatcttcgattatgcttggaagaccaatatttttacccaaactcactgttgcgttatccctaggtgaccttgaatttgacattatatcagctaggcctcgtaagtcaaagacccctcaggatgccagagtcaccttcgaggctgaacttattgaatccaaggttaggtcaattagagcgtatgttaggggcatactaaaatccagtggtattgaacaaagccatgaatgttgcattaggtctgctgctcctgggtaattcaattgctttccaccagaaagagtaattcgtgcggaatgtaggggggcaagcactagttattcgtcgaaaataggtgcttggagcctcgaacatatcaaggctggcggtccttcccctgagggactatttcaaggagttttgtaatcatacagaattcttgtaagcttaaaggttctgttccatatattaggatgggagagcccc

SEQ ID NO: 236208 - DNA, 561 bp, Cannabis indica
cataatttactcaattcgatcccgaaatcctaagacaaaattaagacttggtagctgttaagtgtaatataaaccccacaaataaaatgcaacattttaaatctacactagtatgtacctgatgtcaaaaatggtattcgaagatacacattttgttctcttccataaatatccttgttatttcgagtatcgaacaaatctccaaacaagaggacacactcagtgcctattagcaatagtcagagttcgttagtcaattagttaatacagctgttttactgttgtaacaaactattatgccacttgtttctttggctgttttctgttttacttttcttctctgtaacaactctgctcttctataaataacatctcttcctctaggcttgcttaactgttgcaagtcttgtgatttctatctatgattgagtcctgttagattgcatagataagttcacattctacagtgccaatacctaaatcataattattaccatccaaattggaattgtaaccataagcagtacaagagcagttacttaagcatttagcattgcattc

SEQ ID NO: 236209 - DNA, 1352 bp, Cannabis indica
ggatgtgtggaactctccatggatcccatggcttgattggaacatgtttagagctgcctttaatccattaattgagcaaaattcggtcaaggtttcgacgttaattggtgcggatggtgaggggagaacgagctctactaatcgttggtttttccctagtgttgctagttctttgaatcttatcaagcggctgcctagctctagggaagatctgttggtttggaaagatgccactaatggattgtttactccgagtgttgcttataagtcgattatcaagcatcgttggggtgatccggacttgttttggaaccgaattcggaagctcaagatcacggagaggctgaaattgtttctctggaaaattcgcaaagatattctcccctttggtagcctcctacggaggatttttggtaatagtagtagctgcgttatctgtggtgcagcggaggattcgactcaacatctcttctagaactgccctcttgctaaggcggtgtggtttgctagccgctggtccattagaagtgagaacctccactttgactccccgagaaagatggttgaatggattgtttctcctgattttctgagtggtgcggatgaaggagacataggagaattcaatagattcagtatttgcttgcttgatgagctgtggactgctaggaatcgagcttttcatgaccgtgtaaacccgttttggaggggtgtgttggctagtgttcaaagggctgctacatgtctcttgtctgcttgggactctcggcctaattcggaggtggcccaacatgttcttgaggagatttatgtgggcaaaacggttctctttgtggatgcagcgttcaaagacttgagagctgcggctgggattgttgtgtcggagtcggagggtagttatttggaggccatgactgtgacttttgatgcaaatcagccgttggaagctgagtcttgggctgtgtttcatgcgatcaagtggtgtcaaagccgtggttgaaggcgggtgaagatagcctcggactgccttctactggtgcaaggtttacgcacacgaagggctccggattggcggcttatgggagtgttctggagtatgttggagctgctgaatgacctccctgaagtggaggtagtttggctgcctcgttcccgtattcaggcagcccacatgctcgctaaatggacgtttaggcttaacttttttggtttttagtttctgaggagttggtccctcttgtgaccaattgaaccttctttgttctgctttggtgttttattgagttatttctccagcaaagaaaaaccatcaaaaaaatagtacaaaagcctgtgttatctcatatgaactt

SEQ ID NO: 236210 - DNA, 880 bp, Cannabis indica
attagtgtacacagagctgcactgaataccgacggatacatattaagaaaattctaaagctattagttcaacatatcagtaagagcagtattgatgcacataaagcttcattggatactaatagatatatgataggctttgtcgtacaaactttccaaacttagtacgtgttggacacgggataagatcatgattaaatgtatgggtatctagttacgatctagttatatgtttatgtttatgtttttttacggagtctatcgactcacatatattgtttatatgtgtaggttaaggcaaggcaaggcaaggcaagtcaaatgatgaacaatagtgaattcgggctagacgaagattgtacatatcggggcagttagacctgaagtgtttagatcttcgggataattatgccttattttggtagtcgctagacgacaacttttgtagtacacatattttgtgaacagatataactttcaaatgggattccaaaatatgtatttgtataaatttattttaatttaaatttataaatgaaagttttaattattcatgtctttcaataaactttttgattaacaaaggagtacacaatgttagacatttatatgtataaactgaaacatatatgtatgtgtatataaaaagcggaattatacactatataacttaaggatcgaaatacctccagccattgattcttgagctttagtcccacataagctttgatctgcaaaggaaactggttgatgtgggtaatcgggcttcctcgctctctcaactctctttagatggaatttgctgttatgaacagaatgagtgaggagctcggggaccgagaccctatatttataggtgagatactccatcagtatctgtg

SEQ ID NO: 236211 - DNA, 1415 bp, Cannabis indica
ttcatattaggatgttaatgaaagatacatggtagtaaatctagatcctggtaaaatatttccaacacctatagcatagggtaagaaattagaccaataataagttaaagaagatagattgtactatagttataatggaggagtcgtatagagtttatttataacttttattgtttaattaatatttcacaatagaattacttctccatttccaccacgatagttcttttactcacccttttgttctcttattttgggcttgctcagaccaataataaattaaagaataaaatattctgtttattgttagtgtttttggtatgtgttaaacttatgaattcgagttgtatagataattgcattaaagagagtttcaaaagtagatttaatcttgtacatgaaagaaagttgtctaacatagataaaattatgggtaaataccattttagatcttgtgttttgcaaaagttaccaattggaccatctattttgtcaaatgataaaatggaccccgtatttttaaaattgtacaaataagaccctaaactgattttttgtcaaaataaaacttaataataatttaatctaaagatgttatgacaaaactggttatattttctatatcttttcgtgttagaaattgtcttaaagttggtaataaaaaataaaattattgaaaaattaaactcaaggtcctatttttaccattttagaaaatatatggtctattttgtcatttaacaaacagggggtccaattggtaacttttacaaaacacaaggtccaaaatagtatttaccctaaaattattcttaaaaatataaaaaaagttgtaaatttctcttttgaaggagatagaaattatatttcttgataaaaaaattaataaaatatttcaaataaaaatattaatacataattttataaaattattaaagcaaattaatttaaaatataattatggtagaactatgtatgcaaataaattggtggcgaaagtacttaagtaacaattttgttataattaactattagtataaaataattgataacagtgttcgtaagtaaaattattttttgaaaataaatacctatataaaaataatttaaattaactttatataaaaaaaaataataattcaaaataaaattaatgaattttttaattattaatattatttttttaaaaataaatatcattaaatattattataatatttataaaattttaattatataccaacagtcctatcgtaagagtatacatcttacgttataataaccatatactctaaaatcaatggttaaaaaaaattttggaaaatttgattttctatacttaaaaactttacttttttttttcttaaaccaatacattttaaactacaaaaatatgacacttttttcaaaatccc

SEQ ID NO: 236212 - DNA, 458 bp, Cannabis indica
acaaaagaaacatgctaatattggtgctcaatgtttaagaacaagtgtgcaatagaagctaattcgtatattggtgggcagtaagaaactggtagggacgatcttcctaagaaaattttccatgtgggtaatcaaaccgagataatggaggtattgattggccaaaatgttggagccgaattacaagggatttgtaactgggtgtctagcccaacatatcaatcttcacgattaagaaatagcattgataaaggtaggttaaaaataagtagaaaaggaaaaatttccaatctgagatatttagtgtgattgagagtaaaagaaaaattccaataaatgaggatgcaaaattgggtcaagaaaatgagctggaaaattaagatgataatatggatatggtgttattgggttttaaaaaaaaaatgaggtattgacgagttttggtgttcaagcccact

SEQ ID NO: 236213 - DNA, 1605 bp, Cannabis indica
aatccatatcaatgatgatttaggggattttgtttggtacaccgtgatgtatttgatttgtattatatttttatagatttatatttatatttgatttgattgagtttagatttatttaatacaatactgtgttttgacattaactttgactaagagattgtgtagaattataaattatttacaataaactcgaccctcaccccgaccacaacttggactcggaccttgaccctaacttgaacccagactctggacccgaacccgaaccccagacctggactctgaattcgaactcggacccagacttggaactgaaccccgatccagaactagaacttggaccccgaactccaaccctaactcgaacctcggacctaaaccccttgccctggacttggacctagacccagacccgccctcaaccctagaccccgaaccttggaactggccctggaccccagactcggccttagactgagacccgaacccgaacttggaccccggaccaagacctaaaccctagactcgcgagaccttggacacggtcccgaacattgaactaagactcaaacccagacacgaacccaaatactacccacaacctaaacccaggacccaaccccaaaagctggactcgcacctagacctcgacctgaatccaaacccgtccccagcctcggactcgacctcgaaccccaaacccagaccctagacccaaaatgcgactcaaacctcaaatctcaaaccaaaaccctaggtccagggccgggggctggcagccggagttcgggtttgggtctgggttagggttcaggtcagggtttgggtcgaggtccaggttcggggtccaatttgggggtctgggtcttgagtctctgtttgggtctggtgtccgggggccagggtcttggattggggtcttgggttggggtccgaggtctggagtctgagtccgggtcctggtccatggttagggtatgagtccgggttcgaggttcgagattgaggttgggactggagttgatgctagaccttttgtaaatattataatataagctaatgcgtgtcatttataatttattatgtattaaataatatgactcatattgtactaaaatttataattgtaataattaatacaatttaatgttttatctaattttttatttaatacaatatcatccttatacggctacgaaacctaattgtaagtgctcttacctcccctcatcgtgaaagttgtaacaccttaataatattataatcatactcatgaattaaaaaaactggaaagaaatatctttctgtgggtctcattcggattgatccacaatttccatgcatacgtggcaaaaagataataaaaaggaaaagcatgtattagtaccactttcttttacggtttgcctctgatctttcttcttcttcgttactattctttatttttcttaattcagttggaagaaacgcatgtgaaagaccttattaattagtggaataaaattggagccatgtgtattcctggcccacacaattggtagaatcacaagctactatatatgtttctctcatatttatatatattgatccattcgattatacata

SEQ ID NO: 236214 - DNA, 1184 bp, Cannabis indica
gagtgaggacaaaacatgctggaaatactctcgtgttggtttgtagggtcagtcgtcattctatgaagcagctagagtgacgtacccgtatataagagtcatcattcagtggatataaaggcctaatagaggcttgaagcggagacgttacagtgaacacattagctcatgcctcttatttattgtctgattgaaatgttattaagactgagaatagtgagattttagccttttatttgtttgatatttcaagttagtgaattttgaccctttcataaaaaaaataaaaaaaaaaaaaaaaaaagaagattgccacaccactaggtatagtattttgatactgtattgtgtgcacatatattattactctccatacatagtatagaagaatttaatcttaaataacttatagggtcccatttcttttgaaaaaccaaaacaaaagtatattaattagttacatataatataaaaaacatatatacttacatagttatatatatattccaagtacaactctacaagaaatcggaggtcaagcttacaaaaattcttctatataatttaagttggcgagctgattattgaaatttgactacatattttccttaatcattcagaaaaatcaaactttttcatgtaaaaatctgcaaataattttctctgcctaacatctaattatatgaatcttttagaatcaacattagacctcatatcaagatatcattagataatttgtctacatataagatgatctagaactaagttatataaatatatatattcatatatatatatatacatgagttaattaaagtcagctccaaaatcttgtgtgagcccatattttgttgagacaaaaaagatatatgagctcttaataataatagtaataataataatgggtaccacctaagagtccacagtcaaaagtcaactaaatttgtataattggtaaccattcaattttgtaatttattctctttatatctctttcctccccaaacttgatgtgtttagtcttagaaaaattatgttgtttgagtagaaataacatctcaagtagtagtccatatataggaagtgggtgagaatcatatatattaatattagggttttttttttttttgtggaggaagtagggtcaaaaaaacccacaataaaaaaatcatttttttttgttt

SEQ ID NO: 236215 - DNA, 906 bp, Cannabis indica
agtaaacgctctaattggccatcatttcatctttacccagcaacagaccttatctaaccgtgcctctctccacagacctgagctaggccacttttccaacaacaagagacctccattaaaaatccaaggctgcttattcagaatacccactacttcctctcgggttttaaatgtgattcctacaaatgagtcttcctcatcttcttctaaaaccttaacttcccaccctccaattcctttccacatacgattaaaaattgtggtaaacagagattccttaatctccctcttggcaaccagtctgccaactagagaatgttcaccgaacgaggatgctgcctcctcattctcctcccaatcctcctcactactgacccctaatttacttgtcattgaaacaatatcatccacagtctcactcaaattccctccaccgccaccaattgccatacataccagtaaaacaaaaagatcgatcattctgcagtcagaaactatagcacagagcagggccctttagaccattattgattgaactatcttagaaaccatgaacctataacattaaatttcaataaattaaaactaaataattaaactctttaattatataagttaatttattaattatgatatttgaattcagaattgaactctttatgttgtagatatacttttacataaatcttttcttaagttgtttgtcgatataatcatcttacaatagttcaccccttcaataaattggttcatataattaaaataaaataattaatattttactcttctaatttattgcttatttcttaagtaccattaattcaccattgaataattaatctatagtctaattatagatttgagctcaaaattatttagtactagaattaacccttaaggaaacca

SEQ ID NO: 236216 - DNA, 1235 bp, Cannabis indica
caacaggttcatcttctaaaacctttttcgctcaaagaagtcagagctgcaatgtttagcattcctatcactaagtctcctggacctgatggttatggttcagggttctttcggtcggtttggcctgagatggggaaagatatacatgctgctattgctcatttttttgaaaccaaccagttcccggctgagcttcatagcacaactctctctctttttcctaagactgagagcccttctaaagcaattgactaccggcctatagcttgttgcacaacattgtacaaatgtgtttctaaactgatttgtactcggcttgccaatgttctgcctactttagtgagtcagaatcagggagcgtttgttaaaggtcgctccattgcgtacaatatccttattctccaagacatcttgaagaattatagaaggaagaattgctccccaagatgcactattaaaattgacataagtaaagcttatgacacggtcaattgggattttcttgagaaacttttggtggcctattgctttcctgaaaagtttgttaagtggataatgaactgtgtgagaaatacgtcgtattcgttactcatgaatggaagaattcagggatctttcaaaggcgaacaagggctaaggcaaggagacccaatttcccccctcctttttgtcctagtcatggaatatctgtctcgaagcatccaaaaagcggccagagataaggagttcaggtatcatcccttatgcaaaaaactgaaacttactaatctttgttttgcggatgatttagtaattttttgtaaagggaatgagggttctctcaatgtcattcaagctctgcttgatgagtttagcaagacttcgggactttctataaattttgctaaatcccaggtttattttggtggagttgatcatccaattcctcttgctcagaaaataaatctttctataggagagttccctctcaagtatcttggaatccctcttagacctaccaaatggaaacttgaggattgtgggccgatcttgaaaaagatgaaaaataagcttcattcgtgggccaacaaacatctttcctatgctggtcgtgttcaattaatccattctactttgataggattaagaaactattggatgagagttttcatgttacctcaaagtgtgattaaggagattgagaaactttgccgcggtttcctttggggtttgaaagacaatcgccctagagttca

SEQ ID NO: 236217 - DNA, 4801 bp, Cannabis indica
gagagagggagagagagagagtagaatataattttaagaaaaaaaatgactttttctattaatattgaataggagaacaattttgacccaataaatacataattaatcaaatttacctattattattgttgtaataataaaagaaaaacagaacaaatgattgaaaatggaacacattactttaatactttgattgaagctattacttaaaattgggatcaaaatttgaatggcctacatatgggacattacgatactatagataaagaataaataaatatacaaaaagaagccaaaatcaatgccaccatggtaaataatatggtgcctaagcaaaacaaagactctaattgcttctctaaggctaagctggaagcatgacagcaccaaaaacttgttcaaaatgtccacacagttgaagcaggccatgttggatcagagattactttccgagaatcaacagcttccccgcaaaatgctccccgagtgttcagttgaagcaaccgaatgagaggtagcttcatccaacatcatgtattattagtcatagtcattgtcatcgctgtatctatctacacccatcgcccgtatttcattgtcattattttctttttcttgtgggcacgatgtttagcagcgatcctcagtttcctctttgcgtttcgcattggattaactacagccatgattttctcttcttgttttctcttgtctcgttttgtcttcagcatttttctgatctcgctgtagacttgcacaaacgtttggacgcccaacatttgtctaacacggtcgcatacttcttgtgctagttgcttcatatcatctgaaaagacaattaaaaaataaaaacagtaagtgaaagaattgtgatgtcgaattaggatccccgcctaaccctacaataattggggctcgaacctcttcggtatagcataaacactctattgaacaatgtatatacgaaaagctagagtaaagagggagaaatcaccagatacgagtcttccagcgaacccttcgcaaactttatacaagggtaggagtatttcatatgcataaagttggcggtcttcatcggaaaattgagaaaaaatcttgccataactattgaagacaattttcatctgcaagcagcaataagaaaatcataagcttatgatacactgagccttaatacagcaacaacaatctggtaatacaaacctgaatagattccattgaaggcgatttttcccatctttttaagcatagtggagataagtaagttcctgagggccttagaatgtccattgtcttcaagagtaagagacagaaacgaggtttgcactttccccgaatcaatcaactttaatgctttaagaaaatgaccttgctcgtgctgctcgagggtagaccaaaatctttgaggttgttcgtgctccggttgtcccatcaaagagtgcacaccgcaaacagtaaaaacgatattttgtacaatcaggttgctagcggcatcatcactgacttttgcttcagttggcaacaagtggaaacagcaatcatgaatagtctacttggcctcgtaaggaaataactttgaagggaaagttcacgattcttcttgcatagttctgtcacggcagagaagtaaaatgctactaggcgactcgaaatgtctcgtaaccatgtgtgagggtgcaagagaagttcacatattgcatcccatacatcctatttgcaagcaacagaaatatggttacaaaagcaaatgaaaatttaatgtaataaaaaggttaaaacttttttgagaatatatttccatcagttcagaattcgaaattacttgctaattcataagaaataactcccatgaaaacaggacaaggttattctagtctagaaatacaaataccaccagtggcctaaaaggcaaacccgaattcaggaataaagtttaggggaccccagcccccactagttttttatttcttctgtaatttttatattaaatcagtccgatttttttattattattataatgtaaaattttcaagaaaaaaaaaaaagcaataaagctacaattttcataaacgattaagccccatttcaatgaattttctagccccatgactaatagtaataaaatagttaaatacagcaatcacaagaaaataacaaataaactaataattaataacaatatatcactatattaccattagtattttctcttgattataatcaaaagacataaatgaagaataatacatacctcaagatcctcttcaaagcataaatcatgaaactcatgcagaattttctctaacattatcaatgaatagtatgcctccttccagaatggaatagtagcctcatcagaataatcttgtgatctgtcattatagtcatcgatggcagatttcaaaatagttctagctcttggcaagacactacttctgatgtgtttttcaaatcctttcttttgcccttcaactaataatcccaagacctgtacaaaagcactcatgcccattaaacaagaaacaatttcctaatataaggtctcattcaatacaacagagccaattacatgtccatttcttaatgattcaaaatcagtgacatcaaatagtatgcaagagatcaataaaatagaaattgaaaagaaaaaaaaaaccgagttttctagccctttggggtagtaattttgtgttgtggcttatcagagagatattgtactggatatggtctgtgctacttgttgaatgaaatccttgtttttccttaaatttaataattattaaggaaaaaaaaagttcttaagctaactagatacacaatcgcttaaactttgtcactgaaaatagaaaactgttcatttatttcaattaaaatttagttcttgcatcttttcatgtgaaagcaaactagcatcaaatattaaagaagatgtaatgaaaaaaattgcaggggaaaagagaaaagcatcctaatttaccaaacaaaatgtttacattatcaacttggatttaatgaaacagtgcagagatatttacctgtgctgcagcactccacagttttggcttctcatccatataccaagacagactgctctcaagaatagaatgaagtgaatgtgcacttacacaaccgatgagacgcttaatagctgcaccactcatagcgcgaacctcactatctagatcattagctaagcaagccaccaaatggataaatagtgtttgtgattgatcatccacaacacttttcggaaacttaacaataattgcatgaagcatttcgagtgcagcttttcttccacttgggtgttcatacctgcaagccaattcatgttacatcacaaactaactcaaaaatgcaaatatcaaattataagatcgtgtaaagacttgcctaagattagaaagcagagaatccaaatgttgttgcagacgtttccctgaaagacgataatcaagtaagaactgcaacagaatctgactgcatttttgacgtatcggttctacttgactggtaaccatcaattccgcaactcgagttacaagatcatatatttccggaacaactagcttacggctaacaattgcctttaaaagtgaaagtgcaacaaaagagggatttctttctagctcaacaaaaagtggaagctgaattagcaaatgtagctcttcagaggaaagtgtggtattagttcctcccaatataacagtcaacaatcgtaggcaagactgcattaaagaactgtcgacatttatagtactttgggctatatcaaacagggaaccttttatcgtatcaacttgggattcgatggatggtaaaggcaatcttacaagtggagtaaggcacctaagagttgcagacaaaacatcttcgtatttggaattcaagcagtttccaagcaacgggataaaaggatcaagcattgctaatacttttacatcatttttggcattctttaagctcttcacacttttatgcagtatcccgagagcgaaaacaattataagatgtgaacctaatgactttacatgtttaactcggactgaggaaacattttttccacctgcaccctttttacgatttttaggagtgttcgaaattgttgagttctcatccttatttttaatcccatcttcaatgagaccaaatagaaaaataaacaagtcagtctgatctacagaagggttggatccaataccagcagctatgtgattcaacatgctttccaatttcgctttgattttgggagtcattcggttttgcaagtgagatgcaacaggtgacaatactttcaaagcatgggttttgaatgtaatgctctgagcaattaattgtagtgtttcgaaagacttcctcttcctagtttctttcatttttgaggcaatcttatccacctctttttcctcggcaacttctccaagaatatcattctcaactatcgataggagatcttccaaacaataatccagcttgccacaaacaggaaccgagagaaacttcgataaaatgaaatttaaggtgtaccccaacacgtgcatttcatatcctcgctttaatgtggtccgaagaaccttgactagaaactgcaagtattctaacccgagctccttcaaacatgcagccaaagcagacctagcttcatcacggatgcttctaacgattcttcagaaagtttgatacgcgatgcacaatagtagggagctgtgagtccattatgtctccaggaagcaactttaatatctaagtgcagcgaggttgacgttaacattaaccctactcagaatcggattccagt

SEQ ID NO: 236218 - DNA, 569 bp, Cannabis indica
aacatatcccaatgataattttcccttacaagcaaaataaattacaagaaaataaattatttacaaaagaaataatctaaatattttacaaagacaaaaataaataaattacttgtagcattataataatcctttgaagatttgaagtctccatcttgatagtgggcaaattttttacacttcaccttgcaaatttcttgcttgaaatttgaaatttaatgaagttttttacacttcttcttggtagttttttatgaccgaaaatggcattgaatcattggatttttgataaaatttagtgaggaaatgagtaattttgaaactttttcttgaaggcgttcctggatattgaaaacacgtataacaactttttggcttggaacaaccatgtagctcgggtatggtctagtaaccgtgtcgaggtacacaccccactaccccgagcttggggttacaattgcaccccttatttggatgtagccctcacccaaaatgagggttgatcctccccaccctgagtccatcttagacggacctctaatcattgtgtcacaatcattgactccacc

SEQ ID NO: 236219 - DNA, 1096 bp, Cannabis indica
gcaatgtacatattgacctcactcgcctacgtgccaggttgccaagatttgttttggactggctgtatctgctgtatattttgattttatgtttaaatggttgtcgtatatatttctttagcaaaactgtttataacagggattcatgaaacacactttttatgtcgttatagtatccgtttatagtgttctattttagtgaaatttttaatgttatcatagtttctaataattaattattctattagtattaaacaagtttataaaattacacatgtggcgtccctatagattagggcgttacaaacattgttcgcgacgtcatttgattttgttttttgaatagaacaaattgcagtagatgtttgtcttgatgagatgtttccggacatcttgcgacgccatttggcaacataagttctagattgataagctataggacttttggttgtttgttgttgtttttcacgatatattgcaatattatttgcaacgtctcacaatgtttgttgttcatttttatcagttttacacatcataacaagtagcaacaaatgacgatactttttgcaacttctgacaacatgtttgatcacaacatgtcgtcgtgagacatcgttaattttatcgctagatatcgcaaagttctattgaacatgaaaattgcttattattatcctaatttttgttctcatgacatagcatgcttatgtggacaaaattagtgccacatggtagtacaactctgtagaaggaaggacaagtcagcacctgaacaaacaaataccgcggcaatcaaacgagaatcaagtgatagaccagctcacttttaggaactggacgaccctatggctggccaaccttaggaccgtaccatggtcggccagcttggcctccacgttagaaattttttaccaagatctagatttactaacaagtatgttgaattaacatcctaaatataaattctctaaaataatgaaataaacacataagattttaagaaaatcttacattgattgcagcggaatataatgactcctttcgttaaagatctctagcccgtgattccttttttgtagcagagcattatcaa

SEQ ID NO: 236220 - DNA, 1159 bp, Cannabis indica
acctttgtccaaaagcttatttcccctacctcaagtacttagggaaaagaaaagaatagaaatagctttctagatttatcaagcctatagtgtttctagcaatgtgctctcttgatagaaacttgttctctcccaaagtgaacccaagaccctctatttatagtattttgaggatcacatatgaaaatcaaattctttcatcacatggctgttaccaacaaattaatttgtgtttaatgtgataaaaacgttggacaagagagctgaaaacatgctcaattaatttatatacgtttatgaacgtttttaaaaatcttgttccagatgttcgaaaacaataataaaacaacataaaaacaactattaaataactgtttccagagaactcaaaattgagtttttgtaactcctcgccgaattaaatcttttcccaacgtcctaatacttatttaagtgatttcattgagtattgtaacagtttctaacagctatcccattgattccataacttctatatgtaacaacttacatattatcaattgtgataattaagttacaatctattttcagatttgtaactcctcatatgttacaattgttatgtgcattattatactatatatatgatataatacaacctccaatacataatatatattaatctcctattaatatataatttatcacatttaaatattttaatctatattatattatatcgaattatataacactccataatcaccatattttctctctggttatttcccaacaactagaaagacatgacatcatagtcaaacaccataatacgatacgtgttgggaaaacctattacaattaaccacaatatttttcctctctgtatgtcaaaaatgggatacttatcaaacaccacaataagcaattatcaaatatcaactaaagcaccataaacaatatacaatacacaaatcaagaataaaagtgagacgccaagatttttacgtggaaacccaatgcgagaaaaaaccacgggaccgtagtccgctcaaatcatcaactatcaccaaagtttaataatgggattataaagttcttctctagtaaaataagaggctcacaacgacatcaagattaaacaatcttggatcactaatacaatcatcatcgtcatctc

SEQ ID NO: 236221 - DNA, 524 bp, Cannabis indica
gagtagatcaactcttcaaaaaaatgaaactccatagagatacatggaatcacgcaaaatccaaaatttaaattcgacggaaattaagtttgataggtcaatttttctcaaagagactttgttgacttagaaatttggacacaaacttccaagccacaccaccttagtagaatagaataaaatatttattaagtaaaaaaaaattaaagactccaatttatagtagttaatttcctatatcgcgacagtaataaagctacgtctactttaaatttctatttctcacgagatagtattacaaaaaaatgctaagtgtcaaagctccaatttatagagagagaaactagagagagaagctctaaccttgtgagtagtttttagaatttaaaaaataaactaagggatttctccttttacaggtaaaggaggcctacaaaaatagaaaaaaaaatacacgttggctatttttgacagtagatgatgatctaatagtgcaaattgacttctgagattgatcatcaatt

SEQ ID NO: 236222 - DNA, 965 bp, Cannabis indica
gttataatcttgaacagaacattacaaaaggctattggacgaagatccgacatacgttccaggtttctcgtctttggtataagcaccacattagcatccccacacccctcggcaagtaatccactctgaaaaaaaaagaacgaacatttttgaccacttcctctcccacactcggccaacacttttgaaagaaagcatgagtcatcccatcaggcccggggctcttatcaggatgcatttgaaaaacggcttttcgaacttctttgtcctctattggttgacaaagttctggattcaccaaatcagtcaccacactaggaacacaatcaataacttcatcacacacacaccccgaagcttggaataattcatggaagtaatttgatataataatcggcaaacccgactcccatgagacccaatttccatgatcatcttttagttgagtaatctagttgttttttttcctactactagcagccttatggaaatgctactattatggtccccttctttcaaccaaaattgtttagccctttgcttccaaaaactctttctttgatcaaacgcatcacaaagcttcttctttgtttcggcataactttggactgaagtaggatcccttttcaagtcggccttataactcttaatacggtgatttagagtgccagttaactccttcccccagctagacagcttctcagcacacatattaatcttattagagatgctaatattgtgttcttgggaccaaatatctcgaataatttcaaaacaaataggctccttcaaccaagaattttcaaaacaaaatctacgactaggggcaaagttataaccatgactgtttcaagaaacaatggagagtgatccgaagtagcgaaccccaaattagagagagtagctgaatgaaataatggattccaagatgtagaaacaagagctcgatcaagacgtacctcaat

SEQ ID NO: 236223 - DNA, 1082 bp, Cannabis indica
aaggaagtaattttggtcgtagaagcaaggaagccaaaaatgccaaggtaggggaacccactataacctccactgaagaagatgctatccacgttcgcttcccacacaacgatccattagtcgtggaagtaaagataacaaataaaatagtggcccgaactatgatagagaatggagcttcttcaaatattctgttcaagacaccatatgaaaagatggaactccagttcaaagatctgatcccctgtacccaactggtgtatggtttttctggctagagtgttgcatctttggggaaaatccgcctacccctcactgtttgacaagctccgaggagcataactgtgatggcataatttctgataattaatgttccatcaacttttaatgttatgttaggtcgaccaccttatatgacctgaaggttgtcacatcaattttccatttgtgcatcaagtttccaacaaagaatggggtagggtgcttcaaaggaaatcaacaagttacacgagaattttataaccttgccctgaccaaggccaaaaaggaagattcctctagccagagtttggacagggggaaaagcattgccaaataggaagtcgcccaaggcggggatgaggatgtggatctccgacttggggaaccaaatataaatgttggaccagtggaagaattggaagagatagaaatcgatccaaatgtcccgaccaggaaactcaaatcgatccttctataatatcccacgccctaaagttcaacacaaacaacatgaaaacaacgtatttaaaaaaaacaacaaaattaaacaacatgtttacaactttaaaacaattctaaagcaacaaacaatgctactacaaaatataaatttttaatagcatgtaaaacatgagacctctgtcctacttgattttcaaaaatgagtagagtttttttaactagatatatagttgtatgtgtgttgttgcatgattataatgtagttatatatatcatttaaattatgtagttattttattgatttactactatttttccaaaaaaaaaaaaaatcaattaaatatgcaacaaaaatacaa

SEQ ID NO: 236224 - DNA, 1269 bp, Cannabis indica
ttttagcggcataagtactcaatctttgtaaaaactgtaatttttttctaatttcgtcagtacaaactctgttatattcttaaacaggccacatataagatccagattctagatcattgggcctagacagaatcatgtagtatcagttactttcaaatgttcgtttaataaatttaaaacggagtctgcactgacaaaactggagaaaaattacagctttacaaatattgtgtacttatgctgctaaaaataaatattgagtttatgtcgtttagacgtttacaaacttaaaactttaagtacttatgtcactatatatagttagagagactttgttgctcctttcaaccatctcttttcaggtgtttgctataagaatttcacttggtgagtagggacgaactcacttgcaagcttatgggtttgtagctcccactaaaaagaaaaagggattttttttcatttttacacttcataacagttattttttgcattttacggaattctacataaaaactcctattgcaactagcactgcaacctaaattgcaacaaaaaatcgtatagaaatccctattgcaactagcgctgcaaccactttgaaaacccaaaccgtaaattttttttaaaaaaaaaaaacctaaaaaacagtatataaggtaattccccaaagaaaattatattgaaaaaataaaaagaaatcttttaatttgataattatatacaccacaaatccacaataataaaaagtcctataaatattttttgtaacaattaaattcctacaaaattaaataaattcattaaaattgattataattttttgtttaaaataacataaatattttttagactaattacgatttttgctttcgaattttgacatgtacaaaatcacgtctctcaaattttttaggctgttaaaagttttccatgaactatgaaaattgttagattcaagtttttttatccaattccgttcaactttactaacgtgacgattgtccatatattaaatcatgccccccgaactttaatatataccaaattttaatccccaaactttaacatgtaccatatcgtgaactctgaactttcatatgtgtcagactttcgttagtaaaattgaacaaaagtccttaagtctatcaatctcaataatttgggagaaattttaaattgcttgaaaagtttagagggcataatttggttcatgtcaaaatttagggtagcctatcttttacggggattatatcataaatacccaaa

SEQ ID NO: 236225 - DNA, 1528 bp, Cannabis indica
tcttctccgcatgagtgaggcaaccgaagggaagttttatttgggccccctaagtacaaatgttcaaaataaggcagtggtctgggctgtctcaaagatgagttcgtaagaggattaaaggttgggaggccaagttcctatcgagagtgaggaaagaaattcttgtgaaaatagttattcaagccttaccaagctatgcaatgagcatatttttgctgccattggagattaatagaaacattgagcggatgatgactatattttggtggcaaatgtctaaggacatttaaaatgggatacattggatgtcttggaataaacttaggaaacacaaaagagggggtaggatgagttttcgagatttgcaagattttaatcttgctctcttgagaaaacaagaatgaagacttctcaccaaacctgaatctttggcaacaaaaaatttcaaaagcaaggtatttttttatgggaattttctttctactcaacttggctcagaccaaaattttgtttggcgaagcatcttggaaactaaagagctggttcgggcaagaattaggtggtgtgaggggaattttctttcttctcagtgcttctgttgcaagtttaatgtctttatgtagttctagctgggatgaagagcttattggtgacatatttaaagaaagataccaacgtttcattaagagcattcctttgcaagtcacgacaatcactaattatttgttttggccaaatgaagtgtctagtctttacacagtcaagaacgcttattctttgttgtaacaacagaaatataaatggtatgatgataatgatttgtccttttggagtaaactttcgagcttgaaattacccccaaaaaatatctaatttgtcatggcgtgcatgctctggctatctccaaatgatggttcaacttcgtaccaagagggtggatgtgagtattctttgtctgatttgccttaaatttgaaaaaactactctccattgcttagtcacttgtcgggtggtccaaacttgttggagctgagtgagaatcagcatagcttcaacacctggtgtgtctttcttagactggtgtaccagtatttttcaaactgtaagttctgatccgaaatgtatattggcagcggtgtgttgggctatttggggtgcctgaaacgactttatttggaggattaaaggatttaatccagataacgttgttgttgctaaaaagtaccttgatcaattgaagaatgctagaaaatctgacatagataaatcatggtctattttctcaaacgggtgatgggagtgagaattgaacaccactataatgtgaatgcggcattgtttgatggaggccgaagtcatggcctcggtcttgtggcccgagattccaacgacatgctttttgagggtcgaacttttcatgctaataacttggtagaatcgtgtaacgtccccgcttcaagcctccattgggtccttacacccacggaatgaatggctcttatacacgagtacgccactctggctgctt

SEQ ID NO: 236226 - DNA, 1932 bp, Cannabis indica
cctgctgttgtgtccacaagttgatcttttcggaaggaaaaagtcttttgggcacgccttattgaggtccgtgaaatcaatacatacttgccatttcttgttaggcttggggtaccagaacgagattagcaacccaggccgggtagaaagcttcgattatgaaattattgttgcacagcttttgtacctcttcttttagtgctagggctcgctcgttgtccaacaatcttcttttttgttgaacaacacggaaattaggatcaatatttaagacgtttgaaaatatagaaggatcgattccgaccatatcctcttgtgacaatgcaaaaatatccaggtttgctctcagaattttaatcaatgttgattttacttcgagcaacataccttttcctattttgagtttcctggtcggaacatttgggtcgattctgatttcttctaattcttccaccagaccaacattggtatttggttccccaagtcggggatccacatcttcatccccgccttgggcggttccctatttggcaatgttttttcccttatttgaactctagctagaggatacttcctttttagccttggttagggcaaggttgtaactttcccgggcaacctgttgatttcctctcaggcaccccactccattctttgttggaaacttaaggcatgaatgtaatatcgacgtaacaaactttaggtcatataaagctgatcggcctaacatgacattaaaggctgatggaacgtccaatatcaagaattgtctcattagagttatgctctttggagcttgcccaaccgtgaggggtcggcgaatttgccctagaagttgaacactctggctggagaaaccatacacgggctgaagacacggggttaagtctttgagttggagccccatcttttcatatggtgtcttgaacaagatatttgcagaggctccattatcaatcatagttcgagccaccattttgttggctatctagacttccacgaccaatgagtcgttgtgtgggaaattaatcttgacggcatcttcatcattaaatgttatggtgggttcccctgcccgtggtattttgggcttcctttcttcgacaaccagaaccacctcttcttgctcgtgctgtaatgttcggacatacctttcctgggctttgcctgaataatctccagctgtgtgcggtcctctaataatgacttgtaaatgcccgtccaccggtggtggcagtaaatcttgattattatctgtctaggcagccctctgattttgatcggtcttagcatatttttgcacgtgtcggttattctttcttataaaaaattcaatttcctgcttcagattgttgcattcgttggtgtcatggccataatctgcatgaaaacgacaaaacttggtcatgtctctcttacttacgtcctttttcatgggagcgggtttcttgtacggagctaatgactgagtagccatgtagatagtctctaaatcttctatgaggacagagaaagcagtaaacttagtaggattttccctagggacctgttcaattttgtcagcaaattttccctttttcccattatcttgtctattgttgttgttggaccgcttactgtttgagcttgaattgctcaggtacaaagggagctggatggatgttccggtaaagggagcttttggttggccaggtttaaattcgacttatgctcgctgaatggcctcttccagcttgatgaagccatctgcacgatcaaggaagtcactcatagaatcgactagttcgtttcttttgacatccttccaaagttctccgaagacttcaatgccccccagttaggggtgagcaacggtcggtttggttggttttttacacaaaaaaaatccgaaattcagttttcgattttcatggttataatccgaaaaccgac

SEQ ID NO: 236227 - DNA, 701 bp, Cannabis indica
tccaaagcaggaagcgtgaatgggactgttgcatcttctgaagctcttgatgactcaaatatcagggaagtcttacacaagaccactggtttatgcatcaacagtggctcgtggactggaattcctggctactgtaggttcaccattgcactggaagaaagccaattccaacaggcattggattgcattaaaaagatgaagagcgctattagtaactgaagttacttgttgattcctcgtccaggctctacaaatgtgaaattatcttaattcagcttcaaatttggattcttctccccttatctacacacaattttacagcaattgtttcacaagtccaatacttgattcaggactctctccgagagcacacacaatctcagtgtgaaactctccatgcatatgcatatataataatataataatttagtttgagtctactgtttgttgggtattgagttttgctttttcttgggcagttggtaaatattggtctgtattgtttgcaagaaaatctgcccaataaaattgattatttgctaaaagataaattcaggcattaatagctaatgttttaaattatacacttaaatacttttattttatttttggaagacaaaatactcaatattacaattctcttataccgttactctatttctgttaacttatgaatatggacacatggaaggttcagatgc

SEQ ID NO: 236228 - DNA, 1341 bp, Cannabis indica
gcaccttgcctcttatggaggaccgcctcgataaactcttaggtgacatagtcttccccctcaatcaagacgtcacccagcttggataccggctccccggactcattatatcctccaaaacgtagaggtcgagccactccctcctcctcagcctcggagggactatcaggacggtcgtcgtcctggtcctctatctcttggacctcaaaatctccctcatagtcttccctcttccacagcggacaagtcctgttcgacacttggaagtgtggcagtcgggtcacgtgagggtcagtcgcattaattatccgcattgtctgtttggtgcgggccatcatccttctcctggacgggtattgttgtgtgtgtcgcgcaacagtcatggcaagaacagcaattggaatgccaaaggcaccagagcttagaacgcccacaggaagagtgtcagcaacaccaggctagacgatataagtccagttggacgggagataacgtctccaacccttcctaagctcccaaacaaatcatccatagccttctcctgtgatctgtttgtagtaaaagtgatgttgcacctcggaatctggagtaggagaactcttagtactcacttcctaatcttcaaaatttgagttagagagtccgtcactcgaagaggatagactagcgcaaagacgagattggtcctcgtatagaagttgaagcagatcctggtcgatatggtgttcgcctccctaaaactcaccagggttcatctacaaaagacaatacacgagatgagtatttggtcgggatgctttgaataggcaaggtggaaatcgaacattatgcgattgaagccagaatgtcacaaacaatgaagtcatacgagtatcgagcctagatttctatatgtctcctaaaacaagtcaaaagcgattgtattttctacaatggaaatccagaaaattgaagatacaaaattaaaggagagaatgatgagaaacttactcactgtttgaagctttggtgttgttcgaatgaagctgttcagatctttctgctagaatcccacgacagattcgagagagaaaactctttttgctctaaagttgcttcgtgagaaaagtggtaaaagtaatttatgaggattttcgataacttttagatttagagttattttgacatctttaagcttgaattttaagctaaattgtagagcaattaatgtctacagtatgtaattgtgtttagtttgttgtgttcttgtaataaaaggaagtgtgtgtgtgtgtgtgtgtgtgtgtgtgtgtgtgtgtgtgtgtgtgtgtgtgtagtgatttcaatttggatcacatatgt

SEQ ID NO: 236229 - DNA, 704 bp, Cannabis indica
aaaataaaaataactactcttgcacaagggtctattattaaaatcctaaatgttacacagaccatagagatactcttgtgcagaatcaaaatctgtgtctatttcactatagtataaccaatacgcacttctcaaattttgcattagaatcataaacaattaattgatgatcagataattaaaagaaattaaatataaataaattagatgcacatataaaattaaggaagaactaaatcatattaaaaccgtaataaagtgtcaaacaatctccattaacaaccctaattaaaaatctagctactcatagttgtaaaaaattgataacaactaactaagaacatgaaaaataaagtagaagaaagaactcatcgaataaataatgttgaaagtctccagagcctccttttgcctctaatttgcgtctctcaaagttttgttctcaaaagtgtcaaagatcccttttaaatctcgaaattagggtttgcaagccttaatttttttcccttcagatcagagtggtgttggaattattttaccaggatctagatttactaacacgtatgtttcattaacatcctaatataaatttctaaaacaatgaaataaacacatctaaagtttaagaaacctcacattgggtacagcagaatataatgactccttccatttagatctatggcccttgaatcctttctgtagca

SEQ ID NO: 236230 - DNA, 885 bp, Cannabis indica
aatgataaacacgtgacctctctactctctctatagtgttctctacacactcacaacacctcacacttactattgtgtgatatgagcattgctattggatatcggtagtggtgcctagcacccttaagacgtgttaccttacgattgactagcgatactttcaaaaaattattatattaaactatttgggacccgatactaaattagaccagtagcgatattgacacgtaggaggatgcttggcaccactgatgccttttagcatttctcgtgctctatagtagtagaaattacctttattagtattattttttatttgggtcaacggtttgattctcatcatagcttctctctcgaaaaggactagagattggtctttctaaaagttagctcgttgtaggtagtatcatttgtgtaatgggaacctattagagttagtttcacattactaatgtgtggaaataaattgttatataagataaatgggctactcctcctattgccaattgattttgagattgaacctcattcaccttatcctaaattctaacaaaacccttgagatagttactaataatccaataaaagtagattgaggtataagacccttatatctgacgtgacgcacgtgacctctctactctctctaaagtgttctctacacactcacaagagctctctcttagtgttgtgtgttgcagtagtagaaattgtctttatcggtatttttttaggtcaagggtttgattctcattatagtttctctcgaaagggattaaagacttggtctttctaaaagctagcttgttgtaggtggtgttatttttgtaatggaaacttttgaggtagttattgataatttaattaagacagattaaggtataa

SEQ ID NO: 236231 - DNA, 1262 bp, Cannabis indica
ggcataaaacccaacaataactcattaaatgcagagttaatagagtatgtatatttataactcgcggactgcacagtctttagcgagacaaggatgtacgaactattgattcacgtattgatgagaaaccattttgcgtcagaaggcataatctcaaggaagacataaacaacgcataacgaggcatctacctcacagtatgtaaagagatgttgacgaggcaaattgactattagaacacttagcgtataatatacattataacaactaagtgaagtaacttgaaggacaagattgttcagtccgcaaggccttatggtcaaagagcagttcttaaattttctcagtacactagtgctcatgccattgctggaaggcttacgaataaacctagttgttcatgtactaggcgagacacctcagcgagatacctttggcagtgtatcctaatccacgttagcgttgaattccttcaaaaaggtttaaatcacagctgtgtaattttaaaataataactgcatttacttacgtggagcataattaaagcccaaaattttggggaacattattataggatttgaaattaaatgtaattaactggcaacctatattaatataaatagggacagattatacgaaaaaggagatgaaaaatcatatagaaaaaaaaggagtatattgattgtaaaccctagttctgcatcagaaatatttgaataagattgattcgtggactatgcagagttatctacaaaaccacgtaaaaacctagtgttattttgtttctattatttttcttaaatctcttataatttctatgccaaatctattacgaaaataggctcataatttttaacgaaaatctgcgttaacagtttggtgctttcattgagagcctatgtgataaaaactcaaaaaaatccctcctaaccaaaaaaaggaatttcttctccgtggttgataatgaggaaaacgacaacactcatcttgaagagactaatcgttgctctggaaatgagcaattgggctcacggaggccacccaattcgcgaacaacgcattcaacacgatcaacacattcaaaaagaggccaacgtgatgatgaccaaaacccaaaaactgggaatgaggaacccaacacaaatattgatggttatatacctcggagtgaagatgcctacaatcccaccaggtacgtgccattagttgaattggaaaattatcaactccggcgacgtctagaatgttggaaatattttacc

SEQ ID NO: 236232 - DNA, 561 bp, Cannabis indica
ttgaagttctgaaacgaaaatacgattgggtgcaatccgccattttaaaagtgatggtagtacaaatgtaacggaattacctttatttggcttgcctagtttaaggatatccgcttatccagtaatgttaattgaggttgctcaagattgatcaaagaaatcggttagaagaaaggacatttaatttgaagttggctgataaaaacatggatgcaatctcgcatttagaagaaatattagtaaaactgtagtggaggttgcctagtttaagtttatcaagtattcttaataaggttattcaaatctgattaaagaaatggggcagaagaatggatatctttagtagcgaggatatcttatctgcatttgttgaacataaacacaaattcagtctctttggttgctgtttttgttcctctaagcctatgtagaaggttcagattatctttgtctgtttcctataagagatgcaaacaaagaacgagttctttattatcatgtggctagtttttattgcacttgaattcttcgctatcatgctgccattcttaattacacgat

SEQ ID NO: 236233 - DNA, 1745 bp, Cannabis indica
gatcccggcgctgtgtgagatttttaggatttaaggggagagagtttggggaagaggttttgattcagaatttttagcctcagattctgttcattcctgaatgggtctccttatgccacgtgtctatatgaaaaaaatataatatgaaaaaatttctaaatgataattcatcgttaaattttttaagatgatttcttttaatttaaaaaagattatttaaattttttaagatgattttttttaattttaaaaaaagattgtttaattttttgggtttatttattaacgtgagatcaaacctattaacatcgttaaatttaacagaatattctttttatttttaaggtatattctgttaaaccaagaaataccgttagatagacacttttaatatataaagatataaaaattatattattttatattaaccgataatattatatgttaacggataacatgattaattttattggctagttaccatgaatacttttttaatttaaatatatgtaacacaaaataattatttaattataaaccaagtatttagataattacgtactgctatgtagagacaaaattcttaataaaaaagttagaatgataaggagaagacattattgaaacttttcaacaaattaaattattatttttttctctccatatataaataataagaaaatgttaaatcaataaaaaaaatacatactgtattatcaaagagatagtatatacgtgtacttaaattatgtactaaagtgttgttcaaataataataataattttttttcaataataatataatcgatgattctttcgatagtctaataaaaataaatcaagaataaaaagtaaaagcaatttgcacagataatatattacactaaattaacaatattatttatatgtttttgtgtgtttagagacagattttatattgaaggctggagtaaaagtacatatatacatagaccattgtcgttagtcacggtgctttatatataatattttatattgattagtaaaatttttgaaaaattattatattaaattaaataagagtacttaataataatactaataataatataaaaaaagtaatgattagcatttatttttattttaatatattttgttgtgcttatatattttggtgtacgttgaaggccgcttgactaaaagaattgtcaaaatcttattggatggacacaatttggggacaacaatttttgatggagggtcttaattattctccgtgttattgattcacctactagctaggaaataataattaataaatttaatttaattaaggtaccgataatatttttatttttattatatttttgaaaattttattttctaatttttaataaataaaatatatttttttttttaaaaaaaatgtttttgaaaaataaaaatgcgttctgtaaatacatacttttgtttttaattttaaaaacagaaagcaaaagtgtgttctctgtaaagtttatttttatttttttattttatttaagtcaggtttaggtctggaatcggatttgagttcgggtcagaggcagagttcaacgccaagactgtgggagggatttaggtccgagtttaatcggagtccaaaaatattaattaagaaaaaaaaatgtttaaaaaaatattgaagtaagagaaattttttttttttttttcaaaattttgattatcatttaaaaaattaaaaaatgaaaataattttatagaac

SEQ ID NO: 236234 - DNA, 1009 bp, Cannabis indica
agtggtatgtatgacctgaagcaccagttgggggtaatgcacctctcttgtttgcgccaattgtaagcaggctagagaccatgattagaggacctcacctagcataaaattcaaggaaggccttagaaagttatgcaagatcactttaacatgacgaagagccaaagttctaaagatagcaaagcgtcctccaaagtctcaatgctacaggtgtgaacctatcaccttcggagaatcagactcttatcatgccagctacccttcacagcaatcctttagttgttgaagtacaaatagctaatatgatggtggccaggctgatgattgatgacagagcatcgtgaaacatcatgttcaagcaagccctaatcaaaatggatttgaccttaaaagagctggaaccatgcaaataagttacgtatggtttcagcagagccaacatcgctccatgtggcaagatcaaaccgccactcactattggcactaccttaaagcagaccaccatcattatggacacattcatagtggtggatgtgaagtctccatacaacgtaatgctcgaaaggccttccctctatgacctgaagccatctcattagtgtaccatttgcctgccaagttctcaacgaaagctggtattggttgtctcattggaaatcaaggaactgctcatgaatgttatagcgcttcgttatcacttgccaagaagacctcttctattgctacgacttcaaaggagacgaacatgacctcctctgctggtatggcaccagggggacgagcaaggcctctctcgtgaaagccagagagacgacaaagatatctgaagtccaaactaaggagaagatggagacgacacataaagccacttgaaggtgcacccaagaaaaggacaacattgacccccattttggggaaattgacttgggagttggtcagaccgaggaactcaaaaaacttcccctcaacacattggactcgactaaagttgtcaagattggaacacacc

SEQ ID NO: 236235 - DNA, 687 bp, Cannabis indica
aaaaaggccatcaagtaattaattatctcttaattacataatttaactatatattttatataattaattaattaatattcttttttatgtaaaattaaatttattatgaatgtaattgtgtgtagggatggggtgaaagtgaagggatattttgcatggtcattacttgacaactttgaatggagttcaggttacacagttcggtttgggattaactttgttgattacaaagatcatcagaaaagataccccaaactctcagcacattggtttaagaattttcttgtgaagaagaagaactactaattaatcacacaatatatatacaatatataatttatatatgctagctctctcttctatgtatgtgtgaagatgatcaatttatggcattatatggaaactctctcttctattattttgtaatatggaaactctttaattagcttgaataatttatgttgatcagaaaaacaattataaatatatacataaaatattttaataattttagaaaagttagtaagaaattatatttgatggtaaaaaaattaattaatagctcttggtcatatatatctggtcaatgctattaggcaccttaagggcatctccaatgggattgtctattagagtgatacttttaccatatatgcatattctagtttaatttttaagactaatttt

SEQ ID NO: 236236 - DNA, 926 bp, Cannabis indica
tatttagataaaacacagggtaccaaatgtgtagacacccttgtaattttactattttttcttaagttttaacactcttatttatctttctcactctcacaaaatttgttctatttttaaaatttaaaagcacttctaattttttttctatattttcttactaatcacactcaaatttgtctaatactattttttcaaaactaattatatatatttaaaataatattaattaatttcattttaactcttacaaatttaattaaaattatttctattaaaaataatttatataaaattattaaattattattacacatttacatttttttccatctctctttctaaacaagataaataataatatacgtaaaccaataaaactgtaccatgtgtacactgtgcccacatagacaattcaacatgactgttaacaatcaaatttagttggtaattgtaaattgctaacaatatcttagttttgggagtttttgcgccaaaaattgggttttgaaggttaattgttaacaaagtgaaactattgaggattttgttacaatttacctttactttgatgtggtttttagatttatttgttatacaattattttttagttgttatgtatttgtcacggtgtaattatacttttacatttttctctttccttccttctttccaaacaataaaaaataagatacgtttctatctttctatctttctcttcaaaaataccaagtattggagtaaaattggattgttgttaagttttttgtcattgttatttgttatttatgttgtacacatgtattttttatttgttgtttatgtttggatagactgattaatatttggttaatgaaagttatatattttttttttttttgttatgttttgtagtttattcggagttgatttataaatgatttgc

SEQ ID NO: 236237 - DNA, 886 bp, Cannabis indica
tttttttttttattgattttaattctttctcatacataaattataaatattttgaatcaataaaattaaattattattattattattattattattattattattattattattattattattattattatatcacgttcttttttagattgatatatctataattattttaattctaattggattaaaatatagaatttctaatcttaatcctacctaatttaggtttgccgttttatcttttaaaaattaaaatctaaggcaatatcttaaaatatatatataaataatttaatttaattaaatcctaaaatatctgctttatcctaattccaataattattataatgaatacttttattatttatgatgcggtaatatgacattctaaaatcactctaaaattatttttctctgtctccttaattctctcaattttaatattttattaaaacataaatctacaaattaatattttactattattttaatattttttctataaaaaaaagcataaatctacaaattgatattttactattattttagttttctataagaatataaaatattttaaaaaaagttagaaaataaaaaataaattacaaattgatattttactattataataaataatttttctataaaaaaagcataaatctacaaattgatattttactattattttaattttctataaaaaatatgaaatatttttaaaaaagttaaaaaataaaaaataaaattctaaaaaaaatattaaaacttaaatcaatataattaatcgtaaattttgtttatatacatacataaaatatcaatcaatatatcaatttatatctatatatttatatatatatatatatatatattacagacatactct

SEQ ID NO: 236238 - DNA, 1054 bp, Cannabis indica
agagcgtcctcctagaattgaaacatagccgaggtcacccaatcttttccggtgacacccataaagttcaggatcctctaaattactatgagccactatttggctctcatgacatccggaccacccaaaaaaactggaggtgcttgtttgcgaaacctcatacaaaggttccatactgttgccaacaatagggtgttctgttggcaccgctggaaccaaagcggccgacatttagggggaccctgctgtgttagcctctgaattcaggcttgtatttctacaaatctttactcccaatattaaggagcttgtagtggattttcatgtccacctctttaaaaccttccacggcctctgctgcgtccatggggatttggaggattttgacctgcctgactgccttcaatctcgaccatgttgccacaacttctgatgttttgttgggaatccattatataggacttagccaacaaacccataagttaggtaggtcagacagtgatcaaatatgttctaaatatcgtgcttatagattttaaggcaatgcatttaaataaataacatatgaatatcgccattaaatctttataattttatcgaaaatggtaataagtttgttttaatagtctaatcgcttggaaatcaaacttgaacaaaatactaacagagctgtcattgtctaccagcactctgaagaatattttgtttacaatttgtgcttcaattactagagggtcgttgatgggagagttcatatgccttgcatcctcctctgtgaaggtcattagaagaatcatcattctgggacgctatgttggcaattgcactaaagtgcaaacttacccttaatgttacagtttgtttaaacatcttttttgggagttttgagtatttctagcaaggtgaggacctctagagatagtggcgaaatggtcatcagtaggtggcagagctaaccatagaagataaggatttcccagtcctagagctatgactgctaccgcaatgtgggtaggcggagcaagtaaagtcaaaaactgtgttccaggagctt

SEQ ID NO: 236239 - DNA, 587 bp, Cannabis indica
tgtttgataaaacacactatcgatttacattatagaccttgaatcaaaactacaccccctagtactccacccaccattaggatttttgttccccttctctttcataatacatatttttttttcaatttccatctctcttaccattaactattaaatatagtattaatttttttatatgaactgttatcattcgaatataaagcctacgagtcttcaactattttcaacaaaaagatctttagaagaaaaaaaaacaaagtaattacagagttacggtaacataaaattaaaagagttaatttttttaaggaagtttacagtaacataaaccatatcaaggacagataaatctccattattaacataagaggaagtcattgggaaacccatccccaaaattgaaactcttatacaactataaattaataacatacatatcgttctaaaaaaaaaagatatcatacatattattatattaatgtttcaggatccatataaaatttttataattgtaatgttgaattgatgatttgtttaaggttgaataaaatagttaaatttagtaggttgggtgtatttattaagaa

SEQ ID NO: 236240 - DNA, 1019 bp, Cannabis indica
tatggaacttcctacttttttgataaatttttttaatagtattttaatcaacaatactgttatatttttattattttataaaattaatttaaatttgataaatataaattattattaataaaataatcaaatactaactataataaagagcatgaatatagtactattgaaactactcttagatctaaaatttgataaacgaataaatttttaaagaatgttcgttaaatttttctattaataataaaataaaatattagtaatgcatatatgaaaaaaaatatgtatttatacagtgatagaaactaattccacaagtgtaaaaccaaatgtatgtttcgtatatttttgtgaaaatgacattatatatccactttactttatttgttttaatttttttactttattttttcatattctttaaaatatacctatttttataaataatgtccttactatacccttaaattaatataaattatgtgttacacttaagttgagagcaagagtatattaaacaacctactcataaaagtaggtagattttaatataatgtgaaggtattttgattaatggatacaaaaaaaatatatatttttcaattttttcctatatttttagtggagggtttatgattatatgggtcccatcttattttttttaaaaaaatgaacaattatcatcaattaaggtgacatttggtaacacttttttaattagttttctgttattaaaattgaaaaggtaaaaatatttttcaaaaacatattctataaaactatttcacttttcaattttttaattgagaatcaaatttaaaaaaaaaaaaaatcactttcaaaatttttaaagcagtttttttttaatcaatattttgaactccgatcagacccaaacccaagtccccccgacggtgctggtgatgaacccgacctctaatcagaacccgaattcgaccccagacctaaacccgacttaaataaaataaaaaaataaaaatgaactttacagaacacac

SEQ ID NO: 236241 - DNA, 1690 bp, Cannabis indica
ctacttctgtgttagtcaggagttacactagtagttaataagttattggtacaatgccaaaaattgtattgaatttatcatagactgaataagtatctttcttgtaacattaacattcaatctcactggtagagttaaagactccatataggtttttacacttctccaaaatcactgctccacccgcagagtaatccccatctcatcagtagactttctagcatcaaggatagtctagaaaccttatttggtaaagtctaagagtattaaaataccacccttatcaactaacatatagttcctcttcttgatcttaatattcacttgattatcatccaatgttccttcccggattaatcaaatacctagtcattactcccactaaacaaaatgtgtctagtctaatgcatagcaaagcatatttgagacctcttactgttgatcctaaggaattctttccttgggctttatctttctagaacagttaaaatttttcattatataaataaaatctacatctaaaagtcgagaagcttctgttgattgctaaacaaaagttccagcaacttacaaaagtaagtcgcttgaactagagtaattaaagcacaaggcataccacaagcgataggtttagataaactcaaacctttaatactaggaacaagaagttctgttaattccattgaatagatttattttcaaaatttcctatattgtccttttaatagaaaacttttggtttctttatatgaaatgttttaaccatagttctcttggctttgattcttagttccttatttagagtatccgtttcttgtttaaactaacaatggattttaatcacaaatgtcttccaagtcataacagggtgagttccttgcaaccctcccactacgacaaggtacagtgactttctatctaagaatctaaatggtattgacctcatcaggtgtgttaagacaatagaggcagtggaccatcttatatagaataagatgatagaacactttggaatcaagaaaaaatatctcctctactttgctactttgttttcagacttagtcattttctttgaaaagtagtatttgttaaaacaaacactttcttatcttaatgaccatcggatggtccacccctaagcatttagaatagatatcaagcatgcaaactttagttagtagttctagcttttttaaggtcacgatcaggacatccatgaatctagtaatggtttacactaagtacacaaccattccatcattttgaaattttcctatcactagggtttatccatagaaggactcaggcaactgttagtaactaatcatagacctttcactttcatcaatatgcaatctgaatttttgggaaggtaagtttcgatacaattcaaaatttaacttaatgatctttgaactgcatatctaccaaatatttctccaccccatcagttcgcaagatctttaaccacttaccttaatgattttttccaacattgctagaaattcatgaaatttctcaaacatttcaaatttctttgcataaggttaaatcttgagtgatcgtcttaagatgtaacgaaactgatatccactcctgaatgtacatccatatatgcgtaaatatagatgatcctactttcaaagtggatattggcatagtgactctttgcagagaatgatcttgtcaa

SEQ ID NO: 236242 - DNA, 1834 bp, Cannabis indica
ttgtgttttaaaaaccaattcacttttcgtcaatattatttttaaaaaatactaaccaaacatgacttgtttttaaaaattttaaaaattattttttgttctcatttctaaaaataattttttgaaaacaaaaaaacagaaaacaataccaaacatgctcttagcttcgataactttgttttcttttattatcaataatggtaaatacatacccgtctcagtatgtccactgttcttgtgtcatccactctttttatacggtcttgaatttaattcagcattgttattggacacaagagtgtctagtggataacagaatattataactctcttggagtagttagtaggcttaaattttataagctctttacaataacaactcaagaagtaaataacaacattttaaaactcttaacaacataaatataggggagcaacctgtccacattttttcaagtgtattttttggctcaacaaaaggatattgcggcagcccattctcagagagagatgacggcagaaaaagagagaaaaatcagagagagaaagttagagttccattgtaattcataccagaaaaataaaggaagaaaagagcaaaagcttagagattacttgctgaaatttgtggctaggaatctccaaccccttgtaatcggtttgatatggatagtgaagcatctttgaaggaagcttcacggagatgtacccttgattttgacgggaactccgaaatcaaattcttatgttcttcatcttatttttctgctggttctttcgggtctctcttcaataaccaacaaaagattatttttagatctttgctgttattatttttgattgttcatttgtgtgtgcatgttcgggttttgaaagctctcacagagcttgaagaagaggttgctgttcgaagggaagaagaagggttaaaggtgcagctgctagggaaacaagaagaagaatagaagctgagatagaatagttcggctactagggtttcaagcaagaagaagaggagagggagtgatgtgcggctgctagggttagaggagagaaagaaatgagctgctagggttcagccataaaaaggtagggttttgagggggaatattactcttgatccacacaagagggaaggtcctttttaccttggttttttgcactttggggtggtggtgtaggggcattttgggtagtgccttttcctaccgtctacattgtctcacgtagaataaatgatagggtattaagccatataaaagaacatgagctactcatcaccaattgattttgagatggaatctcataattctcaacatggtatcagagttatattccttgcgggcaagtgattctatctgatgcacacctatacaaatagtgatcatgtcttgaggggaatcatcaccaattgattttgagatgtaatctcatgattcttaacagtgttggttgctatattctgttaaagttattatattaaattatatagaggatgatagtcaccaatactattttttagcatttcttatttttatgagttataattattttattttattaaatggaaattcaaataatatgtttttcaaaatagtacaaatagatcataaatttaatatttacaaatttaaaacatgataatttggaggtgttagtccttctgtccgagaagagagtaagaaagagtaaaagaagagaaatgcgcgagtgtgttgaaaaaaatgtaaaaggttaagaatagacaaaagttggcctagttgatgaatattagttagtttgagtttaagattttttattttttatttttttgagtgtagcgtaatggtatttt

SEQ ID NO: 236243 - DNA, 540 bp, Cannabis indica
gatttgtacattagctgcttcttgcaactacttagagcatttggaatggtaaaattttagataattcttggtgaggtattataccattggagaaaaaatttgctatactatattatagcattgttgttaaaactaaaatgttattatagttaaaaattaagatatatattaaataataataagtgaaaacataattatagtagttttaaataatgttatacattagagtattttaaaagtaagagtgctaaaaataatatggaagagaaataaaataaaatattatatttttatataatgtgtaaatttttaatatccttgtagatgctcttactcaacttctatggttgagtcagcagtacaaacttacttaatacttctccatagttaaactttacacaaaatgtaaaaatgaaaaactcagctcaatggaggctgaggggagcattttctacatatactctaatcaataatacaagcatcaataaagaagggcaggtggccctaatgttagaataaggaggccacgataacataata

SEQ ID NO: 236244 - DNA, 619 bp, Cannabis indica
atttaaaatgaatttatattaaacaaaattcactaaatagtaactatagatattgaaatgtataatttaacaaaataaatttacagtactacttaggtgttttacaaaaagtaaatactaaagcaaaaaatgtataatttttctaaaatgaatttacatattgaaatgtaattatcttgataatatctgagagactatcttattataaaattttaataaattgaactcttagaacatcaagagagctgctatgggtaaatttttacacttaacacttataatcataaattaaaaggttactgtaaaactaattttattgttctgagtattgtttaaattgttgtctatgtgtgtgtgcaaaatttataatactatatttttttttctataatttagttggaagatttagtttgttaatattgtaacttctaatggttatgtttttttccccttacctagattgttgtgcatgataagattgaaattgacgaggacgatcctgttgaattcttgatatggaagctgataaaagtaaccagtaaaaattgtttttgatggatacgggtatgtttcttattcaattggaaaggcataatctccaattttattttattttatt

SEQ ID NO: 236245 - DNA, 1873 bp, Cannabis indica
acgccattggtcaagtgtacaccatgctgaatttagaactaaagttggagaggaggatttcttttcccaaataagcttattacgagacttccaaagtgcccaacataacatgatagcacggcatgatatgtcatcgctatgcttctcaaaagtggactcgagccagtgcccaatagttgaggaagcatcggatcgcaaagtgaagtcgcattgctcccaacagctgagtgcaaaggagcagtttagcagcacatcagcagcagtctcggctgcattatggcagacgggacacagggaggaaatgccaacatttttagaaaccaactcgaggcaagtggggagggtattggtgacagcacgccacatgaaattcttgactttcggtgggattttgaggtgccaaaacttgtgccaaaaacaagaattcagatgcctctgcttcccgtatttactgacttgcaatatgctatatgcactgctaaaagaaaaatggccagacttctcacccttccaggaccaacgatcttcaacatgggtagagctcaagggaattccaaggatcaaatgagcatctcgggggttaaacatgtcatgtacaagagaatgatcccaagaaatatcatgaatatccaaaagagaactcaccatgtgattttcgaggcctatagtggcagaggtgacatacagatttgcaggatcggggagccaaggatgcttcaaaatattggttgtaatcccatttccaatagttctttgacagccaagctttaccaaattttgagcactccatatacttcgccaaacgaaactggggttgttgccaaggtctgcaaaaagaaaatctgattgaggatagtacttagctttcaaaacacggctcgctagagatgttggagagacaagtaaccgccatccttgtttggccaacatagcaggattgaaatcatgtaagtggtgaaatcccatgccacccgaatgtttgtgagtagccatacgatcccatgacatccaaatgataccttgacctttcgaagtagatgttttccacaagaaattagccatgatcttctcaatctcttgacaagttttcaaaggaataagaaagacgctcatggcataagttggaagagattggatgacagatttaagaagaactttctttccagctcgagatagaaatttgccattccaactgttaaggcggttaataatcttatttttgagaaagccaagaataacagttttcttccttccaataatgtttggtaatcccaaatagagagagccatcagtagcttctgtcatgccaagaacattgcatatttgatttcgagcatttgcttcattgttggggctgaagaaaatagaggactttgatacattcaccttctgaccagatgctaattcaaaggaatgaagcatttgcttgatgttagcagctgtgttaggatttgcttggcagaagtggtagctgtcgtcagcaaacaacatgtgggttatggaaggagctcctttagcaacacggcacccttgaatgacatggtcagcttcacactttctgatcaaggaagaaaagccttcagcacaaataatgaacaagtaagttgataaaggatcaccttggcggattcctcgggaaggagttatcggcccagcaagtgaccatcatgaaaaatagagtaacgaacagaagttacacatttcatgataaggctgatccatttaccagcaaaacccatacgatgcatgaccacaaacaaatagtcccattctacttgatcataagccttgctcatatctagtttcatagccatgaaaccttttttacccttggttttccgcttgagatactgcatactttcaaaggcaatca

SEQ ID NO: 236246 - DNA, 879 bp, Cannabis indica
ggtacacttaattttagagagtataacatagaatgtccctaaattaattatattgttgttttattattattttttattatctatagttgtatgtttatttttttttttgatagtttactctgtggctttagttataaatttaatagaatgagaatataatgttatatttctttatttaagtaataattatttattaatagtattattatagtagaaaagtaatcacataataaatttgttttatgttgttaaaaaataaataaacatggtttatattttttataaatagattatttagaaaaaaaaaatctttaatatataatatatatgatgagagagaaatacattaactccctcaaaattgttgagggactaaattttttgacactaatttattatagtgaaaaaaatattatgtacatgaattataagaataaataaaaggttttttttttacacataataaaaagatggggagttttcaatataatacttaaaattgattttatttacaaaaatacctttaagaaaattatttgcacaaataccgttgtgccacgtcagcacatataaccaaatttaaaataattaccgaaaattgaaaaaatctcgtttccagatttttttcgctttttaggagttttgtgaaaagcaatcatttagttacttttgatgtgaataagatatcaattagttacttttctattaaaaatttatttcagaattttacgcatataaataataaaataattattttaatatgtgagaaacatatattttttatctcttaaaaagacgactaatattaaaagaaacttttttgtttcttttttatatttttagactatattatgttattttattcttaaagatacattg

SEQ ID NO: 236247 - DNA, 818 bp, Cannabis indica
caaaattcttttggattgggctagtacacttccctcaacagtaggctatgtacaacttgggggtggaaaacaaaatcaggaatatcaaaaaaatgaccaaattgggtgtcacaaaacatagaaaataaattcacagataaagtattctttatattatcaataacataaaaattgctagtacaacacatttggatctgtaaaaatcagagggactaaatttgtaatcccagacctccaatttaacaaacatgacaaatataaataaaaatggcaaataagcaagtatacaaactataataaaagtataaaaaaaattgaaaacaaactgacaaataaaacaactcttcgaacataaactacaaagatctaaaatcaaattcttacctaaaaatgaacagcaaacaactatacctaatcatattcccaaaagacaacatacataaacggattaaactattaaaaaaactatgaaaaaactaaaacacactgtgaagagacattaaaacgaaactgaagtttaaaaatatttaaaaaaattggaaaacacaaacagaataaaaaagacaacataatgaaacaaaagttagaataaacaaactaaaatgcaaaacccacaaaataacaaataaaattgattaagaaaaattaaagccctaaaaatccaaacaaaaccaaacgaaaatttaaaatagaaaacctagaatatcacaaattagaaacacaaaaatgataaagtgaaaaataacaagaatatctataaaatagggggaaacaaaaaaggaaaactgtaaacacacctcagttcgaataacaccacc

SEQ ID NO: 236248 - DNA, 2196 bp, Cannabis indica
cctagagagacaaatagagttactcataattgtgctaaaacaaacttaggattaaatagtgagctcatttggaatagttctctaccgtaccttcattgtaaacctgtttactttgtacatttttaataaaagttaccagtttttatcaaaacgataataataataaccaaccccatccattacttgctatgcaaacttgtactatcaaatagtgatatccccctcaaaaattctaggacaccccttttcaacatatagagctacatgcattaaagcaatgaccggattggaactaaaaaggaaagcaaagcttagattgttgtctcaactccaaaatctggttcaaggtcttcactttaaccattattctttataatctttaattaatggccattgagaactcaagaacatcacaaaaacacagctttgaaagattaagaatttcccaacatcacaaaactggggaatatcccatacagagacttagcaatacataacaacccataaaccctcctactccatggtagcaactcctccagcagcctttaacttctctataatctcagctgcctcttctttggtaactccttgtttaatcaaaacaggtaccttctcaaccaaatctttagcttccttcaaacccaaactagtaaaagacctgacttccttaatcaccttgatctttgcagctgtgtcaaacttctccaacttcacatcaaatgccgttttctccactttcttctcttcagcctttgccccagcagcagaccctccttgtgcacccaagtccatcccttcggttgatatcttctccagttttggaagcgttagcttgagagtgagagcaggaccgatttgagaccgttcttcgggggctaatgctacaattcgttcagcaagctgaagtattttttccgagggtggcggtctgggaccatatggatcataaaatgcagggtatttatactttttaggcttgacattgggatccctgggaacaaaatcatgctggaaagaacgatgctgcaaaggcccagttatttccctcagaatggaacgaacacgaaatgattttgcaagcacaacaatcctcatagtattgatgaattgagcgaaatcaatatgtcattgagcagaaaattgatttacttcgaaaaaattgtgaatctgcatatttcaaccaagcaggtccaactttattcacactaacctcaacataaatcgaacattttgctgtcttacaaagagaaattcacataataaacaacagcccttcatataaacatactaattcttcaccatttcaatggaagttaaaaacgttttccagcagagcatttacacaaacaactggtgcgcacacaacaacataatgacagactaactaataactttagctaaagataagtggctttttgtatcgagatcttaccgtagcgggtgaacttgaaaaaaagcaaaatataggtcccggagttcccaaaaagaatgcttaaaatctccagctaaagtctgaactgaaatacccaaaaataatccaccaaagagatcaaatgatagtatttaaaacaatataaagagaaaaataatagattgaaacataatagcatacgctgttcatttggcgggttggttaggttgtagagaacttaacctgcgcaaatagtccaatggtttgagcgcccaaaccgatatatgcatttttacttttaatttccaaattcaaatttaacacttcacttgagattagcatagcatagtttaagcaagactgtaaatttacattttcaaaatggtgaaagaagaatcgagaagaggatatcactttacatttcacatcaaaattcaaaaggaaagctttctattaatccctaacaatgacatgaacaatcggcaaattggaacaacaaggcctgtttatgatataatacccattgaacagagggaaaaataatctaagctagcaaacattaatacattaacaaaatggataaacatacatacatacatatatagatagacatgcacaataaataaattatctcttgattctcattggaacatccacaacataagaataaggatattattctcaatttttcactgctcaagctcaatacctgtgcaagtcggcgtcaggagagctggaggcgggagtagaagagctgcgctagctctggctctggcgctgcgtgt

SEQ ID NO: 236249 - DNA, 1119 bp, Cannabis indica
aattaagtaattttcgaaatatttattgaaaattattactaagatggaaaataattttatttattttcagatctattgccctctattttgtccaaaataagtggaccaatataaagacgacacgtggagctgggaggctcaactcttaaagaaatcgactaagtctttgggaacaggagtgtcgctgagaagataactcccggagaagatatgagaaggatccacgtactcccggaggccagggccatgctaaggcacctccggaaggtacttgattgtatttgaacagtcacctcgcatttaatgccgcatgggagaaaacgtattggaactgccataagcaagatgactgacggcgtaacccctcttttgcagctattacgctgtgattaataaggctagtgaccggtcatgtatttcttattttttatctgctaggaatatgtgcccttgttgaacctacacagaaagacaagcgattcagttatagggatccccccagaaaaacactataaatacacccctaacacactgagacaggggtcgagaattctgggctcataagaattaaagagagcaaataggagaaatatctaccaagaacattctctgtaataaatactctcataaataacaaagactcatggactaaggctcgttaatgccccaaccacgtaaaaaaaaacccatgcattaaacttcctacagcttttgtatattcattgtttaatcggttgccgaaaacctcggtcaacattttggtgctttcattgagagctgagggaagcgtctttaaacagacaaccttataagctaaagcaccaatggtggaaactcgcaacacacatcagccccgtcctcctcaagacgctcaaaaccctgaagacgaagaagtggcttcaagagtgaacgtggattctgaggaacgagaggaggccaacgatgacgaatatgaggaaaactttgacaagtatgacgcctatgacgaagacagttacatagagctactgctcttaaggcaaaaggttgctgatcatgaagctgagcttgcagcccaaaaagaacaaaacaaaaagatgcaagaggtgatggtcgccatgcaaaaagccatggagacag

SEQ ID NO: 236250 - DNA, 834 bp, Cannabis indica
gcttcgtttgtaatcaaaaataaagtttgaagcttcaagcccatttttgactatgatctattcactttcaggaaaactttctgaataaaagttatagatctcttttttatctttctataacatcttaaattgtccaatttcaagttatatcgagagagttatggctaaaataccatcgggtatcgtagtagaatttcagcattgcaatcgttttggaaattttgctgcttagcgaaaaaaataggaaatttcccaaattttgtctataaaacgagttggatctaggtttcctttatcattggaacttggagaccaattttgagcataggaggatagctaagagcagaagacaccattagaggactctaaatatctctctttctcatctatctttatcttttttgtttttaattgaatctttattgttttagaatgacttttatgagatagttttcttgaaggattattatgtgaactattgaatttattttatagattagtgtagttattcaattttaccttcttctcgtattttaattccatgcaatctgatttaatattgtaattattaactgatcacctatagttgtcatttatgaatttgaaaataaattatgaaaagtgagatttgaatatgttttgattgttatgaataaaaattagtttaggtcgattgtatctagaatatttgtataattttatgagttgctttcattaatgtcttcttcgtgattaaactttacataggaattagggagttttcatgtagattgggtttctaagtcttaacaagattatgaactacttaattctattagaaattattttaccagg

SEQ ID NO: 236251 - DNA, 1108 bp, Cannabis indica
aaaatttcttcatggtcgtcacccaaaataactacgaggccccttctttaaccctaatcctccacgatgcccagacaaagacgtggcgtcctgagttgaccctgaagaagatgacgccaatgattaagactatgggctcgaaagttacccaaaaggctatgaagaagaagatgttggggtttatgccctgaaaagctaataaagacatttatgattattaaataaagagttgaacatttgatatatccttgaatgttaaattattactatttattattgaataatttatatatataaatgtattctttatttatgtatgacgttgtagctgtacagagaactaagaccacttaactatatgaataaaacaattagtaacatattaaagttatggaatatttaattaatggttgctactacattttattgatgcccattctacggtgcaagttatcttagtttggattattgatgtagagagacatttaagtgaaggtgctgtatataatagagattatatatgaaaaagatcgatataaataaagctatctttatcaacatgccatttactatgaagacctaattcatatcataacgatgatcaatagtagatcggtctacatcatgagtaatcatgaactcatgttcatgttattagtttctttgattcactcgttaaagtttctcagagaagatgattcttacaacttgtattttgggaaactagtaatgtggatgactggaaacatgatctataattatggaatcctaaatttcctaatgtttaccgagacttacagaaactaatatattagagcttaagaaaggaataaaacagtaaataatagataaataatttttacgtagtttgggcgttaacaatccctagtccacgagtcaattgtattggccctttaggcaaatatttgaataacacaagtatttatagtaattatcaatcaagtaattaacatgtcatcagttacccacaaaaataggacatggttttgacaactagcatcatgatgtgacattcacattagtatacacaagaccctatgggacacgcttcaccagataagcctaaaatttatattatatttttaaa

SEQ ID NO: 236252 - DNA, 611 bp, Cannabis indica
tccacggtcggcgaactcaacacattttatttcaaaaattgattatacaatacccacataatccgataaaatctctataattaataaattacgttatatttattcattcactcatattttactaatttactcgcaagtactttaatgtccatataattacatatttattaaaatatatccatttaaatattattatattttctgggatattaaaactatcccctccttatagaaattttgtcctcaaaatttacctgaataactcgggatattgctcctgcatctgcgactctaactcccaagtcgcctcttcaatcttgttgttcctccacaacactttagctagcggaatagtacatcttattccgcaatactttctccttctgtccaagatctgaattggatgttccttgtatgacaagtatgtttgaagtttagtatcttcataactaaaaatatgggtcgtatctgacacatatacttctgaagcattgaaatatagaacacattgtgaactctagataaagcaagggtaaggctagctgataagctacctgacctatcctttccaaaatatgaaacgaaacaataaatttgggacttagctttcc

SEQ ID NO: 236253 - DNA, 751 bp, Cannabis indica
atcaagcacggtagaaaaagtaaactgattgggtataaacccatcttccctcatttttgagaaggtcttaagtgcttcgtcatactcagagcattgagaataagccactactaaggttgtccaagacactatgtctctttcttccatcctatcaaaaactttccttacatcttcaagtaactcacatttagcgtacgcatcaacaattgcattagaaacacttgtcttgaacactgacccagacttcaaaaccattccatgaacttgccttacaaaacctgtacattttacagaagatattgcattgaacacactacaatacgtgtaaaggtctggataaatacctttctcgcacatggttaaaaatagttccaaagcttcttggctgtacccacattgtgaatagcctgatatcattgcattccatggggtattgattccacagctagtgaaatttgagtcaaaaatggatcttgcatcagacaaagacttacattttgagtacatgtctattaaagcagttcccacattaatgttagaatccaaatgaagttcagaagcataagcctgaactattttacccttgtcagtatcacctaatttaccaacagcttttgagacactaattatggtgtatacattgggtgaaattccctcattcttcattttgagaaaaaattggaacgcttctaagtgatggttgtttgacgtgaaacctgatatcattgcattccaggagacttgattatgt

SEQ ID NO: 236254 - DNA, 982 bp, Cannabis indica
aatttctccaaaataatagaagaaaaaaaaaaggcttcatccaatagcagaacaacaatatatgaaactactgataggaaagattacgtctagaaattaccctaaattcaaacaatactaaaatagtggcaaaaactttctttgagtcatttcatcaaacatataatatgcataattataaatatgaaattatcagatcaatgtatgctacttaaatccctcaaatatcattcgacctccttacagaaaaaaaataataataataaaaaattatcattcaatcaacttttgaattaaagaagaaaaaagatgaatggttaagaataatatgagtacatgccaaagactcgtgtaattgtaaataaaaaaaatcttgtataataatttgtgaaaaaagaaaaaaatcaaatccaaaactgaactaagaaaacttaactgaacatattaaaaaagaaaacaaagtgaaaaagaaaataaacttagaaaaataatttaacaggaggtatttaagagtaatcaataaaaatccccttcaaattatcaagggattattgatacgaacctgcaccaaccagaatgatgagcttccccgggccttcatctccaatcgaagcatctagaacctaatagtattaggtatattcctcccatacttcttttcttttaatttgaattgcgacccagcgacatatgtaatcaaaagttgttggtaaaattagaattgttagaatattattttatttattattgaaacttaattaagttctctcacctaaaaacaactgaatgatcgcctttctgggtttggagcagtcgacagtttgggtttcttattctacttagtcatcatcgacgataatactgaacgaatttccgagtttgtagatagtcgaaataacgatgtatcagttcaaatattgttggggatttgttttatttttattttattattttattacatataaataatattttattattt

SEQ ID NO: 236255 - DNA, 1372 bp, Cannabis indica
atactagttattatttatttagaaaaaaaaaattaaccaaatgtaagcataaaaaatcaaatttccctttgtaaatttgatatttgacctccaaaatttataacactattcttgattataattttgaggagtgttgaaaatattttcacatattcacaataaagaaaacaaaaaccatatgtgagacataactttgttatggtttgttagaatttgggattaaagtgtgattaaggtgtatggagttctattctaaaattaattggcaatagaaggagtagtccattcattttgtacatggtaatttatttccacacattagtaatgtaggattaactctaatacaccctcttcacatttgagcccgaaaagtgtaggtataacggacaactttaagagactacaaggtcgaacgtgatatttgaaaaaatcccacaaggccaaatattgagaaatttgtaagtgtacgcgttgggaaatttgtagatttttgaaacaggtcaaagaccccaatattgaaaactggcacacattgaccgaaaggtcccgaatgaaagttaaagggggagacagtggaagttttttaagtttggcttgtttttttggaccgacgactttggacgcacaacggatcacaaacaactctttcaatggctcgcctttttagaccgatggcactttgagcttataacaagtgaccctggtatcatgttagaatttgaaatgaaagtggctaaggtatgattaagatgcatgaggttctatctcaaaactaatagacaatgggaggagcacctgcatttatcttacatataataatttattttcacacattagtaatataagactaattctaatatagtcattttaaagcctctccaccccacccaaaactggtggtgaaataaatcaaatttaacatataataaataaagtattttgttaatattaatttcattaatgtcggactttataaaacatttttgatataatattatttttttaaaataaccataataaagttattaattatcatttaatatgtcatttattaataattatttatgatagtttacttttgataccattttcatcttaaactattattatgcaagcaatggattgaaacacattataattataaaaagtattgttattagatattagtggtacttaacatttctagacatgtcgatttgcgattggctaacgatactctctaaaaattattatattaaattttatgggacccgatacttaattgaactaatagtgttgttgatacataagaaagtgctaaacaccactagtagtacgttttagcatttttcaattataagtattttgtaaaagggtaaataccattttggac

SEQ ID NO: 236256 - DNA, 1706 bp, Cannabis indica
atatcacttaggcatcaaaacaaacattcccagtacgttttcctactcatctagcacccaggttgacgtcacatgtcaacttgggcactagatgtcaacttgggcactggatgtcaacctaggggatgggccgagaataacattcagtaaaacagccataactcactcaacattaatacgactgatgcgattcaacttgcattttgaactatttcaatgcttaatcaagtaatctctcacactccaatcacaattctaaaattatcaactctaaattttgtcttcaagagagttacgaatttaagccataacttacgtgaaatagattttgtggacgcgactcaagcttcaaaaattgacaaccgacctttggagtaaatttcactattagatcatcatcaacggtcaaaaatagcctaaatgtattttttccatatttcttggattattttattattattttaataagacatctttttcctataaaatgagagctccactagctcaatttaatatttagaaaagtacccgtaagatcatatcatctctctctagtttactctctagaaatttgagcattaacccttagccaattttcttgtaattcttgtaagaaataaaaactagaagtagatgtagatgtagctctattaccatcgcgacatgaggagtgagctactataaatttcgtgggtccctctaaattatttacttaaacttattattcatctcggcaatctagcgagctggtattggtcactttttagcgtcaataccattctcgatgagttcttgattcatcaaaacttgattcttgagtcctcgatcttaccttgctccgataccatttatggtgaattaacacctatcaagaattaaatataaacaagaattatagtactcgaatacaatgatagcagtgaacataaaacagatattaaacaactgaaactaaatgaaattgagacaatgtataacgagattaatcacccttttttggtgactaatccttggaagaactgccctttggcaaagcttttattcaatcttcaataatggtagagtagagaggtgaataaaagagtttaactcgtcaataatggtgtcttacaccatacaattcaactcacttgagagtatagtgatcaaacacacattgtctctttaacatccgtccttacacattacgatttgttttcatttaaaatacactctctaaattgttacctagagaattaaaactataaagtcttatatcaacatctcaatatgtgtgatactcaagtaaactaacataactgactcataagctgactaagtacaaatattttaactaacagctctctaagcgaggagtactaagttactaaaatctctcgaaagatgcccatccttccttaatgtaataatcctcaagatatattataaaacaagataaagataactttctttgtgaatattaattttaagagcattgttatttagcaccagtggtactcatcactttctataggtagcaccttacaattggttagcgatattctttaaaagttattttcttaagttatataaaaccagctacataattatactaataacggtatgacacgaatgagattgctaggcattagagagtctttttatgcatttattattagaatatttctaattaaggaaataaaataatattattgattctgataaat

SEQ ID NO: 236257 - DNA, 1036 bp, Cannabis indica
taaacatatttccaaagagtctttgttcgatcgaaatacgaactaaaatatttaaaataaactataaaccaaaatactcaaacttaacatattaaagccaccttaaacaatcaatttttcttggttccatatgcaagataggcatcgcacaagttgaacaaatgaatatcatattcgccattctcaatcattttctggttttcagcatcgcggagaccacgtaggatttgcatcacttctttcttgtgaaagccctgtaaaccatatctaatgttttcatccatctccttaatcctttccttctcatccatccaacttttgatctccttattcaaggattgaatgaattcaacggtcagaccccttcgatattgtctaatttcggtagaaaatcggtatggcagcccgctgtcatgatcaggaacgggagaggaaggaagacgagatgcaactgacaaaaggaattgtagtttaccaataatagtgtctatagtcttcaaatgttcttcaaacaagccaaccatggccatgaggatgatgaaggagaagagggtatggggatggcaagcggcgcttttttactttctttgggaaagaagttattttttcacactgatgagttagggttatatataaatatgatattatggtggttttttaatacattaggtgctattttttgaatataataacaaaattattgcattaaagtagttcccttcaataataaatattgtatctgttcaaaaaaatactaatagatattctcattgctttataatttggggcaattcgaaaggataataaaaaaaataataaataaataattttttttaaaataatggtaatgttaatggtgggagttacaaggtttatgtgcatttaataagaataatgtgtattaatataaaaactattaaataaggaataatattaattatgtaaattatgcataaacaaagttagtcgacaaacatttttaacacgtattaattgataaacggttatacttttagaaaaataaatattaacccga

SEQ ID NO: 236258 - DNA, 913 bp, Cannabis indica
ttcctaaaaactcaacccgcgaacctgcccgaagggtaccgggttgaacccaacccgcccaaacattttttcaaaaaaaattttgcgggttcatcggttcgggttcgggcgggttgctcgggttcgggttgaacccgctagaaatgttcagccctaattgaaatggtgcattatcatggttccaaacacagtaacaaatggtattcccctctctctcttgttggggaaattgcttgatcccaatacaagcttacatttcttattcctatgttgtttgctgttataacatctcccaagtaaattataaaatctgcatttacataattaaacataaataaataaatttactttactatatatatcacattcaatctcaaaacaaaactggttcgatcaaggaatcaataacgaaaacagaaatgaaaataaagagcacaaacacatacgcggttcaagtgaccaaaccagcctcaagggtccttgtaatctctttattcaaaacttgtttcaaatctgtacaacaatgaagtcttgctccatgaatcaactctcaatagtggacaaaatcttctcttaactctaagcctagtccaactgtcataacaggaaaaacttaaaagctgttatttctgttatgtgtcccaaagtagccctttgagtccaaacagcattttaccaattccaacaataagaaactaatcatttacaagagtaactagcatttaaatgagaaaaatacatctttagtcaaagtgaggcgactctttgtttaattttcagttacaattttatttaaagaattgctaaaaaggcattactggtacttagcaccttccttggtaaaattaagtatcgagttccatataacttaaagaaataactatctttagtcaatgtacggcaagtctttgtt

SEQ ID NO: 236259 - DNA, 718 bp, Cannabis indica
ttgaaattcatcaagtggaatcaaactgcttaaatctcattatagacatccaaacaaatggaactactttatctgcgtgtggagcaattgtgagttatcttcgcgaggtgttatcttcactccccactgtctcccttcaacatacccctaggcaagggaatacattagcacataatttagcataaaaggctattggggtagatagcacttggttttggaatgacaatgatccctacctctacttgtaattttttgtgggttgttttcacacaaaaaaaataactaaaacatataaaaatatccaaataaaattactagttacacaatcacgaaaaatttcaaaaaaaaaaaaaatttatgaaaaagaacaaaaatttatgaaaaatttcaacaaacattttctttgtttggggagaatatccttgatgaaccaatgaccagccgtgtccttttgcaacagtgggactttgacggtgatgaactgaaattaaagaaaaccatcggccatgcgattaaagcaaaaaaaaaaaaaaatcatccaacaaaaacaagatatatgaacgaaaaataccttaatgtgaggtagagaacaaaaaaccaacgaaaaatggtcaatgaaaactatcaccgtcgatgtcatcgcctgtgggtttcaaaaccctcaaaacctatttctctaaaattattccaaacccaaactaaaataattgttataggt

SEQ ID NO: 236260 - DNA, 1215 bp, Cannabis indica
cattgattgtttcttcaagttgcagtagaaagaatcttcattctgcgatcttgattgataaccaagctctgatttgtgagaaatttcaaatattctgcagaatcaaaattaacttaaattgaatcaacaaacaattagcaataacaaaattaaccaaacatagttcaagaattggaagaataacatagacgataaaacaagaaataaacaatgcaagaaaactataaagttaacaccaagaattatactagttcaattctgataaatcgatgtgatatgcggctctactccagttctagaacaccactgaaacttcttttaatgattgagcaagaacacaagtacaatacaactgagagtgattctttgtttggattctctcaaagtgttttttctctaacactcttccctgagaaacttcttcatctatagaagcctcccttttacaaaacccaaaatccaatgctctcttttctctgtacatttctctctacctcttaatcaaaaaactctctcaaagcacttgcgtactgttcttttatttagtcacttgtaaaataaagaggatggttgtattatcgaggatatgaatcccaaaggcggtggcttcaaacatctaagtagttaatttgattaagacttaaccgactccttacaatgagatctccaagttagctcttggcatcaagctctatgtagacatgtatcatgcttcttggacggacgtcccaaactgatgaagcataatctgaaaggacatcctagataggcacaaagccaactagaacaaactgtccagaaccccttcttgatatgaacaactagccttctagaagtcctttctaaaggacgactagctttcctgaaccacttcctggagggacgacaagatccacgagacttctttctggataaacaaactaaccttcttgaactccttttcagattatgactaggtttccagaagacaactttcgaatggacaagctagcttttcggatgacatatagctttcttgaagactcgacttgagatcttttcatttgaaggaactataccacatgtcatttttcgttaaaggagtgatctgatgttgtatttatttttggacgaaattgtttgtttttagatttttttttaattttttaaatatttttgccgaaacaaatacaattagcgacgatgcagtagttttttgcttcggttatgaatcga

SEQ ID NO: 236261 - DNA, 2349 bp, Cannabis indica
aaggacgtcgatctcggaggtaaagggtgatccgcatgctcggtccagttcgagatcagtgagttttgggcagatcagaccttgaaccatatttttcatttgatctacctgtgcttgcacagatgtatgaactgtttcagcctcttcaccaacttgtgtcacgtcaagatctcttagagttgggtcctaagtgcagatgcctggttcggcggctggttgaacgtattatttgtctagacctcttcttcggttcaaatcagtcctgagatcatgggctgcacccaatctattgaatactgaagtaccaggtggtctcagtgtttgactagtttggccggtgggttgaccagaactgtcagtttggatgaagttattaggtataactccacctaaaggacaatcagagagggtctggtcgtctaccgtttggccccacaggtagggcctgtggccggggattggacgactgaccattatgagtttgggcggtatgcccagcagcaatttcttcttaccaccaagtgaaatactgaacgtatcagctggttgctgattagaaacttgataggctctctgtatcagtatagtagcctgccttgttcggtcatcgatggctacttattgagccttcaatatttccatctccttgtccctccactcaatgaactggcgttgctgctcatagaacgcaaggtttattgcagcacggagatcctccttatcatggtgcaaggcgttagtatgaccttgcatgagtccaagggcatcacggaggttttgaatcttagtgtcatcccccacacgttgagcattggttgtggatgggattccagcggtgggagtgctttgatcggctgcagaactagtattcccagtctcttgcacaccttgcgtgatcccagccagaggggaagtcacaccttggcccactgtagatggctatatgttaggctgctcgagattggttcctggtgggacccttgtgttcccaggggttttgcatagcagggttttgtcaccattggggtcactctgatcaaccaagcctctgcgagtttgcaccaccatttttgcaaaatgttgacctcgcttttagtcaacaaaatgagtcaattatgaagcaatttgaaatataataaaaatagaacaaatttcaataagcaataaagaacaccaagttttgaagagatccaacccctttagtttggtaatagcctactccccttagattgtattaactcgagaataaagaacatagtgttacctctctcaaagctctcacagtgaaatcactgagtatttctcttagatctctctctctctctaaagtaattctttcgattccttttacagtgaagctagatcactatttataggggcttaatgctcgagggaaggtttcccctttgcttacaatagctataattggaaagaacatttattacataattagaataaatgaaatgggggattgagacagcctgtcataccctctgattcaatcccatgatcgtagggattgccttcgtacttgggcttcctataccattctgaagtagtcaagtcttggtacacagctctgaaaaccaaacttattctctacttggataatctgccctttaccctgctcggataagcagatgttgtgcgtgcagatgtactaccagaatcccgttcataatatcttttcgttcaggtgcaaagaatattggacacgtgtcactcgtacatgctgccacgccatagtgcaaaaaatgggatagcacaaagcatgcccttcgattagacgatgagtcatcctagttcgaggaggttcctctgtcgattatagatatctgcatcattgattcatgaatgattatggtcactacgcaaaaataaaaaaaatagttccaaagctcaactaagaagtctctactcattctccgattaaggtctaaataaaaaaaaaacaacaacaagcttaagcctcataacaatgaaaagggactctactacaaatatgggtgttcgcgacggtcctaaaaatatatttttttagagaagtgttgctaagaaaataaagagagtatttaaaactgccgcgaaaataggggttttcaacagtatactgctgagaggtataggcaatggtttttaaacgtgcccaaaaaaagatttcgtgtatttttaaaggagaattgcctacggtttaaaaccgtaggcaattcccgtgcttacatttaatgcgtttcaggtctaaaatttcatttccccgtatcttaaactccaaaattttatttcccacctctcaatatataaaccccctcaaaaaaattagatctcattttttcaaagtcatttataaat

SEQ ID NO: 236262 - DNA, 1385 bp, Cannabis indica
agggagttctcataaaattcattagaagtcttggaaatctctgtgcaaatctaaattttttttttttgggggggggggttgggttttcgttctctcattcattttaatcaagctatgctggacaagcaagcttggagaatttttaagaacccctcttctctccttgcttttgttcttaaggctagatatttccctcgtactgcgtaacttgatgctaaacttggtcacaacccttctttcacttggagaagtattctttggggtagagagctattgaatatgggacttttatggaaagtgggtgatggtagtcatattagaaccattgaggatcattggcttccatgtaacaggtttaaatttttttcttctgattataggcctccttccccttttttgtcctattttattactgataatggggattgggatgtttctaaacttgcaaggtgtttttctactcctttggttgatgaaattcttagtgttcctcttatgggtgagcttggtaaggatgatcttgtttgggggcatgatagttcagggaagtgtacagttaagtctgcctatcaccttgctttttcctctcatgatcttccatcctcttcttctttttctcattctaagaaattttggtctaagctttggacttcaaaaattcctccaaaagtgaaggtgtttatctggagaatgctctctaatgctcttcctgtttctttttctcttcataaaagatgtattattgattctcctttgtgtcctttgtgtaaaatacatcctgaaacggttaagcatgctttgctagatttttccagatcgaggaaagcttggaaatcttcaaggtttgctagtctttactataaatataagcatttgaatatttacgatttcttttgtagtgtgtctcaggagcttgataaggattatgtttatattttgtgttgttttctttgggctctttggaatcaaaggaataatgtttttcaccataagcaagatggccaactttttgatgtttatgattggagcgttacttttttcttcaagttcttggatgctcaacaggttcctgttccttccactgtttccaatttggatcagacagttttgcagcatattcctcctgagggggcttttcagatattcactgatgcagccattgatatccagaagaaaaagtatagtgttggggctgttgtcttgaatcactctaaccaggttgtggctggtttggctaagccgtttacagactgtgttgatccattggtggctgaggctaaagctattgtccatcctctatagtgggcctcctctattctcttgcttgtggacatcttaaaaaaggattgtaaatctattgtagataaattgtattcttgtaatcg

SEQ ID NO: 236263 - DNA, 658 bp, Cannabis indica
ttatattaaataattttttattaaatacttttacgttacttttttattttactcttataaaaatatttatgttacttagactatttaataaagtaataagttacaataaagttgaaaaaaggcactataacttattggtaaaattactaaatatttaaactactaattagttattttaaaattatttttttagttatcttttaagtttataataaaaactaactagttttcatatagtgtaacaaataagcatggatatgaaataattttatttagtatattttatagtaatatttaaattaattataattttaatcatataccaattggttactttcataaaatgatcaactttaaataaaaatatctcctgtagaaatataatctaatggtaactaattagtatatgattggtagcatgtgtaagtgtaactcaaatatttcttttatttttaaaaaatgataaattatatgctttccacgtattaaactgaccacgttgaatagtaaataatgattgtaatttttttaaacttaattgagcagtataaatttttaaataagatataaaatagagataaaggaaaaatataatatgtatcaatatatataaaagggggagaatggctaaaaaagaaaagaaaaaaaaaaaaaaaaa

SEQ ID NO: 236264 - DNA, 1176 bp, Cannabis indica
tatataaagatatataaaaatataaaacaaaaattttaaataaatataaaaaaaatatgtgtttggaggcctaaacaatatcaaatatataaatatattttgtacatatagtttaaacttttacatatgagagttaaattattgtgttttttttttaaaaaaatatttgtagagttcaatgtatatttaaaggtcattaattatatgtgtttttctttttcttcttcttctttttttaaaaaaactatttataagtgatgaatgtaatgatatttttaaattaatattttgtaatttttattttttttaaataaaaattagatgaaatctttatgcatttttcttgcagtaatttatacaatagtttaaattttaatatataaaaattaaattatttatcgtaatttttattttaatcttaattcttttatgaagattcgtttaaattttatgtacaatttgaagtattttgcctaatttgatattcttagttttatttgagtatatttgttaagttctattatattaacaaatgttaagtatactattttttttttttagactatataaaagtatatattgtattataggcaagaacattatcatcaaggctattttatgatcaagtatagagataactcattttgttcatttatatataaaacttttaaagagcaaaacatcccatgcttaatcaaatttgtatagtagtatatttaatcttgtcgcttaataattcgttaacttattagcttaacaaataaacttatataaagataatataatatcttccatattaggcaaacgattcagtcacgcctattaaatagagtaacatgttactcttctttgattataaccatcaagtcttatattatcatatacaatggctaaaaacgggtgatttttttttttagaaaaaattgatatggatatgataattgaaactagcaatagggatattgtacttcccccttgtactacaagttatttatttaacacttatgggtaattaaaaaaaaaagataatgataaaaataaaaaaacactaaaaataatattccaaaaatatttattaaatggtttatggtaagagctatttacaataatatagggaaaaaaatataaattttgatatataacataaaaatttaattatactaaatatggtattct

SEQ ID NO: 236265 - DNA, 796 bp, Cannabis indica
cgcacaacgactacaaaataagagctcatgctgtcctgaaactgaacactccagacttaattattccaatatgtacaatcacccgcaagctctggactcactgatgctcagcctttggctttcctttacctacacatgcaaacataactatgagtcgacagactcagtaggaaaagcataaaacatataaacatattaccgacttgtaactaggtgcccatacacctacctacaaggcttaatagatgaatcaagaacattcttaacagaagtacgactcgtcccatactaggtttggtagggttgatttgtacctctagtacaactgaatgttataccacacaaactccgtactcgtcccgtactagtgttgatcatgtgtgtcataccccttaacattatactgtactaatgtcagcaaaaatggtaggccgtttatgagaaaacggtctgtcattttgtgttgcagaatttctaaacatctcatttcaactcaaaactaacacagacttcgtaaaactttccaaaacacccaacttgagtccaacaaacataaatcaagcaacaacaacaactataacccaaaaatatgaaaatcaccattgttgatgagctaagtttaaaacttgctcaacacctcaaccagccatcaagaaccaacccaagaaacatcaaacaacttaaaattaacctaaaaatcaaaccataaacatctagggttcggacagaacttaaccttcaaaattgcatgcttgaacgaatcctaaacttccaaaaaatcaaaaagaaggattct

SEQ ID NO: 236266 - DNA, 1199 bp, Cannabis indica
actcttttacaagactcttgttttccattatatatggttggaatggtattaaaattttggatgttggcatatgatctttcacctcataatcataaatataaataaaattcaaattaccctctaaaaaaaatcaaatcaatctggctacaaatatattcatgcatgctatcttattcttatttggaatggaacaaactctaacttttagtctcatttctagaacctaataaaagatggaagaattcaccattacaaaaacatcccccatataccctcctattcttcttgtccactacttgaggagcctaaagcttgcatttaccatatagttaacaaactatgcattcttttacgctaattattaaccagtaaccactactactgaaatactaaggttatctgtatgtgatgaaacttgttagaacgaatcataaaaatagaagtagttttgtaatattgtcccacagtggaaagagcataaaacattcctctaaaacagcaactatatagttggtggcaactaacctgaaaaattcacgcagccatgtgttaagcacaaagcgaactattctttcgccttttactaaagaataccgtgtgcttgtcactcacaatggcatacgcttatttttgaagggtttttctcatctgtggaagatcctaaaattttaagttcaaagcttttctttattttctattttgtagagagattttagttttaagctggtgctctagaatatcttggatgtaagtgagctctgtcaataggctggactgttagaattaatgttatggactaatataatcataggtttaataccataaacacaatcattaactatgtactcaatatttgttcactaccataatgggatggttaataatcatatattatattagaggcacatgagagcacccttaaaactataattggcccattaaattatagtataccattattggaccacttaagcccaattagcaagtaacccctttagggttagaggggtcatgatttatatatatatatatatatatatatctctctctcttatgtgaagaagtggttttagagaggttaatggtaataggtagagaggaggggtgtaagtgaccgctctagtaatgtggattagtaaaggcaattaacactaatttttattattttattattatttgtgtaattaatttaattgtgg

SEQ ID NO: 236267 - DNA, 1348 bp, Cannabis indica
aactcagtggagggttgttcatgcaagaaaaagaagcacaataattagtactaaaattagagaaaaacagagagaaagagagagtttcaaacactgtaaaattattagggattaccaaaataatacatgtgtgttttggaatcccaccattgtaatctcttgatcattgaagatccatagtggaacaaggcgagctcgaagaggacgtacccagcacatattttggggaacctctataaaaatctggggttttcttctccttttcttttcatatttttctattgtgtttatgctattttcggtttggtattttctaggtattgaatcggtttacaaagggggtgctgctgggttttgttcttcgggttgggaaatttctgggttgatggtgttcttcatgttcttcaaagaagaacattgaagaaagaaggttgttgggttttcttaggttttctctgatttttcatttgtagttgtttatgtgtgcaacaaagaaaagataatatatatatgagtgtgatatgtttttagggtttctaattaacaataaaacgacttgtagcaaataaatggtggctgtcgtttttcttggggtttaaatcagagtcaaacaaagctttcttttgactaagtaaatgtcagttttaaccttaggttgctgagttgtctttgctgtgtgtagggcaaattgggaataaagattcctacagtggtgtcagagccaaacaaggcacaatctgcagcaaagattaatcaagaaagcatcaagaaacacattcataccagcaagaattcaaatactcaaaaccagattgcaaagaataacaacaggattattctaaactcataatctatataatttctttgaaataattttatacatatacaattatgagttccacgaaagttgatatagataagtttgatggttcaggtgattatcgtatttgaaggaagaagattagggctctattggctcaacacaagctcttgaaggttcttaaagatcctgtggactggttagctaatacaaccaaagatcagcaagaagagttgctggaaacagcaactggtttaatcatcttcaacctctctgatgctataatcagattggttgacaaggaagatacacctaccaagatttggaacaagttggaagagcaatttcaaaagaaatcattgatcaacaagattgttggaaattattttaccacgatcttagatcaactcacaagtatgttatttaacatcctaaatatgaactttctaaaacgataataaacacatataaagttaagaatacctcacattggttacagcagaataatgtgtctccttccactcagat

SEQ ID NO: 236268 - DNA, 992 bp, Cannabis indica
gtttcccctaagatatctcggggctcctatgagaccaataaagtaaaaaacggaggactgtgaggttcttctcaagagaatcaaaaaccaggttcacacttgggctagtaggcacctctcttatgcagggagatgtcaactaatcaactagttctcttggggctgaggaattattggatgaatattttcttgctgtctcaaagcacaatcaaggaaatagacaagctttgtaagtggtttttatgggataacaatggtacaagaaataagttctatcttacctcttggaccaatgtttgcttaccgaaggagcaaggtgggcttggttttggtgaaggtgctaagtggaataagactatgattgaaaagtatgtttgggcaatcaatcatcatccgaaagctctttgggttcgatatattaaccatgtgtacttgaaagggcaaagcttctggttgtatcaactaaaaagtgacactagttggtactgaaaaaaattatgcaatattagatcgatgttttctcagcaggaagtggaggatgcaacttgtaaatgtaaattttgtgtcaacaagttataaaagggtctttgtcatggtgagcaatttgaacaccaaagctttgtttggaatcggtttgctattccaaagcacagatttatttgttggcaggcagtgaaggatagtttgctcacccgggatcatctttcttggattctgcacattgacaacaaactttgtccagtgtgctgtagtgttgatgagagtctagctcatctgctgttctcctacaacttttctgagcaggttttgaagggtattaatggctggataggggctgattggtcgaatcaggtggaaaactggcagctgtggactatgcagctaggaaacaagcggaaaaacttggttgcttcaatgattttttcagcaacaattcattatgtgtggcaaaataaaaacacttgtgtgttcaatgatttttcttatagtgt

SEQ ID NO: 236269 - DNA, 676 bp, Cannabis indica
agtagtatttgttgaaaacaaactttttcttatcttaatgaccatgggattgtccacccctaatcactttagaatagctatcaaacatgtaaacctctgttaacagttttagcttttattaagttcatgatcaagacatccgtgaatctagtaatggtttaaactaagtacacatccattgcatcatttttgaaattttcctatcactagggtattcccttagaaggacttaggcagctgctagtaactaatcataaaccttatactatcatcaatatccaatttgatttctaggaaggtaagtttggatacaattaaaagtaaaacttaataatctttgaactacacaaccaaatatttctccacccctatcagttcgtaagatttttaaccacttacctttatctttttcaaaaattgcaagaaattcatgaaatttatcaaacatttcaaatttctttgcataaggtaaagtctagagtgatcgttgttatatccaaaactcgactgccatctcaatggaggacacgtgtcaagataaaatgaatatgaatcgatgcaatcgctttttatggaatacatgattaattacgtaagtattagagtatatttgtaacttgctgattgtaaggtcttaggcgaggaatcaatatacaaactgacacttagtatatta

SEQ ID NO: 236270 - DNA, 776 bp, Cannabis indica
aaaaacttctaattactcatacttaatactgtcatatagctagaataactctagtcatgaaattggaaaagaaaaaaaatcatcaagtgcttttttttcttcaatttagtaaaatcaataaacactcatgatgactgacccagaacactctcaatcaaacacaaactaattcttcttacttttttaattaagaagaagaagaagaagaaaaacctaatttcccttcatcaaacacagtgtgttagcctcgaaaagaatctgatttattccaaatcacccaacaaaaggaaaaaagccacttgggttttcgaattgagattatcttgaacttttcgaaccccacaaaaataaaacttgaggattgcgaagaagaagaaaggaagagttgatttggattgacctgatggggaagaaaggaaggggctggtcgtctttggagctggaaggccttgaattggggtctgagtaatgagacccacttccataacgggaagttattggttaaaacgacgccgtttctggaggaagaggtgaccggcgacggaggaggggaagtgaggggaagtgagagcaagcaagcttggcttggttgattgattgctttgggtattgggaaataaatgaaactcttttaggaaatagctaaccaatacttattaattaattaggtttattgttttaaaatattaattacttttatttggaaacctaattaatttaaggctaattagattttttattctcgaattttaacatatactaaattatgctcttaa

SEQ ID NO: 236271 - DNA, 825 bp, Cannabis indica
tttgacgatgcgttggtgatagtgccttgaatttttttttacgcaaaattaacatctaaaaaaaataatatttaatgatgcatttgcaataatttaggatgaagtttgataaaagctttggtgagaacttttgattgagatgtcatttttgcctatatttttttttaaaaattataattgttacaagatcaatgtaattaatatatatgatacgtattacaaatttacaataaagtttttccatgtgtagtgtatgagtccaaactgagtgttttttattattcaagtctcaaacttcattattgttccacagtttataaattaaaattttgtgttctacgtactctaaatttgtggcaaattagatttagtaaagggtgccgaaagaattttataaggggtgtttttagaaaaagtgaaaaaatgggtgccaataaaatcacataaaaataagggtaattatatttgtaccccaaataattataagtacacccaatgtttaagttgaccccatttaataaattaaaatattattttttgataaaaacaccccatctatttacaattataggctttgaatcaaaagtacactctcatgctttgaatttggtttcaaagtgaatagtgattggcaagattattctgctcattttaatcttgtttctcggattcactcgctcttttccaacttccctgatgcttctttgcaatatctccctcgccagtataatatggaagcccatgcacttgcaaaagaagccctcaggtcgagagaagataactagaggggtctgttttgtttcctcttttgctgcttgcggtttt

SEQ ID NO: 236272 - DNA, 857 bp, Cannabis indica
ttgccttctgtagctacagaaaaactgtttcagtacctgttgacttcaattctagccaacaatagtgagtcaagataaaataagcaatagaaagcaaaaataataaagtaaaaataataccaaattttctagaggttcgaccctgttagaatggtaatagccaactctcctttaagttgtattgatttgagagtaagaatgaagtgttctttctctccaaagctcttacaattaatctctaagtaattctctctcgtagattgcttttctctctttagtgttcttctaaactcaatttcttgtcccctcaatagtgagattatgccactatttataggagcttattacatgaagagtggtttcccttaatctataataaataaaataggaaactacattaattctataataacaaaccaaaaaaaggaaaactaaggtgtattgcctttatacaaatataggaattatcttcgtgtcttagaaacgacgagacttatctctgaaattgccaactcacatattctgtttggtgcatgtgggttgatcacgagattgtacttttgtgggatatctcttgattactctactcaaacatcttgctatatgctgatgatagacatttatatcaacctttgtgtgatgctagaagtactccttctgcccaggtaggaaaatgtaagacatgtcatccagctcattgccacatcatggtgaaaaaagtaggataacattttctccccaagtctgtgcgggaccttcctcgttacacatggacttcactcgattaggagtcttattctgatggataacgcatgtccttgatggtcggtgctaatctgacgtgatttcgattgagg

SEQ ID NO: 236273 - DNA, 798 bp, Cannabis indica
tattatatgacaattcattagtttcgaaaataaccttaaggttattcaaatgtattttaatataagatagcataatatacttaaaaatagctaattggttgttaagatgtttataaataagtttttgaggtaaccaaattgtatctcaaattatataatttaacaataaatttttttacgtaaaagtaactaattagtttcttatcaacataataagtaaccaaaaggttatttttgaaaactcaggaaaatagtaagaaaacgaaatttggaattaattttgttaaaggcatattattttgaaattaaggtatttattaatgatgttgtaaaggtattactataattgagatttattaaaatatttttgtaaataatttatattttaagtataatattgaaaaaattcttaaaataggaatttattgttttcatggccaaataatttatcatatgcatatatgcacaatcaaaacacgtgcatcatgaggccattcgatcgagcacacagtgaaaaatgaacctttttattagctacaaaattctaaatggatggaaccagctagagatagccattaatatattataataaaataatcaggactagtatagttcaaatatgatctatctcttcatttaaatattaaagccagccacttgagaacctataaatatatataatattatatctattctatataaagtatacctatataactgaaattcttggtttttgagaattttatgggtgacttttaatttttatttaataaaataataaaatattatttatctata

SEQ ID NO: 236274 - DNA, 841 bp, Cannabis indica
gagttgctaataagaacaaattttgtccgtacaaacacaattccaatagcaaatgtccatgatctaaatttaatttaattcacatttctaacatgatgcaagcctctgtgaaatataccattggaaatatggaaaaggtaaaaaacaatcctaaattctccacattttagtaatatggaaagtaggagaagaaaattttataatgaggacatactttcaagatcctgaacaagagccttcaactgcccacattcttgttctcggcgattcctttcatctgcatatgcaatagatagtaaaagatcagctaataaatatcttctgcgctctggcttacccaatggagaagaaaggtgctaaaagaaaaggctgtgaagttcttctctttcctattaagacaaattaggaacatgaggtaaccatatgatgtacggatggtgcagcatcctatcagaaaatattgccattgagaaaaaggagaaattggaattttcttttcttttcattaactctttaattctcttgaagtctaaaacttcctaagtgttgatgaagtgtgaagggtattacaatccgttttcccattagataatagtgtataagaaaaacaccataccttctaaagaaacaatacgttcttgttgcatacttatttgatcaattagtaaccgcaattgatttgtacagtggttttcagattcaacctgatagaatcaaaacatggggaatttgaatttgatcatggtacagcataaaaatagcctaataaacaactaccaaagaagttataagaagtaaaaatcctaggcagcaatagtggtgattataaagaattaagtat

SEQ ID NO: 236275 - DNA, 943 bp, Cannabis indica
aaagattattccgacgaagattgaaattttatcaatcgtcaagcttgtggcacaatccgactgtgtttgggaaaagatcggaattactttgtcatgtttgaaagtgttactgcagttctttggaaaaaaataaagaggacaagtacatgacaaagagtatgtttccagttcaagaaaggtacccctatgattgaatatttagataattttaataaaattttggtagatttacaaaatttagatgtttaaattagtgatgaagataaaactttgttgttactaaattcattacctgaaagctatgaacatttaaccacaactttgttatatggtaaggatgagattaattttatagatatttctaatgctttggtaaatattgagtatctaaagaaggatcaacatgatcacagagactcaatattagatgcattggatgtgactagaggttgatcgaacaacaagaaattaggtggatcgaataatagagggaaatccagatcaaagtctagaggagaatcatcaagaagaaatcttacaaaagacgagtgtgcctattatcatccgaaagggtactggaagaaagactgtccagacaaggacaagtcaaatgcaaatgtcgcatagaaggtcgatatgcttacaaaagtggttacatggatcaagtttcaacactgcttgaacttgatcaacatctctcagacttagagcgcctagggcgcatgtggaggcaacgcttttatttttagttttttttgccaaggtggagattgttgggtttgactcaaaagtcaacttgtcttggagttgcaaaaatatggttcaactttcaagaattttgggacttgctatttgccgcatttatcaagaagcatgctctctcatttattacatttggttggaggataagctacctcatttattacatatggttggtagttga

SEQ ID NO: 236276 - DNA, 1068 bp, Cannabis indica
ggacctaaataaatataaactagtatttttataatgtgcagtgtggtacggtttgaatcgcatattaacaattcaaaactgcaaactgcaccacaccgtgcggcttaggaaaaattcaaaccgtgaccgcaccgcaaagaatttcaaattgcatttttttgcggtttgagcagtttgatggacacccttaaacaagggcacaaggaaagatcactttcctcacccattcattgatcagatgttggatagattggcaagacaagattattactatttttagatggctattctgggtaacataaaatagcttttgcacctaaggatcaagagaagacaacgtttactttcccatatggcacttttgctttctgaagaatgccatgtgggttgtgtaacactcttgcaacattccaatggtctatgattgttgtcttctctaatttgattgtgaatttcatcgaggtctttatggatgatttctcattgtttgggtcttcgtttgatagttgtttgagtaacatagagctggttttgattagatatgaagaatctaattagggtctcaattggagaagtaccattttatggtgaaggaggggatagtattggggcataaaatctcgaaagaaggcaatgaggttgataaagacaaggtgtctacaattgaaaacttagcccctccggtttcagtaaaaggagtctgaagttttctgggtcatggtggcttctaccgaaggtttatcaaagacttctccaagattgcaaaacctttgtccaatttgcttgttaatggagtgccttttgagtttgggaaggattgcttggagtcttttcatagtcccaaggagaaactaatttcagcacctattgtcactacaccaaattgggagttgtcattcgataatatgtgtgatgtaagtgattataccattggagctgtgttgcgagaacgtgctgacaaggttaaaccttgaatgatgcgcagttgaattatgccactactgagaaggcgatgttggctattgtgtttgcatgttataagtttcggccttacttgattgggaacaa

SEQ ID NO: 236277 - DNA, 1048 bp, Cannabis indica
atgggttctggacctccggtgcttgttccctttgatccttccgcctatctttcttctaactggttccgtccctcggacagctatctcggggatgacgcagccagtattaagattcggaactttgctagggccgaattagaaagtcagggtaggactaggttgattgctttttaagtgtttactgctttcacagatattctaacacttaactcttttctgttgttgcagcagctaatcccatggaggcgatcttggccacccttaccggagctcacagtcccgatgcttcccttcctccaacttcttcccagatggtcacccccatgaaggcttcttcaagtgcccctccagacactattgacttagtggatgaggaggaggtacttcctgaagaagctaaagaaggtcaagaagagcaatgggctcttcctggggaagttgaagaaagtgaagaagagcaagaggttgctctgctctgcaagtgcaaaggcaagatgggggctgagcaaacacccaaatggccgcggagagtggacattccggccctgagctgtgattccgggatccctcccgaggtggagaagtttgcagtgcctcctaacattgtgctgactccggttcccggagatgaggcgaggcaggggcttcggatagccaagtacaattatgccatggacgagtactcccgggggcatgctgaggtggaggctttgaggaggattttgtgagaggagatgcaaaattcccttaacgatcaaaactaccagaacccgtgggatctaaacctggaccccatgatggactggttcaatcgtttcctcaggcctaccatggctcctttttccgcgaagatgaccggcgagtacgtctcccagctaactcgttgtgcgcctaagcggttcgctgcttgtggatccttgaactccgtctttcaagttcaggatctcagccttcctcctcgaattgactaggccgttccgaatacaacccatatttttcttatctctttttttttatttacagctaattttcttttatttaagacaat

SEQ ID NO: 236278 - DNA, 795 bp, Cannabis indica
acacatgcaacaaattggatagttggatataggacttatttaatttaaattcattaaataattaaattattttcaaaaaatctaaattaatattttcaaaaataataaaattaaattaaataattaatagcaaaattaaacctataaattagaaaaattaggttttcaacaaagctaaatatctactcaaaagatgccagcgaacttttcaaaatttaagttattttaaatagaaaataaaataaaatatctaacaaaataaaatgataaataaatattatttatataattttataagttgatttaaataaaataacaaaattttgagagttgacaaaatattcgttggatttttaaaattttctagattaaaataatcttattttaaatttcaaataaggtcattttataaaattagttaaacaatataaaatataaaatatctcaccttaaatttaaaaataagataaaataatcaaattttaaaataaagataaccgattgagaaaaatatcagattttatccttttcaagttcaaaatctactaatataaaaaattattaaaaaaaaattaattaattttattctaattactatatttcagatttgaaagataaaaatcaaaatacaaaattacacaaaaaattcgaaattaattccataaaaagcatgaaaaaaaatgaaaaaatcgaaaaaaattgcatttggtgtagatggtatgcactgcataccatccacgcacgcaggagggatacaccgccaggatttcacgcacacacatctgattgtttttt

SEQ ID NO: 236279 - DNA, 589 bp, Cannabis indica
aaatacattcaagtataaatctctgaatatatgagatttaacattgctttcaaggagaccaactaaacccgcattctttagaaaaacctctttacttcttgttgttttgagcgactactgatcccctaaaattccatgtgatgattctatccattaggggctagaggatctccccgttcgcccttatttgcccctaaatcacatagaacttgaccaactttaatcttcttatcatttaagtcgttcagcacttggaaagaatttttagtaggagtcggtaaccctattttatgcctatctaaattaaaatttgtttgagagggtcctagtctaagagaaaactccttacaccctgctcgagtgttctgagttgcttttacttcaactgtatgttttgacatttgtagcttttcgacaacctcattagtaatctcaactatttttccttgagtcgtcttaggcatccaaaaaagtttaggcttatcattcctattacgaattctacaatgtttgggaagtcttgatccatctcaaaaccaattagcaatgagaggagtagcccattcatcttatatatcacattttattt

SEQ ID NO: 236280 - DNA, 789 bp, Cannabis indica
aaatcaaataaaaaatattgcaatatcatagttaatatcaagaacacgtatatttaatttactctaccgcttagaagacataacagtatatctgttgtagcaagttcattcaaccccttagcttgagcactcaactattgtgcaatatacataactgcaccactaacaaccctttcagctgcagagaatttgttattacaattaggtattagtttatgttatttttgagtcatatttttaagtatttttaatgagtttagttttatttagtgttattttacgctctattgagtgaataaagaagaaagcgaataagttgaagaaaaatgcttgaaaatcaaagatttaattgtaattttattgctagcctactaaaagtggagtcattagaatatttaagaagttttgatacaattgaagccattgaagttcaagaattcaagaagttagaatagcgtcatgagataaaaattcaatgccaatgcactgatttgaaaaagatagacatcgacattgagttttagaggcaaaaggtgtgttaaggtattggtgtgaaccatatcgaagtattaggagagagaaagtttactgcccaaaagtgcctactgcctacccatgcctcaacatggtccagaccatgtcgtagcgcactcccaaaaattcatctttttagcatttcataaattagacagggttgtggtgtgggttttaccatgacgtggcccgcatgcttaaaaattgactcgattagggtttttaaaccctattttgaagattctaaggggattt

SEQ ID NO: 236281 - DNA, 620 bp, Cannabis indica
ctttgttattctttcttagatttttgataatttctgtgctgatcctatcatgaaaataggctaattatcgttaccaaaaatttgcgttaacagtttggtactttcattgagagcctacgtgagaaaagctcaaaaaaaatccctcctaaccaaaaggaaaatatttctccatggatgataatggagaaaacgataataatcaacctgaagagactactcactgctggaaaagagccggcatgctcacggaggtctcccgattcacggacaacaagatctacacagtcaacacgttcgaggagaagccaacgtgaagatgaccaaaacccaaaaactgggaatgaggaaactaatactgaagctggtggttatgtacatagggaggaggatgcctatgatgccaatagatgcgtgccattggtggagttggaaaatgttcaactcaagcaacgtctagggaggcaaaccaacgaaacactgagttggaacgggaggcagccgcagccaaggcggctcaagaagacaacactcaaaaccaacctgatcctggagtaaggaggccacgaggcaggcctcgctgctcgaactaggacgcaagagatagctcagggggaccctca

SEQ ID NO: 236282 - DNA, 644 bp, Cannabis indica
tacaatagtcacaaacttgagttcagatacgagcaatgcatatttcttggttattcttctcatcacaaaggatacttatgtgaaaattccaagggcagactttatattgcacaaaatgtggtcttcaatgaaggttgcttccctgccttctcatctcaggtacactctacaacttcttcttctgctgcttctgtgtttcctactatccattctacttctaatattatttctggtgctcctgctgttttcttaccaactcccatggcctccaccaatcccactatacacacacaagcaacaatacccgatccccaatccatacccttaaatccctaccctgtatcctcatttctgcaccatgtcaatcccaaccagcagcctgaaccaaactagcaacaacaactgaacacacaccatgctatacacaataaccagcaaccagaaataccacaccagcagccaatacacaaaaaccagcaaccagaaacaccacacccggaacctatacacaataatcagcaccctactcacccaaaccagccaccagaaacacaccagcaggcagttccatcataccagcaaccttagaatccagttcagccttctgatgtctctatcctccagcctagtggaccaacacatga

SEQ ID NO: 236283 - DNA, 676 bp, Cannabis indica
ttactcatattattatcaaaaatacatcaacggtatataaatttgaaaattcaatataatttaagatttaattaccactaaataaattacaaccgtacgcgaagcgcgtttttttttccaattagaaaatagataaataggttctaaataagtagaaaaaataagaaaatagataaacatgttttaagccattttagggtgtcacgtcaccatcttatacttctctttcatatagatagatagatagatttgtgtaattaagtattaaatcacatataaattagaaaaataatttttaaaaaatattactaactaatcgtaaaacgctattcatagaaagtgttaaataccacttgtacacactaataatgttcttttaataaatatgtcatggaaaagttgattacacaaatactggatcatgccatttactgaaaaaatttgattgaaaagctaatgtgtcatttggtaatacttttgttttctaattttttaagagaaatttgcggcataaatacctattttgttcattttgttgctaataagtactcaatttttaaaaattgcggcattaatactaaaaatctcactttttaaaggggtaagttgaaaaatgcctcttctattaatcaattaaccaaatttgcctctaattttatatttatttgaaacatac

SEQ ID NO: 236284 - DNA, 633 bp, Cannabis indica
gtattattgttatttttttatctaaatttgttgtattatttttgataagatatattttgttgtttgagttttaagatgtatattgttatttttgatttgtttttcttagaaattgttgtttttggatttaataatgtaaatgttattgtttagatctcatatttagttcagagtacttcgtggctagatctaaaagttttttttggtggtattggttctaaaccgatcgaaactttaagtgtcagtttagaaccaacactaattctctagaatgtcgagttagaattggcaccaaacaatatattttgttatcttaataaaataagtataagtatcagtttaaaaccgacgccaaacatacattttgtagtagtgctccaacaaaaggcaaccttaattttgaatatgatatgcatccctctcgggaacaaataatacttcatccttaaccttacacaactcaacaacaaaataaaattattattattattatttgatgataagattaattacaattaaaaattggttaatcatatatagtcgtatatatcaagaatatataaatatatacatatataaacatgccgggaagtatgtaacgatcccatatctaacaaacaacacattgtgtgt

SEQ ID NO: 236285 - DNA, 1196 bp, Cannabis indica
ttaatcttcatctattctttttaattttctgaattattttctttaaattgcaaaaagtattattttaccagatagaatcataagtatagtttagtagtacttaatctaatttcttgtggttcgatctcacttgcgtgagatactacttgattgcgtatacttgcgtagtaaccataatttttgtaatagtccttacttgctagatctcaaaaccaggttttgagatagagtcctcaacttcccccttcgatgtgagtagtaggtccctttcctttacaaggtctcgaggcctggtgtcgttaaagtgaggggagaccttggtggaggagttttgttggttctctcagtaatttgtggttgttccacatcgggtggagggcccattggttggcgcactcgagtttgagcctttttggactcttgctcaaagtttgattctctctggaggagactcaacacctattgtttgcttagtacttgcacgggtaccaggcatggcaatagcattacgtgcattaagggttttccccttgtgtgcttattcccacgtggtcagatggtggctagggaatctctccatccaacttggaaagaccccttcgagggtagtcccgtgactggagtgataacctgctctgattcgttgagataggttagccctttgttgttcctgctcaactcgttgattcttaatattttgccagttttccatgaaccagctttcaaactgtttgtgttgtttgtcgagtcttgtagttgttgctgcaggtaagctgcggtttggctaagttgttcaacccgaggatcgacctcctcgaggtcttctagttccacacgtggttccccatgtagaatttgttcattagttttagtactaagagcaggttgtagccttgggggatgagctacggagctggttttgaggccttcacctggcatctgagatgcaggtgtagtcccatcaccaatttcagtgactacgtgcccccagtttgttggccagttgttgtggatcttctttcaacacttgaggagcatgttgcaaccatcttgtgggtgattctttgacttgtggctctcaataaaagtccaaaaatattgacacacaaatctggacacagatctctagcaaaaacctcactagtttgccgaatttttgtgctggcaaaagttggtattgcgctggtaaaatagaa

SEQ ID NO: 236286 - DNA, 1274 bp, Cannabis indica
tacatttgtcggagaagactgtcgcctcatggttgccctagttttcccttacccttacctgcaccataaagtaccggtgagtcacaaagactcagcaagaaagtaaacaatggaagtatttaacaattagaataataagacaagccatatttgttacttcataaagtaaccatttttattgttgcccaataagataaccttaatgatcgaacccgacatccacatgtctcattacctaataaggtaaagtcgataccctattctgacatctatatatctcattgcctaataaggtaaagtcaatgtcataacctgacatctaaatatctcattgtctaataagacaaagctgatgccctaacctgacatctaaatatctcattgcctaataagtaaaatcttatgccctaacccggtatccatatatctctgtcattgtctaataagacaatcgacaagtatgaaacctaacagcagtttcacttgatatcatgaatttaatccactcaatgataatcatcgttccattacctcgatcatactcgagtcataatgataataatcgtatcttaacatgctatgtggtactggtgtacttctcttaccttgaattttcgattcaagtgtatcgatcaacctgaatggggaaagatcaacgatccttggccctatgtcataatattaaaaaaaaaatgattaatcacttgacctaacccgttataggtccttaattcatcattgtaagttcccctataggtccctaggttaccaatagcctaaatatcgagaaaacatgaaaaacaagagttctaaacatcaccaaaatggtaagccatttttggggtttcttggcggggaaaattgtataccgtttttccaaaagtattctactgtttttttataggaaacgtgaaatcccgagtttcaacttctccaaaccccaccaaaagctaatcaatcgattctaaacttcacagaacaatcatacaacaatctctacgtgacagtaatcaaaatatgccctaaatcaaaacttgccatgagagctccagctttgagcttaaaaactcaaacttgactctcacctcaaagcagcagcaaaactatcaaatgaacatcaaaatcaatcccaaaacaccccaaaaacaaaaccataagcttacttgtaccccaaccactacaaaaccaaaactcaactttcaaaacctaagcttttcaaacaaaagagaaccaaactcttacctcaagctccctcttcaaggtagcttactcct

SEQ ID NO: 236287 - DNA, 1239 bp, Cannabis indica
atttctagtctaacttcgtccccacctatcatgcttttcagtaacaagagccccagaagaagaagaagattcaccttgtgttttccttctggcctcttcattaagcaaactatctttgaccaaattcatagtcaaagtcccttctggcgtggaattagaaactgttattaccaacatttcccaactatcaggtaaataactgaggagtaatgatgcttgcatctcatcatccatattcatcttcatggcaactaactggttagcaagtctcttaaattgactcgtatgctcaaccatactactaccatccttgtacttcaaatttacaagtcttctaagtagaaaatttttattaccaatcgttcttttggcaaagagattttctagctttttctaaacaacattagctctggtttcattagagatatgctcatgaagatttatatccatacattgtctaatataggttggcttttctatgttgaacttcccattccttatcatctaacttagacggcttctcactacctttaataggtttgtacaaatatttacattaaagcaaatcttccatcaattacttccaagcggaatagtttaataagttcaatttcactattctatctgacttatcaattttcaacacacaaaaatccaacaccaatcaaccttggctctgataccacttgttggaaaaacctattgtaattaatcaaaatattttccttctttgtatgtcaaaaataggatacttattaaacaccacaataagtaatatcaaccaaagcaccacaaacaatataaatacacaaatcaagcataaaagtgagacaccaagatttttatgtagaaacccaatgcaggaaaaaatcacgggaccgtagtccgcttaaatcatccactatcaccaaagttcaataatgagattacaaagttcttctctagtaaaactagaggctcacaaaacatcaagattaaacaatcttggatcactaatacaatcatcatcatcgtcatctcaaaaagataaatacacgaagaaaaagtctgggtctcaccaagtggatattgtagaagagcaccttagagaggacaatcgccaaatcggaacagtaggtttgaagagcatcttgcaaagattcaccaccaaaaatttgagctaaaatggatgagaatcaaccacttaatcttcaatacaaagtggcaaaacatctttctctctctagttttctttctctt

SEQ ID NO: 236288 - DNA, 695 bp, Cannabis indica
cattattattttcatatcaataagttaattaaccaataaaaattttataattttttagtaaggaatgcgaaataaaatttcaaatcataaattttgaaactgtaaatcaaaattcccgttttctttcctcagaatttttgaaccaagaatcttttattgtttctatacattcttcccacgtcatctagattaatctagaataatcttcatgtaaattctaagaagcttctagagtcccttaagcttgataactcagctcaacttgtaaaaccaagcaaataataaaaaagtacattggtaatatttactcacaacaaaaacttcaatataatctatctacctatttaaatggatataataatcatacatgaagaaccctcctcctacgggtgcacatgcctttgttgagttagaggtgttttaatgaaccatcgaataattgcggttcgaagaaactataaaccctttaattttatacaacccaaaacctactatgtaggataatttaagagtggattaggttcattaagttgagatgactattttagattttaatatttaatgataaaataacttaacatagtgtatacacgaaaaaacaatacatgtaaatatataggtgtgtacgtatgtgagtatgtaaatatagcggtagtatcattgtgtagatagcaaaattaataatagtaattaat

SEQ ID NO: 236289 - DNA, 1213 bp, Cannabis indica
caattctttacatataaaagagaaaaaagaaaaaagaaaatcacttactattttatattaacagacaaacttctttattggtcatactaaaatcaacgagtcaccgatcactataacaaaattacttacttttttggataccacgattaatttatctttagtaaacaaagagatacatatttagagaaacattaataagaggggtgactagcgctaactaaattgttgtaataaaatatagaattctgcacaatttaatttaattactattatacaatatcattaaccattaataaaagtcacactatcttatattcctagggtttctatctctttctgagaaaggaatacgttaggttaagtctctatgttgaaagggtatagttttcattagtgcggctatgggaaggacaacgacattctcgacgtcaacatctcctccacgacaacaacaacatctcgacaaatttggtcctctcgatgagggactattctcaaagttggctggggcagttgctctagtttagtgaggtgagtggctagccagagctctggttggtagagggtgcaaaaggaggcgcgatcaatggtgcgattagtggtgcgagcggtggtgcggtcagatgagtgattggagatctaattggagggacgaatggagttaataggtgcaattggatgtccgattggaggggcgtggcattaatttctagattttggggttgattgccttgctctgggtagtgttttgttgggttttgattgtgtttctattggaaaagtggtgtttggttaggtacgagttgtttggctgagtctttgtttggatctggttgtgatagctgattggctctaggtgggtgggggtctgtttggctgttggttatgggtgttgacgggttgcttatgtggcaatttatggtaatggtgtgtgtaggattgtaggcggtggtgaataagggtgtgggtttgacttgggtgtgttgcaattgtgcaaattttggccaattggggctgagcggggttaggtgtttggtgagtgtgataagggattgtagccaagtatggatttggagttagtgaccaaattgatagaagtattacatttgtatgaaactaatggtcttgtggtcaaattgaataaggatagtcttgaagataggagaaggagattggaggtgtgtttggtggggaaggtcattggtcctaagcc

SEQ ID NO: 236290 - DNA, 1214 bp, Cannabis indica
cactgccatgataatcaacaatgtggtctattttacactaaggaaatgtgttatgtcttttccaagatatcgacaagatagaattgtattagatatatggtacacatatcaaactggactaatattgaaagaataatggatcttaccattatacctatttttattcaatatcacttagtttatcatagatcaattcaatatttatcctaaaattttaagctttaagctaattgtgttattcaagttctttaacttgttcgttgctaacttaccttagggtctagtccatacttacatcttgagaactcggtagcataattgagtgggagtattgattatagatatgtaatctatagcttttatgttataagtgaaatgatagcactttcctttgagctaagtttaagtatttgatgatagagcgctcattttagtgattatattagttcactgaaatatcattaattcaactaaatttcttaaggataaaacataattaaatggtacaccggtaattttagtccccttttaattatagactgtctatagaggatcattgatcgatatgatagaaacaatggataatattataacgtatctatatttgatatatagagagtgttttgtgaaattaagagtgcaatttcaagtctatagtggagtcatgagtaataataagttagagaatttatttgttaaatttcggatatattttattgggagcttaaatttcatcggcccatggtccccgcagtaattaggataatacttaatagtatattacaataattgattatttaatcaattaatactcacattactgttttgtcaattctgagaatattccgcctactttggtaaaaataaagaagaaaaaaaataataaaaattttattattaattagatattttgctctcagaaattaataataagtatttatataatattttatgaaaaataattatcttgatataattattttatataaactattatttaatttgcaaggaataaattaattattgtataaataaaaaggaaagttttatttaagtctcttggactttgtagataatgaagagcacaaaaccctagcccataagtattagactatttttagcctaagtttcgagtcacttttatagttatttttggaataaaattacacttgttttctttagtttcagatttcaacacttggaatgtataaatt

SEQ ID NO: 236291 - DNA, 1144 bp, Cannabis indica
gttatttgtatgttatatgttattctttttttaccgagtctgtcgactcacagttctattgctatgtgtaggtaagggcaaagctaaagttgaggagtcgtgagatcgagcaggtgaagattatacatgttggggcagttaggcctggagcgtacgatctttgagacattagggcttttgctgtttagtcggtaggcgacaaatcttttgtatttaaatagtaaacttttgtaactgtattttgtaaatatgatcccggaattttataaatgaaatatattattttttaaataattaagcaaaattttaattatttacgatttcctataatctcgttgattagcaacaagttgcacagtacgttaaaaagtacggtaacacgcctataatagttagggtgttacataaggcattggaaataacacggatcgacaacacgaaaaattcaggatacttgtttctgatccggctaaccggttacacagggcatgtgaaactggttaactgatttacactaggtaacccaaacaattaaaaattatgcccagatcttgtccaaacctcaccaaaacctccagaacacctataataacctcaaacaatatattccaagaaagaatccagaattacacatagaattcaaatatgccattaatgacttaagtttgagttttcaaactcaaacttgatcattccccataaaagtcaacccaaccagctgctaaaactcaattgtaactcaaatagaagctataaactgaaatacaaacaaatctaaccttaacagccagaaatttcaaattacaatattaaaccaagttatagcttaaataacaatgagatgagaactctagagtttaccttgatgaagtactcccacaaactgttgaaccacactcaaaaattagcaggaattaatcagattaaggaagaagaaccctaggttcttggttgcccttcttgattcaaaagagagagagagagagaatggagaaatgagtttattattttctttttgatttttttcttattttctttcaaacaaagctatcatcaattcggctgaaataaaaaaatatgccagctaccatcactagggagagccacctaacccccttaacaaaattaccaaaataccctttta

SEQ ID NO: 236292 - DNA, 2461 bp, Cannabis indica
tatatatttaggtgtccataaaagttaataccacatataattttacataaaaatattgcataaaatataatttaatataatactatacaatacaatacggtgtaatacggcgtaccaaggaacacaaaaggaataacccaagaggggatagtccaaaggttcagacatttgttttgcttccacaaggtctgaggttcaagtccctactgggtacctatatagcaattgcaatagtttcctggtcatagggttaggcggggatcctagtttcaaaagaaaaaaaaaactaaaggaatacatggttcagcttgtcttcagccaacttacattcacgggaaaacttctctctgaatctttattgctcgtttagaaattgtacacacaagttcacttctatccgaatgaataaggaaactatttgtaggcataggtcctgtacttgaactgtaactattttaacggttttaagaggctttatagcatagccaatggtaatactaataaatatgataagaggtaatgtattaacagtcaatatatcacaactctccaccctgactataatgcatctaactgaaaattttcaataagagagaagactccgtgatcagtgatatctgtagcaagtttaggaagtgcctaaactttgctgttagtagagatttggtgagcatgcctgattgatttcctcttgttgaaactttagaaagctacactcttccttctgagatagtgtctcgaatgaaatgtagtctaacatacacgtgtttagtccttttgtggaagaattgattcttacttagatgcaaagcactttgactataacataaaatagtcacgaagtgttaattcaaaccaagctcccttgaaatccctttcagccacagtgcttctttaagcagacaatgtattctgcttctgttgtggatagtgtgcaacaatggattgtatattagccttccagcttatagtgcagccattaggttgaaaaatatagcctgttttggatatcctcaaatctatcccctgcatagtctgaatttacgtatcccaccacctctggtttatcagttgtagcaccatagactaatccatggttagcggttacttggttcagccaagaaaattctgggctgccaaggtccttcatctcaaattcccttttcaacaacttcttactcttgtcaatttcacatagatgtttgcttgcaataagcatgtcatagatatacgaaagcctttccattcctaacatacgcacaactgttataataagcactctttttgaaatcagatttggttacaaaatcatcaaaccgctccactgtctagttgattgcttaagccataccaagatcttttcaatcgacaaacttgttcttcgattccttccacttagtttagagctaatggatgaacaatcaatatatcagtttaaaactatgatagccaaatctccaactcagttctaaaaagaatcctagattggtatctttatttgatattgagcgaaattctgtagaattggttccaagctattcaagatgcttggtgtctccctgagttctagacttcatttttaacaaaaatcttccttacagctgaactagacttatatttatagtattaggactaagacaaatatgacccctcagccactaagacacctcagcagtattagacctaggctgcctggtattataaaaatttgaatttggagaactggaactgttttgagataaggttcacacgtatatttatttctttgagattcaagtcagaatttgttttccttttttcaatttctgagtaaagtctctgaaaattccctttgatatttctggtgcagatctatgcagtgggatcatcctctgacattggcatttatttactagatttctacccagaccacagttctccaagtcatgtggattttaagtgagaacattcttccacttgaatgtgattttcgtggtctaatattacttgtctagagtgaatatattgcatttacctctgtaaaccgataaaagatttcatccattatataaatttgaccccttcatgtttattagctcgaccctagaactcccatacattttcctagatatcatattattctgttttgtatttggataaaagttcatttcgcttgctgtttcaagagagtgagatttttatgactcaactttcttgtagtttttgtcctgttgtaactgttgctgcatgatgttgtagggaggatgaagggaatgcacctggagtcaccaagcaaaaccggtttgttccattgtcggaacctgtcacttcatgtgcagttcatcctcttaatggttccatcatagctggaacaaaggtttgtcggttacagaaattctactgatgttataaactatagaaagcagcttcattgatgtttgtcttaatgataatgactgagatggatgaaatggtttcagta

SEQ ID NO: 236293 - DNA, 1203 bp, Cannabis indica
cattaatattgactcatcactaatatacacataaatttaccatgtatactgtgagtaagctttttaaaattctaataagagatgagtatcgattataagagaaaaaaaatgataatatgcaaaatcaataatcttacattgtaacacgtatactatgagtaagcttttcaaaaatctagtaatagataagtatcggttctaagagagaaaaatgataatatgaaaaattaataatttgacattgtgacacgtatactgtgagtaacctagatgtagataactttcaaaatctagaattttcctttgtagaaaaaagtttactaaatgaatataataaatcacaacaagaaattgataacatgcatcatgaaaattgcgtgcctttctattattttctggtgcaattagggattttatattaaattagggatttttgcatttatatgtatattgataaaagaaaaaagttaaggaattagggattttaaaatcaatgaaatagaaattcatatataaaagcatacttacaattgataaggaagactataattgttggacagtgtggctgcaccatccttactgctgtagaagacacgatttcattcaggtcatccattattggttggtggttgcaggatgttgaagatgaagagattcagaaggcaatggcgagagagaaagcaatagagaagaccattttttttgtttgtttgttcaaatccaaatctaaagcctctgttttgtaatcgtccctgatcaaaatttgggcgaataggaagttgatattttcttatttatattttgaaagagttttaaaaaggaaaattagacttttcaaaggaaagttgcagagaagatgaaaatatcaagagagagaattaaatagaattttaaaagctaataaatatactttaataaaataatacacttaataagaaagtggaaatgggaaatacaaacacgtgcactactatgctgttaattttgactattgaactttttcactttgaaaagcttactatttaatataataaaaacatacattaacaatgtgaagggtatatatgtcaataacattatatacattaacaatgtaaagggtatatatgtcaataacattatcacctgattatgacacttttaaaatagtatgatatatataaatactactttttaaaacaaaatagctaagtgtagttgata

SEQ ID NO: 236294 - DNA, 1212 bp, Cannabis indica
ccaaataagaataataaaaaccttgatcaatttaaataaataaaaaccatttataacttttattttttgaataatgaactctcataaaccatttataacttcattatgaatagaaacccatgaaaaaacttatatggagaacaagtggcgaaatgggtttaggaattaacctctaatccgatctaattgaatattcaaaaataatattcaatcctatcacaattaaatatctaatatttaaaaaagagcataacggtgagggagatcatctacaaagccaagacaactactgtgataattggattggattctgaacaatcaggtcgcaaagctcgatcaaagaattcatggagctagatttgaggttaatcaaagaagaaaaaggtattgtcttgtttttctctactcccatactctaatttaattagatttattttatagttttggctgaccttaataccgagggatttttatcaatctctttccattacgtaattcgccaaaattttctcttgttttgatgttaagatgaaattcaatttgggttcttaatcaatttaataaaaacttagtttgtagaattccagtcatccattttttgtatgacagagtttaaaattttctctataatgtgttaatttcctgtatatatatctagtgtttgtgtggattttcttctttttggacataatttaggggatgttttatttaggacgtatgggtatctttattcagttgattttttgttattaggtttgttgtttaatctttcttaggttttctcttgatttgtattttacttgataattggcttgttggttttatgtgtgttggtgtaattaggtaaatgaccctgatttgatctagtgttaggattgttatggaatttgctggggaaagcgatacattaagttattggaaatgcggaaaggtgggaggggtttagtgccacggatagtggaaattttgtgccttttgtggttaaattgtgcctttgttggggtttctttgtgccattttaggtggcttttctgatatgaaaaagggtttttgttgttgtttaaggtattttgatgtaatttgtatcaagtatctattacaattagggtttttgaccattttaattttcttttcatttattgtggttttgaccttatctagtaggatgatttaatttgtattaccaaattttgtaggatttcaatggaatta

SEQ ID NO: 236295 - DNA, 1094 bp, Cannabis indica
cttgggatactgggaaacccccagccatttcttgaggtacacgactagttgtacatgtgcgacttatactttgcgaggattggctcagttctcgaaatggtgggtctgtcgcattgccttaattctcatgtaacgacatgatcattatgctactgagatacaccaaaccatttcttgagatgtttggttaatcctttatattttcattcatgcgggtgagggcactttgtcattctcgcactttcaccacactgaaaagatcttctatctttcagatgagaaacttgtcagatagctaaatgctcggctttggagatggggctttcactgatgagctggagaagagtgatagcttcatacccacctcgatttttgaggaggaggcccctgctgccacatctcgccagggctcgctatctaatgacgagatatatagaatggttcaggagctcgctgaaccagtgacggttgaaattcgctcactatctactgacgagcccaatattttttagagtatattttattttattttaataatcatttttccatataaatttcgagatacattttattttaaatgtatatatttctaacttttgaaaattagatcaaagttgaaaatgaatttgataattaattttagatcaaattaaatcaagtaatttacattaatgatttaattaaataaatagactaaagtatattatattttaattagaaaataagtaattagtttgcgaaatatctagatggttatttcttaagtagactctttcgtatttttttagatatatttaattaaatataaaattaatatttaatttgattttattcaagacacttaaatatctgatatttttcttatgaaatttaattaaataggaaaattatatttatgttaaaaattaattaatttattgattttagatcaacataaattagaaaaaatttttttagatttattttattttattttaatgtgaaatttccaaaaatgtattactttaaatacattgaatttcgaattcagatatacatatttatagaaattaaatctgagttgaaaaattaattatttaattaattttagacca

SEQ ID NO: 236296 - DNA, 769 bp, Cannabis indica
cttattttctcttagtatttcaaataacacgaaattattaattatactaatattattttgaattatgagtgcagaaagtcatccaatccaattacaactgatcgatttaatagaattggatatctgattataattggatcgaattgaatgtatattttgaaaatctaatcggatcgaatcggttattagatgggacatcctatccaatagataatcgaaccgaactgattcaattatcatctaatggtcatccaattatatttatatgtttttaaaatacatttattatgtttgtagcctttcgatcttgttgtcgaagcttagtagccggtcatggagctcttgccaagtattgccggttcttgcttcaatatgtgtaacaatagagatatattcaattcctaaacctgacaaaacattttatattaaatgtgccataggatatggatctccaactagaatgaggatatttgcccaattcttcttccaacgaagatattccaccattgtcattgctcctttcctagaagttcgaatgagagttcatgtatcattcatttttgcctttgagtgagctccatataagttttccagtgctttccatagctctgtagctgaggttgagcccataacctcggtggctattgtttctgacattgagctgtaaagtcatcccatgagtagttgatcgttgatgatccactcctcatattcagtatcgatttgagcttctcctttggctgtttcagcaaatagaaatctcaggggc

SEQ ID NO: 236297 - DNA, 1178 bp, Cannabis indica
gggacaaacctctataaaaaatcctatggtctattgctttttcattcttatttgtgcacacacgtggcaagcattacatttggacaacctcgccgtcggttgatcattttttgtggtcaaccgtttggtgctttcattgagagcgtggatatcgtgatctgatcaaacatcatggtgaacataagaagaactcctgtctcaccatctgcatagttgggtcttcctcaagacccacagattgcagatccagacacgtgggttccattcacaactagaatccccatgaataccgcaaatgttgcgaatctcgtcaccataataggtgcaacaagtctagccaccatagctagccaacttgacgcaagcatcctagtggatccaagtggcaggcccacacctccagaagcagatccaccattggcacctcccactgaaggaaggacccaggggcgacagcctcctggaacaacaactagacctcaaagccagttctatgctggagagacaggcccgagagtgggcgagcctcacctggaccaaggagaagaccttaagttggccagactcagggaagttataggccgtgcagggctaactgaagaaccacacgctgctaattgcgatgttttttctcagcagagacgtgaattcctaagaaggatggatgaccaggagtacatcctccgattaccaagtaaattagattgtcgcaacttggatgctagtgatctaataagatggttcaatcagagaaccgacagaagaggccatgatctccttagggatccacttcgaggaagactattgccaagttcctaaggaactaggacagatcttcccctgctagagggatgacaaaccttttctcaaaggtcaaatggcaagaacagccagatctcagcaaccaggtgcttggggggccagctagggatttctagctcaacagtaacccttattatgcaaccactagccagccagcaatcagtaggagtacccatggtcatctaaggtacaacacttcctccctaaggggagcgaggtgcacaaagatcggtctttgatcgacgaggaccaagagtgggtggaaacacctaaaatggcaattcgagaagtgaaactgatcactttaggcatctagattcaccaaactccagtaattggtgtgatctacccctaat

SEQ ID NO: 236298 - DNA, 1593 bp, Cannabis indica
acctccggagtccatcctctggtacggagccaccgcgcgccaatgtttttgtaacttttctgtggttgagctctcatgaactcaccatatggttttgaaatctggtctgccgattgatgaaacaaccggttgcaaaatctttcggaatggcctatgatcccacagataaaacaaaaagtcggtaccctttcatatttgaaatgaacccaaaaccagttaccatcttctttagtcaatttcatacgccgtctcaacggtttcgctatatcaatcgtcactctaatgcagagataatctctccaaactccaatgaaatttttcggatccgactctaagaacttacccataatattaccaacaccccagactgtaccttctgtcatacatcctggttcaacatcgtgaatctaaacccaaatatcaaggttgtttaacggaacaacatacggatcaccacccattggcaatcgttgaataatcaattgcattctctcataagtccacaagctgccattgataacacgttgaatatctacttcatgatagaattgaaaaagaaaacgattattctcaagctttttgacaaacattcccattcccggctgccatagtgaagccaatatattttgcatcttgtcaaaatcaatgatcctattagataggaatcgccccactaagcaccacctatcatcaatcccctcttctaccccgtcccctcctacaatcattccttcaaaatcttcctcctccacctgaaagttgtacacattctctctaaccccagacatagcaccacttgaagacgccatcacaagacaagaaaatacccaaacaagactagactatcaaacccatgtcaaaggacaggactgttttatagataaattactattttttaagtaaacgtgtatacataaattttttattaatgtaaagctcgccctagatacaagtggactagactagtgtttaaaaccccatttttaaggttctcatttaaaattagaataaataaaatattttttttttatttgaactatgactattgtagatttttaaccaattaatttttttttttttttttgcaaaaaattttatgaactatacaaatcattgcgaatatcctcctttaattatattatgttcattttttaaaattaatgaatgcatattataaatacattgtatattattatatataaagaaaattagattttaagtttcaacgtgccaaatataaaaatgttcaatcaatactaataaaattccattaaaaaaatacagataatttttttttcttttttcctaaaagtaaaaatcaaatagcattgtatagactaattacataataataaaataaaattagtaagtatataattaaggtgaccattcaatggttacatttttattgtaactatatagttacatttttttttaccttgtaatagcaggttatgaatggtaaaaattttattttttaaaattaattaattatttttaagtaatttaaataaatatttaacaagactttttttaataattaaaatttataaataattttttttatgtatatataaattcatactataatta

SEQ ID NO: 236299 - DNA, 938 bp, Cannabis indica
aactctccctactgccgcccatattggaagccctcaacaatcgaatcatgtcctctatgctagagttatctcttcttgtgacattaatcggaaaacttttcgaatcaaaatgagtggtatttggaaaggccaatttcccgtcaccattacagaccacctttctagtctctttttaatcacttttggttgccttggtgatctaaagaaaatcctatagttggaaccatggcatttccaaaatcatttaattgtcctaactccacctacttccttgcaatctgccaaggcctccatttcaaggtctttcctctcaagctcgtcgccatccttattcctcaccaatacttcacttatcagcaccctctcttcgtcgtgtcgactcggagagtgctgcttctactgttgttgtatttcctttccctctgccctggattgcgacacttcgtccggacgagcaattgataacgaggccgaacaaagaagcagcgacttcccaatcgaatgaccatcttttcccttccgagttccaggttcagagcgattaagcgacaacgacgctgaacataaaggaagcaattttctgatcaaatgtctatcgatacctggcctcgaccaccgactcagcaaaccactccctttagtcgactcagtggttcgactatcaagcaatggcggtagtatcgaggatgaagggaggagcttaggggtgagtcgttggagtcccgggtgagttttaaccgagtctacaagttgagagaaggagtttctggttctggttaagagaaggaaaaggtcgaagggaggtggccgtgaaggtaaaggaaccttgatagaaggagtagtggtgaagcaaacgtcgtcgttcgccggcattgtcaccgtcttcgttaaagactgttagctccgatcgacgattgttactttgttagggtttgaga

SEQ ID NO: 236300 - DNA, 704 bp, Cannabis indica
attacaatttgttgtgactaaatgtatattcaatcacaatatttattggaactaaaattaaattagtgacaacttgtagctcacaaataggtttttgttgtgactaaaaatcacatttagtcacaaaaaaattatattgtgactaaaaaattgtcactaaaagtaacagttttttgtagtgaaatgagataattaatatgagtggaaaatgagataatttggactgatttttattaccttaaaaaaaaatcctatttttatacactttttctttacaatacaagtgaaaaatgagataatttaaatctattttatactctttggtgtgtaaaagcaaaaacaaaggtagggtttatataccatcaaacatgtttattacaccaatctttgccctattcgaaatagggcgcattggtttggagagtgagcttggcactccaaaacataagtttatagtttggcttgtaattcttgacaatattaggctgcaaactaagactagactatacaaatttggtatttaccaaagcaaaattgttttatttcattggacttgggtctattaaagattagttgggttggaaagtaaaatctaatgaaacagtatggttgttgaggtggatattgagcggggtaaaccccttgtccaagttctgtcgtggtatttttgcagttgcgctcgtagctatagtttatcacatttg

SEQ ID NO: 236301 - DNA, 945 bp, Cannabis indica
ttttgattgcaataaaaatttacaaaagatcttggaagaaaaaactttgactataaagtgaaaaagagatttagtatcatgattattaataattctgaatttataacaatgtaaaattatgtaaggaaaaaaccattacataattcctttcgaaaaaaatatgagaaaagtttatggttttatttatatatattgggaaaagtttgtacaaatttatatctattctatataaagtgttgctatataacagaatttttggttattgaaaaattcttgagcgattttttctttttttaagttttttattcaaaaataattcttaatttaatattgaagatttacaaataattcttatattgtgataaacctaaaatatactaaaattaaaatatactaaaacgattgaagatttacaattccatttttaaacccaatttttttttcccttctctgtgattgagaacaacgaagagaggcaccacaatcaaactccaaaactaagtcaccttcttccttctctcccaagacacctagctccgacgtctaccaggcccctgcctctcttcaccttcaaggtactattttattatatcatgaatctcataagtccattcttaagattcttattagggttaggatttgatactggttgatttgaaggcaaccctaggcctttgtttcctttctcattctctttcttacttgcattccaaaaatagtatatacattaagcctcttctttctttttcattctctttcttacttgcgattgagtggaatattagatggataaaaaataaatctcttcattttataaataataatttataagattattagatggagaaaaaattatcagtgaaaaatatgttaggtaaattaatataaaccccaagatcaatttgtatataacatagaacacaataataagatataataattagg

SEQ ID NO: 236302 - DNA, 1105 bp, Cannabis indica
attcaattaattagttttaattaatcaattatagaattctaaataagactatgtcttgtttgtgaattttcactaagcaatggcttaattgagaagaaagagaggattaggagttatttattaattaatagactttgtaaggcctaattaataaataagttaaatgttaattttatttgataattaactataattattaaatagatagatttgacatttatagagttagaattaaaatatgacatttgtgaaagagaagataagttcttaaataaaatggcaaaattgaaaccctgtagggcccacaataagttcggccaacaaggttcaattaagccaattttatcttttttcttttaattccatttaattctaaacctgaccctagatgaaatcctataaatagaataagatgctcttattttcttaaccaattatcagactactttgtcaaacaacttagaaaataaaaagagagcctctattctatttttgaatccttcctcttcttcttcctatgatatttttgaaaccatatagtggattgaggaattacccacacaattcaagtcaatacttagacctttatggaagattgtgtagaattccaacaactgaagaagatccaggttcagatcttgatcatactctacgacaaaaaggattaagggttagagatctaaacagaaggagacattatattctgctactaccaatgtaaggttttctataactttatgtgtgtttatttcattgttttaggaaattcatatttagaatgttagattatagttctataatcaaaatacatgttagtaaatctagatcctggtaaaacaagttccaacacatattaccttgactcgtgttttgctgggtgtccatattataagacttagcctgtgaatccataagtcaagtaggccagacagtgatcacataaaactttaaatatcacattcatggattttaggcaacgcatttaaacaaataacatattactaacatgcttcatatcatgctttttaaatcaaacaacttactaaacaagtaaaggcttactgaaccaagggtcgagcttgtctctaacaatgattgtacatgt

SEQ ID NO: 236303 - DNA, 531 bp, Cannabis indica
gaaagagtctggatggctgttgcagaaggctggtcacctcctactagtgttgacgaggaaggagacaagatcaagaaatccagtgaatggacgactaaagaaatggaacgagataatttcaactccaaagcgttacatgctctcttcaatgctgtctccactaaccagcttaaggtaatttcaaattgcgaagttgctaaagacgcttgggaaaagctgaaaatcaagaatgagggaattgatgctgttaaaaaggctcgactttggtctttagcaaaatcttttgagaatctatcaatggaggaagatgaatccatctaagaatttcatgctaagctgtgtgacatttctaatgaatcctatgcactcggtaagatatactctaacaagaaactggtgagaaagttgcttggtgttcttccaaagagattcatgtccaaagtgacttctatcgaagaaagccgggatattgaagcacttgatctagataaattgattgggtctctctaaaattatgagttaactcttgaa

SEQ ID NO: 236304 - DNA, 1188 bp, Cannabis indica
tgtatccatatagagagctatataaatcccattatgatttgaatagtattatctcttggtattactacaaataaaaggggaatgggtcattacccactatcacagggggttgaacctctataataaatttgtgtgtttacttatttttttcattttgtttgtgtaacacgtggcaagtatcagatccatacgatcgtgctgttggttgatcatttttttgaggtcaacagtttgatactttcattgcgagtctggatattgtatctgatcaaattccttggttaacacaagaagaaccctagtcgtacgatttatatcttcgggttccccacaagacccgctgacttcggatcccgatgttcatgttccagcaacaactagaattctcatgaacacaacagatgtggtcaatccttgccccatagcaggcaccacaaatctggccaccacagttagccagaatggcataaacatccttgtggatctaaataatcggcccctgccttcaagggaggaccgtctactggtgcctctaactgaaggaagaatccttgggggcacccccaaagaactacaatcagattttgtcctcgatactatgcaagaaagacaagaataagaacgcctactattggcaagccccatgtgaacttgggaaaagatctcgagttagccaaacttagggaggccatctatcaagccagcctaattgaagaactatgccctgctgattgcgatatacttgcctagtagatatcagaattccttgaagaaccaagcactactgattgcaacatactcattcaacagagacaaaaattccttgaagaacgacgtgttgggatttgtgccctaaataaaactcaatttcaatgtaatcttttctattcaattatcaataaagaaacagatttattttcattacttatttagtgttttatttggttcatgtgatcatttatttatttattagatttataaattcatccaaatccttatcatattgatattcttatttattgtgttatcaacactgtggaaagtaatcaattgtgtgattaaatgtattccaatgatttatcagtacgcaaggtttatctgataggataatctacaatatagtttacttgcaccttggataagtgttatgtcctaagggcattggttaaggtaagcttgggttggatg

SEQ ID NO: 236305 - DNA, 957 bp, Cannabis indica
ataaacgaaatatgacaacatataggaaccaaataagcaacacttaattgttttcaggaattctgatcctcttgactggccatttagtttcagctatttttgatacattcccacctgtctttgctgtggatctttcattgtcatcttcattactatgaagatctactttttctttgagtttttcagtaccaactgccttttccttgtcgtcgccctccaatttcacatcatcactatcttgttgagctggaaactcaatgtcttctttactattaagctccgcttcttctttgagtttctgattaccaactgttctttccttgtcctcgccatctactttcacattatcaccatcttcttgaagtggatactcaacagccttcatcacagaatttaaccacgttttgaactcttcatcacttggaccagtgaggacaacattcatttcttgttctttcaatgttaggtagtgcagctccttctcccaaagcttgatttctgatttgatatttgaaacgatcacaatgccatattcctttctcatttgatggtaattttttgccttcttacaaatacaagattcactcgtgaattcatagtcatatgttactttttgatgaacaactgactcataaaacgtgatctctgcttgtagttgtgcaaccatattttggataagtgatcgaactctcgagtaatcaacgtccattgcaagcttttattttttgattggaggatgagaatcaagggacaatttgggaaggagagaagttttagttgtggagtaacaatgagtaaacatatcatatatagagctggataaggagtttggatattttaaatttttattaatttaatgtagtcttttttagattttttgtaaacaatcaatgctctgacacgtatattgaactccaaatccatgtcccaattgttcataatttttttttgttgaat

SEQ ID NO: 236306 - DNA, 526 bp, Cannabis indica
atcctatgtcccctctcatctttatgcttatcattgagtaccttacaagaatggtagcccattactctgggagaaaaggttttcggttccgccccttatgcaaacatctaaagctaactaacctgtgttttgcagatgatcttattatattttgcaaggggaatttcaactcggtcagttgcttaaatgaggcttttctgagattctgccaagctacgggtctttcggctaataaggccaaatcccacatttatttttgtggggtaaaggatggtatcaaatctctgatcttggatctcgttaaaatagaagaaggttccttccctctcaaataccttgggttcaagctttgtccaactaaatggaagtctgaagactgtggagtgattcgtgataagataaacaagaacttaaactgctgggctagcagaaatctctcgcttacgagtcgtgctcaattgatccactcagtcctcctcgacattagaaattattggatgagtatttttactcttcctagccatgt

SEQ ID NO: 236307 - DNA, 1474 bp, Cannabis indica
tattttattttgtttttagtttttaggttctttgataataattttattaactttgtaggagatatcatcggaagccacttctcaatcgatgccaattggtggaaaaaaacatcaatggacttctagagaagatttaaagttggtggaatgtttgatagatatgtgtaacagcggaaagtggaagactgataatggtacattcaagcctggatatctgcaacaacttgaaaaaatgatgaatgacagaattccaaattctggaattaaagcacagccacacattgactctcgtctcaagatattgaagagacaatatacggcaatttctgatatgttgggaccttctgctagtggttttggttggagtgaggaactcaaatgtgtggtagctgataaaattgtgtttgatgagtgggttaaggttagttactatagaaaaaatttatttcattaattgtttaattaattattcattattttttttagtttaatgttatataattttgtagagtcatccaactgcaaaaagattattaaacaagccatttccgtattataatgaactggctatagtatatggaaaagatcgtgctactggagatggtgcaatgggattctctgaaacacttgatgaaattgcagaagagataaataatggttggaatgatgactatgatccctttgatacacttgatgagatgaatgctaatgcaagcatgaatagcaatataccatcaagtcaaacagctcgaaaggctaagagaaaatcaaatagtggagatccattggttgaactactttctaagtcagtgcaagaatttagtactatgcaagcttctgcaagtgattctattagaaaacttgctgattgttttcaacatgaagctgatggtgctgctaggagaatgaatctatatgaagagattaaaaaaattgatggactcacaaattcgcaacgacttaaaatcggaaaacttctaatttcaaatcaaccccgcatcgattacttcttcactttagaagaagaatttaaacttaatttcctcttagggatgttagagtgagtttgatctactcctaatgttagagtggattttattttaggcttttttttttaataaaattacttattattaataaacgcaaaaaaatataatttttgaacttaaatattttagattattttcttatttattaatgttgaccgaggttttcggcaaccaataaaataataagagtttagagatctgtaagaaattaagagagagatttttacgtggttggggcgttaatgagccttagtccacgagtctgtatatttatgagtgtatttaatatagagaatgttcttggtgagtatttactcttcttgcacttatgcaatccagaattctcgacccccattaatgagctttgagggggtatttatagtgtttttgtgggatgatccccaaaattatagtacatgtatttc

SEQ ID NO: 236308 - DNA, 751 bp, Cannabis indica
gttgagttatacgactaaataggaaaacatatatactttaaatggggaaaaatatattataatgatttttttattttttatcttaatttttattaaaaaaaatagaaaattaaagaaaatttaggatactaaatatcttttaattaattaatatttataaatctaataaaaaaaatttaaaaaagagaattaagtaagagagaatatatatagtattatttagagagattttagaataatatgttactactttatatctcttctttatatatatttataaatatattggtagatcaaacaaaattataacactaatatattaatgtaaaaagacctagtagtacgattaagagagtatatttgtagattgaaaataaaatggtttaagatatagaaacacatattttacaggaaaaagaaaatatagaaacacatattttaatttcatgattttttcaaaaatatcttcattcaaatagattataatatattactttgctcaagattaagtgaagtccttccggaattagtgcaccataaacaaggagcctttatccaaaatagactgctttcacataatattttaatattccaggacttacccaaaggctataccacgaagagtatctcgactcggtgtctaatgatgatagatctcaggaaagcttatgatattgttgacttggactttgtggctgatcttttaaagggtctttgctttccctcccgatttatcaactggatcttggtt

SEQ ID NO: 236309 - DNA, 720 bp, Cannabis indica
catctttattggtagccattgcaaaaaaagaacaaattgccaaaatttccaaatacaaaactgatgaaaattcaaaattgtactgcaaaatcaatactcaaaacaaatatgaatatcaaggaaaaactcgaagaaatcaataccaaaaactggaatgtcgaactgtacggatgttgtatggataataattgtacgaagtttgatctgcaaaagctgtgattacgcttaagaaattcactctcataaatcttgctctaatgccatgataattatttgtaaaaagaagaataacaaatacaaaataaaagagatgcaaagaaattagggtttcatgaaattgcaaagtcaaaagtgaaagaatacaactaataagaaagttttatataggcaaccaacatacaagaccaaaataaaagaaaagactaaaataaccctaaataactatataacattctgtacatcaattagatgtcaacaatgcattccttaatggggacttgcaagaagagatttatatgcaacaacctcttgttttgaagacccaaaccaacctcaagctattttcaaactgcacaaagctttatatggactacaacgggctccaagagtctggtttgccaagcttgcttttgttctcattttgtaacgccctaaataattaggcaagctacccaataaacttatgaaaccctaatctcctaattgggattactagtagaa

SEQ ID NO: 236310 - DNA, 1877 bp, Cannabis indica
agtggaatttatggaatatttaatgaaggcttttgtttccccttcgagtttattaattgtattatgattagtttacgagggacttcctactcttctcatgatgaatggtaggattcaaaaaatatattttgaaaggaagaaagggttgtgactaggtgatccaatacctatcttactatttatgttggatttggattatctaactagacgactgcaacaagcttctttcaatgaaggttttaaatttcatcctctctgcaagagctttaaaacttgttaatctctgttttgttgatggtttggtcattttcttcaaaggttcccttagtgttgttcgaaagtatataaggtgtttattgatttttgttctgtttctgggctttttgcaaaaaagtccaactcacattagggatggaaattaggtgggtaataagcgggtaatgcatctcccaaccccgttcttattttccatttatgcccccattctctcccccacctcgcttaatctctgatgggttcaggataggagaatccccattgggtacccattaagattaaaataacaataattataagaaaataaatgtaatgtaattaaaatgaaaataaaaaataaacatactaattttaaaataaaataaagcaattctacctattaaaaaagtactattattacttaatatttttctcagcgcatcatacttttatcagtgtaattaagtatcagatcatatataatttaagaaagagcattgctattaggcaccagtgatgcccaacaccttcaataggtggtaccttacaattaattagtgatattctttaaaaactattttcttaaattatatgagacccgatacttaatttaactaataacagtataacactaaggagagtactaacaccaatagtactttttagcaattcttcctaagaaaatagtttttaagaagacactcataaaaagtattaagtaccactcatgctgaatagtaatacttagcaattttcatttactactccaacaagatgagatgagagttaatataaacataggtactgtacgaaagatcaagtactactattaatttacagctcttcataatttctacaacaacatttataacaaatacaggtttacagtttttcttgacattttttttttctaatatattgggagaagggaaatttgagttttgcaagtatgactatttcaacattttttgttaatgcgtgcaaaaccatgtataataattttattatggataattatataaatgtcttttttaatacacgcgcaaagtaagctgtccatccatatatttaatctttctatttcaggtagcaatcaatctttcagaaaaaggaaaaaaaaaatattgttctaaatttattttccacaataattatagcaaatatagtggttcataagctttagtttattgaattacaaacggctattttagttcatctttttgaagaagtgactttgacgtctctttttttacttattaagttattgttggataaattcccatactattgtcccataaataaagttacaaggaaaaataaatttagaccttttttataaagcctcaacagaccattataactcatagagttgtcggttctgttttcctaggcttaggtcttttatttctttacaataaaaggaagcaaataaatatctcaagactctaacaaactctcagctattcaaggcaaaatatctcaacagaatatagtcttttctcagatcagaaacaaacacaaccagcaacaacatcaacattataaatagatatacaaccttcacatttacacaacaacacaccatttcggccagcagagataaaaggcagcagcctttgttt

SEQ ID NO: 236311 - DNA, 645 bp, Cannabis indica
ctaaattacaacatgtggttgatacttttgcatcattgttcaccaagaagaatgatacaagattgcagcatctggagaacgagcttctctcaatcaggtagtgcgacacgaaaattaactaatacttcatcaagataaaaaaattttgtcgtgaaatctctgcattggactctactgttggtatgtcagatactaaaattagaaaaattattattcatggattaatgctagaatttagaacttttattgctgcaatacaaggttggctaagccaaccatctcttggtaaaatagaaaacttgttagctgaccaagaagagtgagctaagcaaacatctgaagtcttattaaagagtgatgaagaagcactctttagtggtgataagaaaggtcgatctcgaccacatgctagcaaaaaatttaagaaaaatgatgacaatgatagtcatcatagaagctcccacgaccgggggagctacaaaagaaaaacaaccagcatggccagtcaaagaataataataaatttgatgggaaatgctataactgtagaaagtatggttacatggctagaaattgtcgattcaagaagaaaattgcagaatgtaatgcagccaccaaatgcagaaaagacaagtgacgaagaat

SEQ ID NO: 236312 - DNA, 681 bp, Cannabis indica
ttaaaaaatatattaatttataaattgaattgttaaaaaaaggtataattaattgagtaaattagctcaaagattttaccatgtaaaacaaaggagtctcgggagcaagtcctaacaaaaataaaaattatatgtaaagtttcatgtttttgcttaattatttctattagtaatattttcaaacaccttgagtgcattatatttgaaatgaaaaactaagcaagatacgaactaaaatgaatcttctttctcacaattgttttgacgaaagacttattaattaatgttgatagatatttcatttagctacatatgattcttacgggcttcactacgctttcgccttagtgcctcaccttgctgttgtaaggcaacctttcttctcttcttcttcttcctcttctgaaaccctgtcacgtacttctcttcttccaacctttcttcagatgggttcacaccaagctggtactgcctatcccctcttacagctgaagcttctgcagccttacttgcagtcacgatggctaagcactacagacacccgtatgtgatcattgagggtgattctgccaatgccatagctgctttgaaaaaagaggcctctttttgggaaattgacagaattgtcactgaaataggcacttcaattttgtaaaacgggtttgatccctttggaagtga

SEQ ID NO: 236313 - DNA, 1646 bp, Cannabis indica
ttgctatgtagatatcttggagaatccttgaatcttttgactatttgagctatccctcttgggtaccacttttattctatttaatcaggccaaatacaaagagaaaacttaggaattgaaccctaccctccccaaacacaccgaatgaatccttatcaattgaagctacacaatctgctagaccctgtgttttttctcttttccacattaaatatctatatgtcattttatttcagcacattatttaagtgaatgagtgttcatactcctaggccggttgagtgagtgagtggtccggtataagtctctctgagtgttaaaaaaaaaagtgaacaagtgttgctatcatgttacatctttggaatacgatgctgatttaaattttattgttttgacagatgtttgatgatcaagacttgggctttgtcgccaatttccttggcatttttatatttgtgctggtgattgcttaccattatgtaatggccgaccccaaatatgaaggtagctaaaaaagtgatagctacgaatatatgtattatttagtctaccttgttctaccgaaactagcatgatacctacaatttgtggattttgttaacttatattttcatgggaagttttcttattgacaatcttttttcctcctataattgaggctataatcttcatcattcttctttagataacatcttcagactcgatattttgcaatctcttatccccagcttatataagtccaactccaagaggaggattgagccatgttactatgtgttcttttcttgatttgttagtctctgcagcaagtataacaaaaaattaataacaactttatttctatccaaattttattctttgtagtacgtaggcagtggattcgttctttgattagtggtttgattccacttaaaattttagaatccaatctgtgtgggaccttttataaagtataccataaataaacctcctttagaggctagagaacttgtgttgaacttgcttcatacactaccttgtttcgtattcacgaagatacaagtgttaagtgcacttatttttagtggctaatgagtgcacgctggttattcgatctaaatctcatatgatatttctagaggctaatgctatatcaaattttgatggtttaaaaaataatattttgtggtataaatatttaagtttaattttttagagtaataatatttaaagttatatttttaatatttttataggtatttgatggtaaagatagccacgttccttactagtttatgttattaaattttattttttatttacaaattaatataaatatattaaaatttttgaatcaaggtacttaagagtaggatttttttcctgccaatatttttttattagagcttttcttattttttttatcgagcattatgattctgctttaatgagttttaatatgcaatgtcaaacaatttttttttctcgatcaaaaaagtatattgttggaactgggttggatttggtacactttattatattgtatacaactatatttagttgtgttgtataattatatcaaaatttaatttattccaaattatatgtatatatttgggtgcacttttaattgggtattacttgtgaatgggtaaaattagaaaaaa

SEQ ID NO: 236314 - DNA, 763 bp, Cannabis indica
tcttcgggaggaagtgtgcaagtactacaatttgaaatgagttcaagttttgggtacctcataaatttgatcagaagaatagattacgataattgcggcaaattcaaagagggagtctgtatttgtataagtcaatttggttttgtaatcacttgagattcatctaataaattttattctctggacatggccccgtggactaggagcaattcaaaaggattgttgctgataccacatataaaatgttgtgtgtcattttattttctgcagtatatttctgttttgtcagattctgtatctgataaaatagaagtaaattttgttcaaacaattttactactgttccacattatttaaattgtttgataatttcacttggtaattataaaaacggaatttcaaacccaatatttatttttagtagcataagtacccgatatttgtaaaaagataaatttttctctagtgtttgtcaatacactctccattttgaacttactaaaagaacatttggaagtaacatactacatgtttttatctagactcaatgatatagaatctggactttacatgttcctttttaagacaatgacagagtttaggtagtaacaaaattagtgaaaaattaaaattttacaaatattaggtacttatgccgctaaaaataaacatttactttatgtcatttacaaatttaaaactttaaatacttagaccactattaacttaaaaaaaaaaaacattagtctcaatagataagata

SEQ ID NO: 236315 - DNA, 1141 bp, Cannabis indica
acatagtgaaaataatcatgattatgtgcttcaaactatttagtctcattgtactatacgagttcttagatttgttcattatcagcgtactcgtacgactagcctatacttacatgttgggaatttggtagtgcaattgagtgggagcgttaatcatagatatgaaatctatagcttctataactatttagaagtgaaatgatagtttccttagagcttggctaaacaatataaatggaagagctcttattttagtaattataatagtaaactgcaatatcatttataagaaactaagtattttaaggataaaatacatcgaagggtaaaacagtaaatttgtccctactcgacgtaaactgtctatgatcattaattatttagagtgaaataatggttaattcatagtgtatctatatttgatatatagagtgttttgagagtaatctatagtagagtgataaggaattaacaagctacaaaattacttggtaaattttaggtctatttatttggagcttgattacataaacacatggtccctgtattatctgaaataatactgccttgtagattcaattaattgatttaataagtcaattaaaattatgaaatatgaatatgtcttatttgagaatttttactaagtttgggcaattttgggaagaaaatagacaaaaagatttgtttgttatttaagacactttgtgggtttaattaataaagatatttaaataataatttttttgataattattaaataaataaagttaatatttgaataaaaagattagataaatggtattttcagaaagaagataagattgctttatttaatgaaataaaatggcaaaagttaaacccattgggcccattagtgtatttcggccgagggtatggtttgaggtccattatcatttttaagcccattcaatttaattctagtccaataaagagcctataggtagaatatggtagatatttgatttacaagtttatgtatgtgtatgttgaaaacactaaaatcctaggggtccgtttggtacgcaggattgtattggattggattagaaatgattggattggattggattggattggactcgataggattatgttgaatccaataagggttgagatg

SEQ ID NO: 236316 - DNA, 1040 bp, Cannabis indica
gggcaactcaataatttcacatacacataaatattcacatgttccatatatattatgttataacataatcacataataaaataattttagatcccgaactcggtccgagccaaagtacctagttgtgactatactgtgccaacttgtcaaaatcacatgcggtaagacaatatacatatatgtatatactatataataatatagtccattcgcacaataactattaagattataattttacccttctctggtcaaaattataaaaatgcacctaactcataatggggtcttaactacaataaatctcaaataacttcatataattaattatataataatataattacttaattataattaatctattttaattcgggttgctaatctatttactaatcccaggatattacagtcagaatatcttagaataatctctccctctgaaggagtgtttgtttaaaagtaataattaaatgtactattagttcagcactttaagaagtgtggtacgagagaaatattagatacatgttcactggaatgaagtaggtgagaaaagaatacgatggactggaaagatctaaagaacttataaggtcatagagtgaatttgagttgtatgctcgcctcattgagtacacaaaaaaggtatgctgattcaaagggtaggaatattgagttccaagtaggaaattttgtatttctccaagtatcgcctataaaagggatatgtagaaaagagagttaagccctcgattcttcagaccttttggtactggagtaagtaggtcaggtagcctatcgggtagctttaactcgtgcgttgtccgaagtgtatgatgtgtttaataactccatgctgagagagtacgtatcaggttcgacctatattcttgagtttgtgtacgaaatttttgagtcgtttagacagtatttattataagtggggaaaactaacctactccaggttttagactagaaagagaaagtaacttggtaataagtacgaatttcgctagttaaagtgttgtagagaaact

SEQ ID NO: 236317 - DNA, 788 bp, Cannabis indica
agttggttggtatctttgccacctaattctatcaaaacttgggaggaattggccctaaaattcctttccaaattctttcctcctacgagattaccaagctaagagttgacatcaacaacttcacccagcatgataatgaatctctttatgaagcctgtgagagattcaaggatttattgaggaagtgtccgaaccatgggattgaaaggtggttacaagtgcgtatactggattaatgagtaacacccaaccattgatagatgtcgcagctggtggggcttttatgagaaaaaagtactaatgaggcctttgagttacttgaagagatggccataaataatcaacaatgatcaacagagagaggtccaattaaaaaggttgtgggaattcatgaagttgatgcaataaccaagttgacagcccaggtagaggcattgacaaagttggtgactacacaagcaaaacaagctctagttgtctgtgagctgtgtggaggatctcatgccactgacacctgccctatagatgtcgacagtttgccaatggagcaagcccacgccattggaaactatcagaataattatgatcgtcagcagaacttccaaaagcagttttatcctcaacaaaatcaatctcagcaaagccaacaatatccacaacaacaacaagcctctagtggagggtctaatccgtaattagacacattattgtaattcatgatggagattaagtcttccattaaggtcttagaaacccaggtggggtagttggctgctcaaaacactaac

SEQ ID NO: 236318 - DNA, 2855 bp, Cannabis indica
ggaaggcaaagcttgtacccaagctcgtaaggtgaaggccatggtttcctttctcaaatccccaccagaaatcacgagctagtccatcaatccgattcacaaggcgatttgacagtttggttgtctgcatagcataaataggcatagacaagcccaccgacttaataagtgtagcccggccagcttttgataaagttttggccttccagccttgcaacttggacgtgagattgttaagaatgaagttaaagtcagcatctttttgtctagatctgaacaggggtaaccccagatactttgtaaccccttcaggagaagctatacccagagcttccttaattcctctcctcataccatcaggggtatttttgctaaagaatatagaagtcttgagtttattgatcttctgcccggaccactcacaaaacttttcaagacaattccaaaagcctttagcctcatttaagctggcacgaccaaccaaaattaggtcatcagcaaagaaaacatgggaaagcatcgggccccctctacttaatttaataccatgaatagttccttttcctatctcttcctccaaaagtctggacaacacttccgcagcacagatgaaaagatagggagataacgggtctccctgtcgaaggccgcaagaaggaataatcttaccaacaggaccaccgttgaggcatatattgagagaagaggaggaaacacactgggaaacccaactgcagaattgtagggggaagccgaaattcccaagaacatgatcgataaatttccaactcaacctatcgtaagctttaacaagatcaatcttgatcgcaaagaatccttctttccctttcttcctgttgaaggaatgaataatttcttgcaccacaacattgttatcttggatattccttccggggacaaacgcagcttgagtagggcaaataagagatggaagaataggttttaatctatttgcaatgatcttcgaaataaccttatacatcacattgcagagagagattggtctaaaatggttcggttttttcgggttctgcattttagggatgagaacaacattcttcgaatttacccccttatgcattcttccatttacaaagaaatcttcaacagcatcgcaaaagtcatctcccacagactcccagtagtgcttaaagaaaagaacagacattccatcagggccaggggccttatggttattcatggcaaacagggttcttctgatctcttcacgggacgggcaacaaacaacttcagcttgattttcaagagaaatcttctcagtaaataaatgaccacaatccatctgccggttactatcagaaccagagaaaatgcttttgaaaaagtccaggaattcctggcctatcagcactcactcattaatccattcattatttttattcagaatgcactcaatggcattccttcttcctcttatagcagcagaaaggaagaaaaatttggagcatttatctccgtccttgagccacgaaattctggcactttacttccaataaatcgtttttttggctcgggcttcattcaagcttcgtctgatttcaatctccgaattccaatctctggagccagcaggcagttgttgcatttggtccagttttagttccagctcctgaatgatactgtcaattttaccaaattcggttctcttccattgaagaagcgcaacccgagtagcaccgatcttcttaaaaacgcgagcaggggccacggatgggccaccgaatcccatgcactggcaacaacgaggttgcttctgcaatcccgcgtccaactttccttaaatttgaagcatctggtgaatttaggaccaattccccccgtgtccaagcacaaaggtctatggtcagaagtactcgtctggacggaacagagaacagattttggaaacagctgaagccacgctccattcacaatgcctttatccagggcagatttcacatggttttttccagaccgatgattatcccaagtcatcatatctccttgaatatgcatatttattaggccacgagtctccacaaggtgagagatgaaaaggatgaaggggtctcggcccattgatccttcccactcataggaactcaggacaaaattagtatcaccaaatatcaaccaagggccgccatatctatctccaagagccataatctccgaccagaattgttttttagcatggttatacaaggaccatacacacacgagaggagccacgggtgggtaggggggtccgaatagacaagccctgaaatatggttacgagagcaagaaatacactcaaaactaaacccagatttccaagctaaaataatacctcctgcagtaccaacgggcggcacaaaaatattaaagtaaaagtgagaagcttttagaatacgtaccagagggttagcatccactttgagctcagtcaaaaaaacaaaatcaggagagcgcgatctgagcagggacttcagttcgcgaactgtagaggtctgccccaaccctctacagttccaggctacacctctcatggctcctgtggaggagatatgacattctcctccacaaagttaatcgagtgcacagaaagactggatccagattcttcaattacaaatgagccaatcagatgactccttttaacaccattgttacagctcggagagctcgacacctcagtaggttcttcaaaaacgatcatcaaaaatccacctttgactcacggtccctctccctagggtcccaagggaagtccctaacaacatccggatgacgtctaacaattttgttaggacgggtgcagagagaagcggagccctcaaattttctcttct

SEQ ID NO: 236319 - DNA, 1019 bp, Cannabis indica
agcgaggaagcccgaactccaatactgaaactatcgcagggattgaagctcaaagatcaatgactggaggtatatcgatcattgattatatatatgttatcgatatgtttatagtttttccgcattacatatcgtttatatatatgctatattacatacactatattatagtctaacgtaagcttcaccctgaaactgccaagcatgcattattagattgctccagatcgaggaaagcttggaaatcttcaaggtttgctacctattattataaatttaagcatcttagtttatatgatttttttcttagtattacacatgagttggataagaattatatttgtatcttttgttgttttttatgggctctttggaatcaaagaaataatattttttaccataagcagtctctccaaccgtatgttatttatgattggagtgttaattttttctttaagtacttggatatgcagcaggtccctgcctcatctagttctcctaatatggatccgccagctttgcaagagtttcctaccgaggcatctttctaaatttttactgatgcagccattgatatcaaccgaaggaagtatagcattggagctgttgtgttgaatcacttaaactaggttgtagctgttttgcaaagccttttacaggatgtgtttccctggtggtagctgaagcaaaggaaattttccaagcattacagtgggcctcctttattcatctccctgttgatgttcttaaaacagattgtaaatctattgtagataagttaaattcctgtaattggggctctagtcttttggatgatctattattatgtattaaggacttattatctttctacccaaatctgagcctggtccatgttagaagggagtctaactctctggctcatatggttgctaagtggggtcttgggcttgataatgagtttctgtggaatggttctttgccttccctttagtcttgtgtgtttgtatggttcctttgtaatacacaagattttattt

SEQ ID NO: 236320 - DNA, 988 bp, Cannabis indica
gaatcctccaccagcaccggttctggactctccttagcgaccacctgaccctggaagcctcaaaatgaatgtggatgctgccataaatgcatctaataaccaaatgggcattggagttgttatcagaaactgtcagggggctataattgctgctttctcgaagcctctcctcggaaactttgcatcacatgaaatcgaggcaaagacaatatttcacagcttgctttgggccaatcaattggaaatacagctaggccaagtcgaaacggatgctatgacggttaccaatgctttatatggccgatcaaattgtatctctgctttcaatgatcttattaatgatgtatcttgcttactttcctttttcccgggtgtatctgttgtacatgctaaacaacagctaacaaagctgctcattatttagctagatatgctttagggttggatgaagcttgctgaatggattcttttcctccatctctaaactctgttattgtaaatgacttatctttttaatttataataacaagtttttatcctaaaaaaaaaaaagaagttgaacatcgactctaatattatcataaagccaataggttatcgaatatcattattagcacattaacatgttaggtcttctcttaaggatatggagttgacattcaataattatatgaaacaatttttctctaataagaaattttaaagaacaggtaaaagcgtgtctatgctatattattagtacaattcaatcaaagaagaaaatacacttaaatattataaatcatatagtaaaaattacgcttgaattttgtaatgacaaatttttgaaaatcttatatttgagccaaagcatccaaatatatatatatagctcctgcatgcacacacatctcaaattggcaatttgcaatataaatgccatataagaggcatgaatcttatatgagataagataggagtgtgcagaaagtcatccaatccaattcca

SEQ ID NO: 236321 - DNA, 8654 bp, Cannabis indica
ttaatagaaaaaaaaaatacaaaacgacaaaacttgttagagagtcacacattgttaatttgtgaaaagataatagaatatataagatccatcagctactcctcctgatggtttgagaataaatttgtatttgttttcttaaaaaaaaaatggatatgtggttaattgtttgttgtggtaatgtagtgaagtagtgatgttgatgagtagttgttgatttagtatatgaaattagtttggcttagaagagagaattgtatgtaaagtagtaagctcttattgatagtttgggacattggctgtaacgtccccgcttcaagcctccattaggctcttacgctcgtagaatgataacttttatacatgagtacgtcactctcgctgcttcatagaatgatgactgaccctacagaccaacacaaatgtttccagcgtgctttgtcctcactcacacgcttcttgggaaaacttctcagtaggtcacccatcttgaaattatcccaagtcaagcacgcttaaccgtggagttctttcgtgatgtactaccgaaaaataagatgcaccttattgatataggtagtaccaatcaatccatagtctcatacctacaagtcttagaatcatcacacttgacctttccccaggcggtgtgggattgcacagcctctgaagaagatttaatgagaaaaaagaaagagccaaagaaaaaaagctagaccctgtaggaataacatgagaaatcatatcagtgatcgcattcgtggaagagagtattcaagtgacaaaactcaatgcttggagtgcaaagtcgaggagttggcgaaaatcatggagaagatctctagaaagcaaaatggcactgtatgatattctgagtaagaatatacagaatcctatgtgaaaagaattatagatgcccaactgtcggagcgtttcagaatgcctcagatggaacaaaaattcccagagcatggaacgctgaccatctgcgccgatactatcagtagactgggggtgactagcttctttttcatttttctttgtttttatttttatgtctaatttccatgtacgcctcagggaaggaactctttaaatagagaaggatttttcgtttcatatttggtgtgtgaaaattctgtcttgtaacaagtgatcaaaagtctaaactcttaatcacttgggggtagcatacattatatcattatctcttgacagggaaccggaagtaagccactgcctaatcatacttaaaattaatttaggttaattcgtaattaacaacttagaagtccagacttcataactgactccaattaatgtaactttgaagatcaggcttcgtaattaactcaagttaatttaacttaaaagtttagacttcatagttaactctggttaatttaacttagaaattcaagctttgtaattaactcaaattaaaatttaggctctgtaattaactcaagttaatttaacttagatgttcaagcttcatagttaactcaggttaactaaactaagacgtttaggtttcttaaagaaattaattaattaagattaattaaatatttatgtttgaaaagtcctagaagtaagtaacatttaccaaagaaggtttgattttgttataattaattagcttaaatatttacatttcaaaatcttaaagtaaaacatacttactaaaaattttctaaaagtaagttgtcaaaagtatcaaagtttaggccattggaaccatgttccaagaaatacaattgacttatgaaaaagaaaaaactaaatctaagaatttaattgaaagtccaaaggctcgggcctttggaaccagaacctcaggaggctggaaataagattaaaacatagtaagcttgatagataaaaacatgaatatttaaagagttaataaaagtatacaaatgtctaaaatgtgaccacgtacttaaaagctcctcaacaagggcataaaaaattgtctctgcatatgcaaaaagagagatcattatcccccaaatgataaaagtattaaaagtaagttaaagttggataaacttggataaggcaaagttgggtcttttggtggctgagcatcatcaagccggacatcaatggagacctctaggatcgcagagtcagtaagggaagcagcatcaatagctggaagagctggttcttccaagttttcaccctctaggagggaagttctaggatcgaccacttctactaccattgctgccttcttggcttcgtctagttcatgtagttcaagaacttggggcattagtttttctctatttttgtcatctagaaaatccatcacagatttattgagcttccaaatggtgtacaaagagtgtacaaaagcttgttttaacgcttttgatgtcctaaccacttggtcttgcttcccctgggtcactttctgaagttgatcctctagctatgaagtcttttgaattttgttctctagctctaaagcctttttcttggactcttcacaagcttgagccaaggattgtttggtaaactttaattcagatgcggtgtcctaagcctctttgacagctttcttctcagcctgttttgccttttgcctcaagtcagtatgaagtttcaccttcctctccaaattcattttagcaacaatcttgtcatccaggatgcgagtctacttgtcgtactcattggacaaaaaggtaagctttcggtctgagtccttaaaatctaactttgcttgcttcaagtctgcctccaagtcactgatctgagagagagcctgagtatatttctctttgtacatgtccccacggtttttctgctccttgatggccttcttttcacgagcagtagtcttctccaaagaatcatttatccatttcttaatgatggactccatcttggcaggcatctgctaaagctttggtggcctcttctctcctttgtttggcattagaatgttcaaacttcagcaaatctagtttgtaggccagtttattgaccaaggagtagctcctctccgccatcaggctcacctaagaaaagaattataaataaatcagacaaaggaaacaaatgtatctttttccttagacaatataagtaaaacaaagaacttacaacgttggcttgagtcctcattgcatccactacataaacaggatccctactcatcatcattgcgaatctgtcagccccacgtttgcaactagtggtagcaatctggtccaataaattagacaagaacagagtcacatcagtcccaaccctaggatgaagtctcttcatgaaaagactcgtccacttgtcataatcagcaaactcagcattgcgcctggagaagatacttttggccaacttcttcactttatcatactcacttccacgccttttcacataaaactgttcaatagcctctatgtgcgctttagcttcctctatcattgatgtaggcctgacaggaagattgaagtatgaagaaggtaatggagggaatgttgtcttctcctaagacaactatgtggcaatggcaggaatgattttgggcgctgggggtggtataggtggatcttgattatcccttgttgttctagtgcttctcctaggtagccttccactctcgaagacatcagaccccttttaggattgagatttagcagcttgtctcctcatggcagccaactgtcggacttttttcttgatctccagcttcgcctttttgttggcctctccatctgcaatactcgatcgctttctgggagccaagactggtccatcactgtttgagcttcttcctcaacgttccccataggcacatgttgtactggtgccacatcaagagcaagttcgttcagataaataaggaagtagacaagtattctagggctggaacctttagagcagcctcctggctcgaggcttgaggtgctggcttctaagatctactcctagaggcttatcctttcttgcctttgtttttgccttccctggccacctcacggatctcgtcaaatctagaactgatggcatctaggaagttattgagcagacccatttggaagtagtcggttgctctgtaaaaagagaaaagatacactatgtcagattacatcagatataattacagatacaagttatcaaataatatgaaggatccaaaccatttatcttagcataattggctttccctctagcaaaaagggtaatgtcatctcgacctaaatagtctcgcgttagaaaaaccctagaaaataaaattttactaaattcgtccactctaacgtgatgctgcactgggggaacaaagtggttaggactccttataatgcaatctaccttatttatgaagtcactacaagggtatctatgttgatctaaacttaaaaaataagggtcgaatctcccttagttagtattatctaagtatgctaaagaaggagccctaattatatgaaagggtgtctcacaactatcggacatactcgctcccagagcacctttatttgggattacatcactaaagtgaatagtgagctcttcagcttcactcaaatcttttggaaattgtctcttccagtcggtaagtcactattcatcaaccttcatagctttcaaggcctctttagcagttatgatcgcgatggcttccctcatctcatcgggatctcctcagagtgattcttgaacagtttccttcactaaaatgtggtcaactttttaatgggatgtaatgaggcccactttttagagattttcagtggtcacaagctggcccacttgcaattccttgcgtggtaaggacttgtaaaaggctatcctctcctctagctccagagtcaagggtgattggggaaaacaatatagtagacataaaatgcatatccagacataacaaaaggaagaaaaacaagatgtgaagtttagggaaaggagagacacttgctgtgttaaaatccaagctaagtgtgggaactctcttcaataggaagatgaagtgtagaagtagtaatctcggaacttgtgagtatacttcgtcgaactcatgggacatgctacactcttagaatggcattccagcctgtaaaaatccaacttttctttgtggcccctcatgggatgagatttaatcttgtagaagtacaagatcttatccaacatcagtgcagatttgttgtgttgagcacaaaggatgtaccatcctgacaaaagatggtacacgtggggaatgaattcgaaaggttccactccgaccacatcacagaagttggcaaaataacacctcaatggaagatgagcacccatttttatatgagcccagctccaaatgttgaagccctcatttgtgcacctactgggcctttcattatgaacagagagtttgttctaatacagatctagaacacttttgagccctcgttgggtctcatacttccttaaattgttgtatatcccaaatttattaacatgttggtccatctcccatggactatcgttgaggaccaatttcggagaatcctcttgctccagaacttccttttccatgtcaatctcatcttgctggatcttcttagacataatttctacaaaaagaagaaaaataaagtagtaaactacccaaactacctaatatagaaaaagaataggggagtcctcccccataaactgcttggagaggtcccaattaaacttactatccagaaacggaaacctttaggggtcatttgttacagttggaaagttaggaacagggaagaggaggaatagagtaaaaatcaacgaaagacccaaaaccagaagaatttttggcatagaaaattttttccagcacttctactacaaaatgattaatcttaggaattcctagcacttgaacataaagtcaacatggcctacaatgcctaaatctaccaatgataacaatcgcgcaagtagaaaaccctaatttcattcaaaacaaaacatgcagatgcaatgtgcagctataaattcaaaaaacttaatcaaaaagagagaaagtgaaacgatacatacttgatagtgaaaacaaaggtgccaagctgatcgtcactagattaggttagggaagttgagcacaccttttgcgaagatgaggtgtgaaagtgatcaacaagtcgatttttgtattgaagtccagagtcgcagtctcctctagcatgaagttagcgatcactaggggtggatggtttggaaactctcgaaccctaatcctccacagaagttaaatgtagaggtcgatgacacattccatattaatttaggttgttcagctctgagttcacttctaattctcaaagaatgtagagaaaacttgaggttttgaaaggttaaaattttgaaattaggggaaaagtggtaactagaagtcataaattaagagtatttatactcgaagtgtcaatccacgtgagaaggaatggacaatccacgattgtctctccagaaataaaaacttcatccaatggttggggattccaacagtcaaagcgtgtcacacaattaatgctccctggaatcaaggtgcagatcaatgatgaagatgctactttttaatttttgcgccaaaaagtgaacagttgttaaaatacaagcatttctagaaagtagctcctccgtaaatgtacccttccactactaagcaactgccacgtatatgcaccatgactgaagatggaagttaccttccatgatcgattaacacctagaaagtcatgatattacttctaattctcctcatgtccatactaatggaatgaagcaagcttttaccatacacaacattctggaagcttaggaggtaaagttatccgtgtttcccataaagagacacatggaatccaggtcagcatcaaaggtccatcaatgggccccaaagaaggaaatttgggccaagcccaaaatgtataggaccttctaggaacgtaccgtagctccatgattagatgatcttctgatagtcacaactcgcatctagaaggaggttcagtaccgtgattctagaagagttatgcagcgtgttcctagaagaccaatccaatttccctttttattcctacgcacaaataaggaaataaatgctcccaaatctcgacaaaagaccgtatcaagctaaaaggggaaacttcctaaacaaagatcaagcaattaattcacgattaattttccacaattataggacactattttgaccaattcaaccgtatctaatctacctagtcagcatatcatcttcttcatgggctgtacttcacacaaaggcccaagctaggtaattcagtataaactccccaatagagagaaaagggaaacttagtgtaattctctaaatactataaatacccaatgaatcctacagattaagggttgaattctctcaatatatttgctcaggcaaacttgagaacttacgctcattgtattcccaaaagctttcctagctcaaagttatgtagactaaggctcattaacgccccaactacataaaacctatttgtgtcattcttatttttctcttttaattatttatttcttcaattctaattatttttaattagttttctgaaaatcttgataaataagagtctttttagaaggtctataaaaaaattcccctatataaattgtatatatgagtagaagatatattccaataaattttaccaaaataaaaatatgagaagaagtagtaagaaaaaataaaagaaaatatttcccataaatttaatatgagactttttattttttaatcttcaatacatatatgtataattaatttaaatttcataaaattatactctatattctcacaaatttactttttctaaaatagaattttgtagttggccttgtacatcatgttggatctatttttttcaaatgataaattagattttgtattttttaaaatcatacaaaatatcccttgatttgattctttatcaaaataaaagttaataataactcaactagagttgttatgacaaaattggatacattttctgcatctgttctaattatttttaagtggttatatataaaaaaattaaaaattgagctcatagtactatttggtataattttaaaaaaaatacaagatctaatttattattttacaaaactaaggatccaatcaataatatttacaaaacacaggaaactattaatcttttttaatttattgattcaataatgatatacatatactctcaatttacacaccatgtaaatacttatacatgttagataaattaataataaacccaagatcaatttgtataaaacatagaacacaataatactatataataattaggcatgcgtacttgattgatccatagtaattaccacaatttgatagtacaatactatcaattaagtcttcctccctaggtctctaaatcagaagcagttttacttttctgattatcaaaagtatacaattatgatgagatgatatgtatttatagagttagagagcggacttagctacataaccctagttagattgggtctgctcttcaaagcttcagttaaatagaaaagctcacacttctgttttacctagactttatacacaatgctaattaacccattaactattgatcaccaacaatatgggctaacacagcaaagaacta

SEQ ID NO: 236322 - DNA, 844 bp, Cannabis indica
ttgcctttactaatccaaattattagagcggtcattacacatagaatctttcttccttgatgacactaatagtactaatataaggatatatattatagaataattctataatagtgacattggttttgtctctatactatagagacattttcttaaccattcatttatatgattttttaaagtccacattatataatatgcagttttatgctgcaaattatattttctttttcaattatttttctaaaaaggtaaacatactaacaccaaaaaatgaaactttttatttgttattgtaaaaaataaacctatcctcttgtttcttttgggttctactgaaaatagcttctatagagagaaaaaaattctttaatctcaatagaagcctctctcttttacttttttgagaatttttctctagaaaaagaaaaaaagcttgttgaagtgaattaaacaaaagttgaagaacaaataaaaattatcatttgcagatatcaccacagttgaaaaaaaaaaggcagaatattgaagaacatttttacaagtttagagagaaaaaaaaaatctaacaaatttgcataaaattagtccgcaatcgttagaatttacatagtatattagtagtggccaatgacaatcaaaatcatttagactagaacaaaaatatgttttatactattattcacaatcattttagcttttttggactgaaattcacaaattttatgccttttatggtagtctatgacagttttgtctatagctttaaaggtgtagatgacactcatgaagagaatctgaacactactcctttaaaaatgttttgatgtagtggtgtctctac

SEQ ID NO: 236323 - DNA, 541 bp, Cannabis indica
ctcattgtggcaagcccgatcacttagtcgacaagtgttctcctacacggcttcccaccaggcatggagacaagaaacgcaatgacaaaggtaaggctcaggtcaatcaagcctctacaagcaacccaaccgatcacacactactctcattcatgctactgatctcacttcacagtgccaacaactcatttcattgctcagccagcaacttaatcagtccattcctcgggctgatcctgccatgaacaatgcaacatctaaccaagctagtaatattttttccaattcctcttttcaatgggttcttgatagtggtgctactcacaatatgtgctctaatttctcttggtttacatcttttaaagactcttccttttcaaaaaaatatcattttgcctaatggacacaaaattgttgtatccaacattaggactgtgagtataaataaataccttactcttgataatgttctctacataccagattttcatatcaacctattatctgttactgccttggttgatcatgttggaaattattt

SEQ ID NO: 236324 - DNA, 1019 bp, Cannabis indica
ggaaggtaatgccaaatgaactcgttaaagttaccatggaaagtgatgacttgagggattaggctttcaacttaagacctctcgtgtttagcactcttactaaacatcaaacacaattaatccgggatggttattgtcttcctaaaattgtcgtccagaagccacgatatggtggtcccaatggctcccagaagactactctagtgcttggtcgaggttccatacgaatgcgggtgattacttgcccttgcatccatgcttcatatctattatagattcctttggactatttccctactaaataaacccaaatgactatagaatccttgccaccttcttcatcttttactggcttattcctactccccacgaaaaaaacttcctatttgacttgaaaagaagtcctactcaaaaagaatgaaggcttctatcacttccacaagttcagcccatacatacaacattaccaaaagtaattgcgacctttaccaccaggaatacttctataccacaatccttccatcaagacacatggccctttcaaaagacctgctcctctaattgacatgaagaggagagctaatgccatgttgattgagattgatgcatgggagagaatgggagaactttgttcaataccaaaactctttcaaaggatgcactaaaaatgtgttgccagcgagtgtacgtcgatactgacttccctaatgaatctgggataatgccactcaagaaagatgatgaggatgctcaaagtgtaactgtcatcttgtctcagacagtgtcagaacatgtgaccttagtttgaaatgacacagagtatttaggaagaatatatgtgttcttagaccaggaagatggagaagttaactccactcgaactgctccaaacaacgatggggaatcattaggtggttgatgcttcgtgctgtgtagttaacttttttagtttgctttccttcagttgtactaaccacttgtattttttctttgcagacaatatgagcttcttggctgct

SEQ ID NO: 236325 - DNA, 1166 bp, Cannabis indica
gattgaacttgattttgttcaagggagaacgacaaatcgttttgcacaaacgatctgtcgtgcaggtaaggaacgacaagttccattgtcgtgtgaaaggaacgaccaaggtttctttgtcgtttggatcaattgttttaattgattttctgggacaagtttgtccctgtcgttttaataagttgcttgagttggtgcagggcaaacttggaaattcacaccaagaaaattcctacaacacaaaatttaaaaaaaaaaatagtaaaggagataattttctttttttactatttcaactttttagaattaatcacctagcaacaatttgacacaaaaaattgcttcattttaaaatcgatgccaaagttaattgtgttcattttattgtaaaatcgacacaaaaaagtcatacgaaaaaattagtggtattgtaaaataactagcttgttcctcgctttattacaatatataattaactatatgataatcaatttcgtagaaatatataaaggtcatttgtcttaaaatgaactgcctcatatatattaggatttttgccctttaaattttaacatgtactaaattatgtcttttgaatttttttgaccgttaaaaattctctctgaactattgagattattagatttaagaatctttgtctaatttcattcaattttactattttagtgattgtttatgtactaaaccaactttaaaatctactaaatcatatccctcgaattttgacatgtactaaatcatgtctcctaaactttcatccatgttagaatttttttactaaaattagacaaaagtccttaaatccaataatctgagagacatttttaacgactataaaatttcaagggtatgatttagtatatgtcaaagtttgcgaagcaaaaataagccattttttttttaaagcaataatattgttaaacttgacaggctatgcaccaattagagaagagcccaaactcgacgaatcatatggaaaacaacgaatgaaatgactaaatacgttttctttctaaaatcttcatagtacaaagtcaactcaaaaagaaaaagtggattaatctatcaccaatttggtccggtgttcattcggcacaatttgataaatttaagattaaaatagtaaaaaaaaaaatataatatta

SEQ ID NO: 236326 - DNA, 1344 bp, Cannabis indica
ataagtaaatatagttttagtacaaataaatttattatattctcttaatcaaaacagctttttttaaaagttgggttattgtaccagctttagcttttagctgtagcttctccataaattctttaaaaagctattttttgattgtttaccaaacacatttttatcacagcttttccaaaagttatgtcaaactaaccctatatggtcttctacagactaatcttttctttataagttctcgctcaattgacgggaatgaaggaaaagagtaattgagattagccaccaaacccttacgtatatagcaaattaattaggaatttttacatcatatattaaaattttttaacttttttacttctttaatgtgaggggattttttttttcaaaaatagtgtgtaagttttatactgtgtactgtgttaagtttttacggttgttttttagctgttccactgttgttttaattactctgttttgttggtttacggttgttttataaaagatagtatttttgtaaaaaatttcgtgtgatagtaaaattgtaaatttttacctaaaatctagtatttttataaaaatccatgttaattagagccccataaatcctaattaagtttattattaggcattacacattacaaagctcataccaaatagaaaaaattacactacattcctttttaaaattgatgcctttaatttttacactattttcaaaatctattgtttacctcttttttcaatcattctactaattttactcctatcacttcacaatagttttcattcttctctaattgaaattttaccttatctttcccacaaacctacacatctatcttcaaataacacaaatctattatgtcaaataacacaaatctattatgttagaaattatgtcttagttatgtgagggtataaagataatttgggtatgatacttataaaaagaggtttatttgaattaaattttatttgaaagtaaatttagtttatgtataaaaaatgagcatttttcaacttcgatctccctacaaaataaattgtttattgggcttatttagttagattacttatttagcccaatttaaaatattagctcaaataaattagacaattacattatatatcctctttactttatttgttttaatttttacctttatttctatattctttaaaatatacctacttttattgatgatgttcccattatattccttaggttaatgtaaattatgtgctagacttaagtagatggtgagtgtatcttagataatccatttacaaaaatggatactttttaataaatataatataagagtgtttttggataataga

SEQ ID NO: 236327 - DNA, 876 bp, Cannabis indica
agcctatttcatcttcaatttcaaacgggccttcccaattcgtccaagtacccacactcctggtcttggaggctaggagacctcttaggaccagatcactaatggaaaatttcctgttcttgactttggagttaaaatactttgccactttcttttggtatgctaccatgcatattttgactcttcctagagctcatctactaagtccagtgtcacttctaacaaggcttggtttgtccttggatcataagtagttcttttacgggagaggattataatttccactgggaccattgccttacatccatacaccattgaaaaagaagaatgttcggttgtagtccttccagtggtcctgtacgcccaaaatatgcgcgacaactcttcaggccaatttttcttgtaggctaaaagattttacttaagggtgaccttcaatattttattgacgtgttccatctgcctattttcatgcgatcgtgctacagcggagaaactcttgatgactccatgtttgttgcaaaattctgtgaactcatcacaaaagaattgtttgccattgtccgagactatcttatgaggtaacccatatcaacacacgatgtttttgatgatgaagtccaaagcttttttagccgttataaacttcatgggttctgcctgtgtccatttcgtgaaataatccatagctactattgcatatttaaccccaccttttcccgtagggagagaccctataaggtatattccccgtaccgcagtgatctcctttggcgaggccctttggatatttgtaagcctttgacatgaatcacacttaaggatgtagtctatgcagtctttcttcatagtaggccagaagtatccttgccttag

SEQ ID NO: 236328 - DNA, 927 bp, Cannabis indica
aatttttgagaaataaaaaaagtcaaccctgcaactttgactaagacttacaaatatcaaataagttaagatatcatatttgagggccacatgacacttttagaaaacttacgagaacactaaccaatcatttggcattgtgatccacacccaagtgtgcccaccctagaatttatgggcttgcacaagaattttcatcctagagacctctattcgacaagaaaactaacaaggacatgaattatttagaaataaaaaggttagaacttcaccataaagtcaagatttcacaaggagcccactccacaatgcttggccaaccactgccatctcttggcataaaaagatggcagtgctctctacttccaaaccaccaaagggaacttgtccaaatgtggtcccctaacaccaaggagtataacacaattgaaataaatcattttccattcaatgtcaatgctactcgatctgtgccatctttgtgcgcaaaaaaagtgacacaggtcggccacaccaattgggaaggggattctttgtcaaaagtattttttatcatcaagacatcaagaccaaatgaggaaggccaccaagtggtatagaagccacttggtcgatcactgccgtctttgtggcccagagaatggtagtggtcaaccacaataaatgaagaagggtctctttgaccaaagtatatttctagcatcaaggtaccaaaaataagtgagaaaagttaccaaaaggtgtagaaatatcctaacaatcatctgtaaaaacacgaataacatttacccacaagttttcgagatgctttgcctttcgagagcttgtagtattcttctgcttcttggaaacaaatctttgacacgtggtgttggctgggatcccggacgtatcccatgaacggttatcaagtaaggggttattaat

SEQ ID NO: 236329 - DNA, 1226 bp, Cannabis indica
cttgattatatactcataatgagcaaatactgcacatacaaaagccttacgagatgctgaaagattagaataatataaaaatttgtggagaggatgaggtgtagatgattgatcttgaattatagagtgacactcatagtcatgaagatagcttggtggtttatttgttctactagtccttcagagcgcaattggagctgcatgaggtgaagatgatgaagtaactagtgtagcagtgatgtcttctgcaatatctagtgctggtgtatcctacaaagaagaatctaaaccagaagagcaaggagaatgcatagggtaatcatcaactggtgtgtgagatatgtgaaatgaaggtaaaaccacatttgaaaaaaggtctaataagaagtatcattatttaatctgcgaaaagaatatatatgttcacaaaatactacatttttagaaacaaaaaattgactagtattaatattataaaatttatatcatttgatccattgggggtatcccataaaaacacaaggaggagctttaggatcaaattttgtttgtgagccgtgagggtggaggagaagactaaacattcaaaatttctgaggaggtttactaaatagtatttcaaaggatgttttgttagctaaattatgagtaggtgtgcgatttataagaaaagtagcaatcaaaacaaactcaatctagaattttattgcaaaattagcttgaaaaaaagacccctgacgatatttaataagtgctaattttttttttttagcaatagcattttgttcaggtgttccaacacaagtaaattcatgtaaaatgctaagttttaaaaacaaatctttgaaaacgggtttagatggattgttaaatttgaaatacttgaagatgcaactaattctctttaaaagcctaattcattaattcaagaaattaattgctggaataattaatatagcttaccttgatacttcacttaaatctacaaagtgtttctctcaaagctattacttgattctttattattttattttttttaagaacttatgaaatatagaggaggtgggggttttggtgtctatgctgaaggtcaaagagagaaatgatagataatctttcgagtttattaataataataataataataatgataatcacaataataaaatttatttaataaaggaatattttattatttcttagccactaagaaatttatacttcta

SEQ ID NO: 236330 - DNA, 733 bp, Cannabis indica
tacaaaattaactggttttgtttgaatttctaaattataacttcagttgtctgtggttataaaaaagttcatgctttgcttttactttttctcataataatgctttggactaaggaagacatgacattggatgcttgagagattgaacttgaagtatttcatggtccaaaaattcaacaacagatccgtggctataccagaagctgatgaaattaatgaaccaatatttcatgttgcaccagaatttgatacacaataatatatgttggcagaaaatgaagcaatattggagggtgatttcacgcactatgacactagaggtaatttcacttcaggtgcattatcaagtgctgcccttaggaggctcaaatatgcacctcgaatagcatctaccaggccaaatgagatgagcataggtgaagcaaatgtggaatctttgtcaagaatatcaattgatgacaatgacttggagtggagaaaagagaataagatttcatacgatgatgaggatagttttgactttgacaaatattgtgatgaatcttacacagaagaatggtttggagagcactatgacaataatgaagccgagcataggaattttaagaaactaataaggaatgaaaattttattgatcctaatagtaacctatcaagactaaaaaatgagaacatgtatgaaaatgggaaaataatccttaagtaatggcaaagattaaatgatcacaaggtt

SEQ ID NO: 236331 - DNA, 1410 bp, Cannabis indica
atttattaaattatattttttgaatttttttagccattaaaaatttttcctgtaataagattattaaatttaaaattttttgtctaattttattaacaaaactctaatgtcgataaaaatttaaaatttgagagaaacaattttattaatcgctacattaataaaattgaatgaattaaataaaaatttttgaattcaacaatctcaataatttagaagaaatttttcacgacttcaaaaatttagagacataattttatatatgttaaactttaagtagtatttgattggaagtaataaaatagaatgaaatataaaagaattaatcttcatcctatttctttatttggttgcatattaaaatattggaatattattttaattgattgaccttttcactattttaataaaattactattctattttaatttttttaaaaaaaaaacaaacaaacaaaacaaaactgggctttgttttttatattgttgttgaatagagagttgttgggttctccaaaaaattcgtgttgtcgattcgtgttagtttcagagctttggttggttagttccttgttagtttagggtattgcgatgttaacttacaatagataggtttttggtttaaaacttaagtccccggttgtgatttagcgtgtcacttatctatgttataatcgatgtgatttaggagcctgtaattcgccgagcagttgttccactcaggttggccggcacacctaaattcagaaacaaggtaagattagtataatgtcatgcatatatatttacatgtttagcatacatgttgtttatgcctgttagaatacattgatagcagtaatagtatatatagagttgtactgattactgataaatgtatggtagctgaaatactgattgatgctgtcacatcaatatggttagagtatgattgacatattgagtatattatggtcgatagtattatcgtatgaacgttctagactcagtaccatgaaggacacggggatagggttatggttgggtgtatgggtacctgattataacacgggatattattatgttttatgttatgtttttcttactgactctgtggactcacagtgctatttccatgtgtaggtaagggcaaggctaaggctgagcaatcgtgagagcgagcagatgaagattgtacatgtcggcgcggttaggcctggagtgtacgatctttgggacatcaggacttttgttgtgtagtcgcgaggcgacaaacttatggatatgaatattaaacttctgtaaatatttttataaacgggatcccaaaattttatatgtatgtcactttatgtttttaattaaataagcaaaatttaaatttatcacggttttcgataacctcgtcgattagcaacgggctgcacagta

SEQ ID NO: 236332 - DNA, 1390 bp, Cannabis indica
ttaaaaagaaaaaaaaaataaagaatcaagtaaaaatatcctccaagtgattgataattgttcatcattttacataatactattccttctctacatgcagtgaaggaattaagaggcttcaatcttttttttcgtatgttatgtaattttttgtttttttatatctctcaatttaatatctttgaagaaagatctctttatttttctaatttaatttttaaatattattaaagatataacaagataggtgaaatagagaatgagactttagtgatgtaaataaaaaatagataaattgatatatagtgtaatgtaaaagttcaatataaaataaaaaaaagcaagattttggtagtgtatttctaaaagtaaagtaaatttattgatatgagagattctaccttttgccgttcctccaagtcaccctcgcctcgccgttggggctccatctctctctcgcaggtcgtcggcggctttggtgactagaccttcctatgtccacttattttcctgtcatcgtgaataaggatgagcttgattctcgctctccttttggactatttctgttctatttccgacctaagcttctcacgtcgccaattggctcctagccccaactcctttctgcaagctgacctccatagtctactttcttccaagatatttttgccatattattgtgtctattttcccattgtttacctattctctattttttttctcttgtttcatgatttgtggccctcatgtctcttctcttttttcaacattaaattctaagttgtcttggttgggctcagtcttgtgggtggatatagtttttgttgagatctttggctcagtttgtggatttcgcttactgctttctctttgttgaggtttgatgggtctagaccactctttcgttgggttgatagttttgggctagtggaaagtggtttgtgtttggtgatgttacattgtttgggaagcgacttggactagtgttcctgggttcatggaaatatggagggttagggcaaacctctacagttctcgaattaaaaaccctgatccactcttattcactagattttgtttttctcaccaagataaaatcagatgcttctaatgtggaatgcattctgaaaaaatttacacttttattttaatcacacttaccttgcagttgggacgattggtgattcaatgctagcatggaagatttgttttagctttgaaaatttgattctttccaaaaattaaactacgagcattttgtattcggacccaccatctaaccctttgatgttgtcttgtgtgtatagtcctccctatttcaataaaaagaagttgttttggtccaaccttatggaggtgggaaataaatatggaggaacttagttgataa

SEQ ID NO: 236333 - DNA, 875 bp, Cannabis indica
  modified_base (51)..(51): a, c, t, g, unknown or other
atttataccttatatagagtttgtgtgcgtttttaatgtaagatttttaanattgctatgtattcattttaggttttacgtgataaaagtcaaattgattaagtttgtttgtgtaatatcctcttttcctaattttttttatttttatatgatagttatatttagagattattaatgttgtttagacaattcaaatttgtgagattattaatacttacttcaaatattttgtttttatacttttattagtactttattagctttatttttgcaccaattttttgatagtttagatgccatttatggcttttaattgtgtcatctttatggcttgtccctatttgttttgggtagatttgtagtattgttaatgggtaagagaaaggtttcatatttagtattcatggcttcttcaaacgacttttgagatctgacagataagtgtttgaagtcttgatattattatatgaattgtattgtaatttttattcacattacatattttttcattaaattgtgtggtaatagattttattgttactttgtaaatcgatttttgtggagggcctactattacagagactttgctgataagtttttaaatataatttatttgagagtcgttatctttttactactgagattttgtctttttagtttttaatatcatcgttaggggttaatccacttttctttatcctttttattttgtagacattttgtggaccatttgatatgtaaatgagttggcgtgtagttttcaatgttacaagttgaagctttagctattttggtgtgttgtttgaggacgttagttttattgtctaaatttttggaggtagtttgtctcatgttgctcgcttattttagcagtt

SEQ ID NO: 236334 - DNA, 1111 bp, Cannabis indica
tggccgtagtctccatgaaattgacagaacttggtcatgtctctcttgctgacatattttttcataggcgcaggcttcttgtacgaggctagtgactgagtgaccatgtaaacactttctatatcctcagtcaagatggtaaatgccgtgtacttggcttgattctcccgcagagcttattcggttttactggtgaactttcccttcttcccattcccttgtgtattgttgttgctggaatgtttaccgtttgagcttgaattacttgggtaatgggggagttgggcggatgtcccagcggaaggagaatttggcttgccaggtttttgctcaccttctgctcattgatgaagccttcagcacggtcaagaaaatcgctcattgagtctaccagaccgttcttccttatgtctttccagagctcaccaaggacttcaatgcccccagtatcgcggacaactttccatctttagttacccgtgaaaccttagtcaccttcgtcatgaatctgctgatgtaggctcaaagatgctcgcctggtctttgcttgactacgaccaggtcttctaggtgcaacggaagttggcgggagggggaaaattgtgcattgatatccgaggagaaagccttccatgagttgaagtttcctggtgccagcttgaagtaccattgctgggcggcttctaagagggttgcaggaaaaattctgcaacatacgtctcctcgtatcccctacagatccatttgcatctcgaaatacttgaggtggaaaagaggatcttcttttccagtgtacatctttaaggttggcattttaaacttgtggggcaacgccaggagattgatctcgagggagaaaggagtcccacgtgctcggtcaaacacgagatcattatttctctgactgaccatgccttggaacatattctttagttgttctagttatgcctgcacagctggactaacctgctcgacattttggccaatctgagccacgtcagtatctttctaagcgggaatttgagcatgggttccgagctatacgatcggcgtgtcaagttaatcgtccacgcctctcctcgatcctatttagatcgtttttgagatcatg

SEQ ID NO: 236335 - DNA, 1307 bp, Cannabis indica
catggaagctaaggcattcagaacttccgcttcagagggagggtccataagatcctcctttaacaaattatccattctcaagtggttccaatcctcagcttcaaacttgatccgagaaccattcttagaaaatgtactggtaaatttctgaataaatggttgggctatttccttcagttcttcaatcgattccccctgttcattcttcaggcattggatatacttccgtcttcttcttgttaccgtgcttgccatgaaaaattttgttgaacggtctccatcctttagccaagcaactcgcgatttttggcgccaaaaaatttcttctcttcttagcctttcctcaagatcagctctcgcatttgagtgagccttttcatcgaagtttttagcctcttcgattgacttaagggttactcgagcctcatttatctgaacagatagcttcttgaattgctccttgttccatttggttaggtgatccttggtgtgcttgatcttgcgataaagattaaccattggatgctgatgacctttctctatccaagctctttttaccacccaaaacactctaggatctctttcccacatcatttcgtacttgaattggggcttggtgcagaactttccacctagggtctccaaaagaataggattgtgatcggaagaagtagcactgaggtgggaaacaatagcattcggccaatcaactctccaatcggttgaagccatggctctatcaagacgagctctcttcaaggaagatcccacagagggatccatacttttcttgaaccacgtaaacttgatccctgtgtatcccagatcaactaacccggttcggtggaccattctccttaagtcgaaagagtacctcgttgtattggaggcattggcataattcaagttttctccgtgttttaaagtgccattaaggtctcccattaaaagcagaggaaagttgcactgatcaatatactcccctacctttttccaaaattcctccttttccccgaaagaaggaggcccatagattcccatgataatccatggtcgctccggaggatcataggatataattccaatgactttattcttatcagcatcctggatattacaatccacacccaatttccagcaaagcgctagaccgcccccagttccttgcggagggacatagcatattcctggaaaatgcagttttcccatgagcccgtataaatttacttctgctagccttacctctaaaaggattaacacttcgggatttgacttccggatgagctccttcagttgtcgaactgtcg

SEQ ID NO: 236336 - DNA, 1331 bp, Cannabis indica
acatcacatcaggcttgcttctacattaaatcatcaaatattgatttgatttttgagtaccacaagtcatcaataactccaactatagttagcgtagcgacacaatttttgatggtgaccaatttatttctataaaatgtcaatatagatttgacaagtgttcaacgattatcaagtaatttgtgtagtaaccttttttttttttaaagaacatgtaacttcaaataaaaatatgcaattagaacaagttaggaagttcaaatattacataagtttggaacacagccattctaaaccacctcttgatctcatctctaatgctctctctcttaccatcttaataaccttcattggtttttgaaatatacaatgtgttttttttttttttttgaaatatatacatgttttattgaatgtaataaataaataccgcatgcaaaggcattttggaagtcaatgttttattcttactatgttttaccatgttagcatataccaacagcagtccaaaactctaaaatttaccataatatggtttgctcttttcgaaaattgttaacctatttctcattccacatttttatgttaaatatgtaagaacagaggaaagagtagagaaaataacaaagattgaatggaatgattctgtacatccattgaagagagccaaagctctatatataaatacagtgtttataacagaaagacaactgtgcagacagttataactaacatcctaattgtacccccctcaaacttagcctagataaaaaatctaagctaagtttgtctcgaagatacagaaatctggtgctagcaagggcttttgtaagaatgtctgcaatctgatcacaagccggagtatgtttgacaagaagctgcttgttgattacacgttctcgaacaaaatataagtccaattcaatatgtttagtgcgagaatgcataataggattggcagccattaagacagcactttggttatcacaccaaatgactggaacatgctgcaaatgaataccaatctcagtgagtaaagcttggatccaaactaagtcagctgtggcattagcgaggctgcgatattcagcttctgaacttgatcgagagacagtcttctgtttcttagaggaccaggacacaatgttgggacctagataaatgcagaaaccagaagtggatctccgatcatcgggatccgaggcccaatcagcatcacagaaaccagtcacggttaaagttgaagctgatttaagatgcagaccaagatcaattgtgccagacaaatacctgagaatctttttgaccgttttccaatgagagtcaagagg

SEQ ID NO: 236337 - DNA, 4862 bp, Cannabis indica
agacttagttgatagtattgcactatcgaattggagtaactgttgtggatctaacagagataattgctatggatcaatcaggtagacatacctaattattatgtattactattgtgttctatgttatatacaaatagatcttaggtatattattaatttttctaacacacactacatcataagattagtttggctgcttttgaaatttgtgattttagtcttccttttccagttttatgaaatgaggtcctattaataggccaactaggggcaaagagaagattatacttatacttagtgggtaaaatgcttgtgtacagaattaagctaaagaatggcaatactctttatgatgtgagtagagtattcaactaaaactttaaagattatatgcacatcatcattattgttcttctcttagcttaatttttctaaactaataaatgcatgtctcctcaggtatggattgtgtgttttctcaggatgttgtggctatcaattatgcggagaagccttgttgcattgttgggtagctcaaccagcatatatgagaggtttcaatgtaaaaccaaagtggttttcattcaaaaaatttgaatgtcaaattttgaggttacatgactagcaaaatgtgatgtttacttaatggattgtcaagtttgtttactaatgctttaatgaaggggaaaatgaaaaataagagcaaatctcatataagtttatctttgatcattcttcattttgttattggtggaacattttttctaacactagattgcatttcatgctatttgaatcctcataaaatattatatctcttcttcactaatattggcttttgtttttttatgatgagtagttgatttaaggaaattgaaatcaaagtaaatttatataagaagacaatactatcatccttactgtcaaacataattgtcaccaatgagaaacccaatattggacctctcatagcattaaaacttctacacaatttcacacaagcatttgtgattcacaaaccacattattgacaaaatcttgaaatgaaaactaactgcaaacttagagctggtgcaacttaacatgggctccatgttgtggttgaagagtcataacagtataaggagcatgagtatatgaagacgaaagctccagcgagaagtgttgtagaatcatagccactgcaatctttgcttctatcatggcaaaattttgtccaatgcaggtccttggtccccatccaaatggaaagaatgctagctggttgtctttacctgccttcgaaattccttcagagaatctttccggtttgaattcttctgcatcatcgccccagagtgcaggatcgtgatgtagaagaagcgtaggtaggtttagatccaccccggctggaatggtgatgtgacctatttttgtttccttgtaagcatgttgatactgagcaatcacaggtggatatagccttaacacttcattcaatatcattgttacctgcataaattttttttgtgcaatgtgaactagttaaaatgcattgcataagtagcttttaggatttagaaagaagaaaatatggaagtgaatactcacaatcttgaggtggcttaaagcttcaaaactaggttctttcttcccacaaacttccaggatttcatctcttgccttttcctgccattcagggtgcattgctaagactataatagtccatgttaaccaggaagatgttgtttcctggccagccaggtagaactgtttgcactcctctattacctcatcaagtgtcaatccattacttttcttgctagttgtgtgttctggtaaattattctggttgttggattgtaacattaggcctagcaagtcatcaaccttggtttgtcctgttttcattgcattcattttgttctgaactatttcttttagtatcaatgtgatctccttgtccaactgttttcttcttctattctttttggtaggaacaaacctatacagtgggaagctttaaagttaaaagcaaagcatttgattattcttctttaaatagaaataaaattagtttcatctagtgagtgaattttcaccttaaaccaggaatgtacatgctctgcattgcttctagtgttagcaatatcaactctttttgaagttcaaacatcttcttcccttcttcatagctgctcccaaatgctgctcgagaaatgacatctgcagtgagtttttgaaattcaacccacatatccacttcacaagtcccatgtgtaacatccaagctcttccattctcctatcatcttactacaactgactgtaaaagctggtatcatatcctataacaaaaacacacaaaccttgttttcaacatcacttgttctaggtagaaactcaaactcctagtttaaaattagaatagacatgagaaattgagaaatgaaaaccttgagtctctctaagtggaaagcaggatttattatccttctatgcctggcccactcttcaccatccaaaactgtcaatcctgctctagtcaaaattcttataacagggcttataaaaggcttgctgaagtggccaagtttgttggacagaatttctttcatcaattccggatctttaatggtcagccttggtgttgttccaaaccaaaccactgatatgttccctgtgcaaatcaaaggtaagcctctcttattctaaaaaattataaatagtatgtgacagacatgcatatattggttgaacttaccatatttctgtacagtagctagagtgaatggatcgacacgtggaacgatttgatgggttagattgaggggcttgtcccatgcctctgttatcattgtcacatactctttcacgtccccaaccaatggcctataaagggtgcctttgattccctgttgtttaaaatttctctctaaacttttgggtttccaccaaatggtgtagaaagctttggcaacaccatagggtagcagaatcagtgaagaaagtgcaagcaaatttagtacacagttttccatactattgaggatctagcttaagttctttgtgtgtgtgtgtcggtgtctgtggtggctaagaaaatcaaacttgagatttatatgaaattgtacttgggtctgaagtttttagtcaaaatttctatagtgaagaagataggacaacttgttaagttaagcaatgttttatttattttgctaaataagtttagctgtgttgctatattgatatttatcatatattaaatgttatgtgactttgaccaactttattttttttttggagaaaaggaaaaggtacccatggtagttaaagattttggctataagatcatgtgtagtacttggcgtatggatcaagaatttatttatctatatatattattcaataataataaacaattacacgcaaagaaaagacaatagaggtgatgtaaaaagatgacagtgtccactctctagagtttagccgaccttgaaaccttctataatttatttgttatgcaagtaagcgtgggtagcacgtgaatagacacaattggattagaaagtttgaacattttcagaatatggttgattttcacttaattaattgtttgaaatatgtttttgcaatttcggttacattagccattctgattctggatctggatgatgaataacaaaggtcaatggttattataattttttatttctagaaatagttaataaactcacaattaaaaattcaacatgtaaacctcacaaataggtgaagccggagggacctctttgggttagagtaatttgggacaaaatcaattctctattaatgtcttcaaattggtttgttctctttatcccactaattattttcgtacactatttgttaagaagctcaaaactaaattaatacatataaaataattatagataatatgtcctgaaataattgatacaaataaaaaaggcatactaatttggaacaacagatttttttccttatttaaggctgtcataaaatttttatataatgaatgaatattcttgttatttattgttcgtttatataaaattttgaataatgtattaccgttaatttattttattggcatatagaacatatttatattttatgtttttgacattctaaattatttaaaattttttaaaaatttgtgcgagattttaaataattatattgctcgtcctaaacaacaattaaataaaataggatgtgccaaaaatctaaaaataagtaattttgaatcttgttttatatgcacgtaaaataaattattttaaaatttatataactggtcgttaaaaaaaattatttaactataatatatactgtgtgttatcataacttttctaagtatctaaaacaaagacgctactaccggaccgaaagcttctaccaaaatttccagaaaaaaattccattttttttatttggatatatttgtttacgttatttggagggacaaaacatgacatttacttattaaaaaattgtagtataaaataaaaaaaaaattacatagctaaaaattaaaaaaaaattacaaaaatatgttaacatgatttttttttttattttcatgctttagttgtaaattttaatttatttacaaaaataatacttgagtaaaaataataaactattttttttattgttttatagtttatttataattttatttagttgtaatgagattgttttataatttatttataattgatttacagttgttatgctgttgattttttgttattttttttagttgttttcttattttttaccgagaaaagtttattttaattatttttgatcattataagcatatttttgtaaattgaaattttaagtcataaaattata

SEQ ID NO: 236338 - DNA, 2177 bp, Cannabis indica
tttataaagtaaatattgtagtagtctttacctcattcagttgcagatttttcatcaactctgaaatttggatgttagtcactatttcgctaatatatttaattgtgcttctaatttatgagcacgtgatcaaaaacagtgctgtaatgtactctctgatttgttttttttttttttttttttttttgcatctaatgcctcaggtttaattataataagttttcgtgggttttcgtaaatatttttatttttctggtttgcattaatagctagaacatggagaaattaataagattggcattcctttttgtcgcagcatgtacaaatgagcataattataataatgctttaagttgctattatttttatttaacagaagacgaaattataaattttatggcttaattatactgtatgtgttaaaatataactttttcttataatgagtgtctttataggaaaatggtaattctagaagagaagaagagaagaagaagagaaaaatcgtagatgtacaacaacaaaaatccaatcgtattttttagatttaatgggatttattttattatatataaataaaaagtgatccatgaatttcttataaactattttatttttaataataagttattttatttttaatataaataaaaagtcaatgaatttctcataaactattttatttttaatataaataaaaagtcacctatgaatttctcataaaccaaaaattcggttatatagctacactttatatagaatagatattgtcacgagaaaaatgagctttttttagagtcttcttgtgaagttgattaacctacttataaaattgggttcaattttcttttcggaaaatgaaagaatattctatgaaatgaaaatttattagtttacaattgacaactagctacttgttttcattttctcccccaactttctttggataatttttaatataaagttatttgttaacaaaaattaaaattccgtacgtacttactgtcttataggaaaaagttaaaacccaaggaaacataaaaagaagaagagaagtataacttacaaaaaaacttccatttggttagaacaatcgagagataacaaagtgatgatatatattaattattttctttgttttaatatgttttttttattgattttaaataatagaaaggtagatagatttatgtttgtggaaaaaatattgttataaaatattaatagtgtttagtagctaggttagttcgggctatgatccttcgaacaaggcagttcatgagctgttatctccgaccgaggttaggtcttcttttgctttgctgttattattcctccaacctacaggccaaggcttctcgaagtcaaatacatcaaatatctattatcttgccacttaatatcgtcatgaatagttattaatattttataataattattattgagttaaattgtatgagattcgatattaaataatataatattttagatggtactaaatactactagtatactttactagctatttctttatggaaagtgagcaactattaagagaaatactaaacgatgctcataaattattagtaactagtatttttatgatgagtaatattattattagtataatttataatatcaaatcttatataatttattttaaaaatcacttcataataattaatgttcaaataataaatgcattaattcaaagagagtgagatatgcatgatatgatgactaggttcatgatcgtattccacacctacatggattaattcacattaaaaacccacatgctttcacattaaaaattctaactttttcttatatgatgtggtgtacaaagtataatattattgaaaaaatttcataaatttttatttaaataatttacaatgcaaaaaccatgtgacaaatcaattttataacctgctatttcataggttttattttttgaaacttattttcaacaataaaaattaaagattatttcacaaaaacataaaaacaacaacaaaaaaaaaaataacaaaatacggatttacggaatttaaatattttacgtatttcttgatttatttacataaatacggtatttttagttctaattttgttaatttgttgttgtattatttgttatatgtatgttatttttgtttgttattttgtatgtt

SEQ ID NO: 236339 - DNA, 1668 bp, Cannabis indica
cattctggtcgatttgaatcacatcagtatctttctgagcgaggatttcagcacgggctttggactgcatgatcgtcgtaacaatcttatcgtctactcctctccttctgctcagattgctccttaggtcatcacttcagcttcacaatttcatcttgaggccttctgtgatgccgcctgggcctcgaaccccgatgaccgtcgctctacgactggtttttgtgtgtattttggaggcacacttgtttcctggggatccaaaaagcagtccactatttctcggtcttctactgaagctgagtttcgtagccttgcaagtgttgttactgaagttacatggattcagtgtcttcttcaggaacttcattttccgttgactgtgcctcctacgatctggtgtgacaatttgagcactgtcattatggctgctaatctggttctccatgctcgcactaagaacatcgagattgatctctattttgttcgagacaaggtgcttcaaggtcatattcgagtacagcatgtgcctgctttggatcaagtagctgattgcctaaccaaaccaatttccagctctcgtttttcttattttcgtgacaaactcagtgtgttttctccttccacacttagtttgaagggggctgttatagataagaataagatagcctcaaatctgttagaagttggttagttttatggtattgttgagttgttagtttgttatattttgctctatttcctgttagtatataaccaactgttgtactcttatttctgtaatgagaattgcaattctttgtccctgtctttcttctcttgttctctttctctcgttttttatttttcctaagtttcaacaagtatattttgtaaaatatgctatcatatttttagtagataaaaatagcaatttttccttgggaaatctaacttttgaattaattattgaattacgtgaatgaagaaaatgaacaatattgatgtaacgaggccattactaactttggttaagaattgctataaaaaagattccagctgtaacatagattttgcgaaacttgttattgttaaggtttacaaaatgagtgaaagtgaactatgttaacactaaaaatataacgaaattacaaataataaataaaaccctacaaaaataaataaataaataaataaaagaaaaaagaagaagaagaaggttttttttgggcctttttcttctaatttcggcgtggtcttaaaaagggtatgagtcttttgtgtacaacttacaactggaacaaaaagaaaaaccggcaatttcaacggaacgggcatgaagccgttggtccccagtcccaccatttttcaatatttaaattatctttatttttttatttatttttaaaattaagatttattttatgttttcgcacaacgaacgagttctattacctattattaataaggcaagtctcaagaacaagtttttattgttattgatttgatttaaatttttgggaaattctaatttttttaataacaaaacgaaagaagaagaataaaatataggatagtatgtgcatgctcaaacaaacggacacaccgctttattggcgagttgtgcactctgctctcagaggtggtctgtgactgtgaactgtccttttacagatctcactctctctctct

SEQ ID NO: 236340 - DNA, 1691 bp, Cannabis indica
tcactttggctgcttcatggaatgacgactgaccctacaaactaacacgagtgtttttagcgtgctttgtcctaactcacacacttcttgggaaaaattcccaagaggtcacccgtcctgaaattaccccaggtcaagcacgcttaaccgtggagttcttttgtgatgggctattgaaaaacaagatgcaccttattgatataggtagtaccaattaatcaatttaagccttcttcaactatgtagtcccatacctacatagtctcagaatcatcacacatgaccttctctaggtgatgtgagattgtacagctcttggtctttccccttcagatcacgagactttgactgtcacatttatactagccgaacctctacaaaaattcctacttgcttttttcttcttccagagaaacaaaaggagtgcagagctagggttttaataaaaaaaacatatattgtattatacaaacactcgtgtgtaaggccaatacaactgactcatagattaggaattattaacgctcgaaccacgtaaaaattacttgtctattatttgctattttatttcttgtttaagttctactttattagtttttaaaagatctcgataaatattttagtgctttcattaagctctgaagaaagtttgctagcctccgtaccactttagccatggtgtttactcaaaaaaacgtaggcaagaaagctcttctagatactattatgaaggaagcagactcccttgcccccggtctccaaccaggtagtgtaagagaaaaaggtgttctcaatgctgagaactaaggagaggacactaaaaacatgtatgacagcgtcgatgatgaccaaaaccttaaagacagggaagaggagaatgatggttatggttacgtgaaagagaggtattataaagatggttattactatgaccatgacccaaacttgatgcgagtgactaaagaactagaagctactcagacgaagttagcagagcagaaaaaactcactgagaaaatgaaaagaattatggagcgtctccaaaataagttcgaggacttgacagagtttgtcgatgacccatcagtggaaattatggctgaagagcgtgctcctaggcaaactaatgccgaaacactactacaatgtgggcctttagaggctattttttcaactaaatttataaaattattacacatatggcgtcggttattagggaaataactgatgccataggtggacacgtgttactaaatcgtgctcctatggtgttatactgacgccataggtggtatatatacactatcaaggctttgttttccccacttcaaccttcttcctcatacacgataaccaacatccataacagcacccatatccacagaaaaacccttgccaaccacccataaaaaaaccctcattctccctcatttcttcacaattttaccccatttttgttttaaaatcttctattttcaatacctaaacctatattgtaaaaaaaaattagtttttttttccctctatcactacaattgaacctattaagaaaaaggtggtggtataactccgactactaattttggtggagaaaacattgaatctcaacatccattaaggtatacatatgatttttattcattctattaaggtacattactttattttcgtttttgtaatttttttttttt

SEQ ID NO: 236341 - DNA, 931 bp, Cannabis indica
tcaccatattttggtcgaggacccttcttcgtcccacgtaatgacacttaagggtttagagtagacttcgtcttctcgattttaccctttttttttcattttctctccttactttttttataatgtcactatctgtgggattcttgcacccgactcttgtcaaggaaaaccttgtgaggctttcttttttggcaagtgtctggaggggccctctttccagcggttaggggacccacattccctttttgaattagggtttggtttggggcctgactgctggatttttttcgatctttttcagatgcaaaatctctgcatccgttgctaagtcttcaaagaagggagagaagcacttggccaccccttgaggaggtcatgaagggtcacatggcccaagaggggcataagtcccgtgccaacgggtgggaagtggctgaggttcattctaccctgacctgcgcccatcagcgggagcagattgtggtggtcgcaggcatcaagccttcgaccttcgggacttaccaccggttgccccgagacgaggagacgcccaaccacaactacgggggcttcggagcctggagccagacgcatcttatggccggggccatgctccctctccaagattatttcattaactttcttttatttgtcggccttgcgccatatcaacttattcctcaagcttaccgcttgctttcaggcttgttgattttttacgctgcccggagctggggctcgcccactccggcagaaattttgtatttttacgaacttgtttctatccctaaaagggagataaacttaaggacgatttttacggtctccgggcgcatcccttgaatgagggcccggtcccttataattatcagaagcacgtgaaggagctaaaggactttagagaccaggccttgaagaaggctaaaagaga

SEQ ID NO: 236342 - DNA, 1305 bp, Cannabis indica
ttttttaaccatatttttataaaaaaagatggaaatcccatatttgtaaataataataagtttttccagaaaattcgttggcatgggaaaagtcaccggtgccgaaaaagtcgctgaaaaagtcattagcgcccgaaaagtaatcgaaaaagtcacggtcgctcagaaaagtcaccgtcgctggaaaagttgctgaaaaagtcaccagaagtagatgtcttaaatataaacaaaaatcgaaccggttctataatataataaatgaaaataaataacaccaaaaaactcaaaccggttataattgaaatataaccggttttgtaacataaagagtaaaaacaaataaaataaaataaccaaactaattataattaaattagaaccggatctataacataatgaatgaaaataaataacacaaaataactcaaaccgattataattaaaatataaccggttttgtaacataaaaaataaaaactaataaaacaaaataactcaaactaattataattaaattagaaccagttttataacaatgttataatgaataaaaacaaataacacgaaataactcaaaccggttataactaatgtagaaccggctataaagacataatgaatgagtatttttgaggtagatatgatatgggtgtaattatttagtgcattggaacatgttgaatggatttttttatttaagcaattttatttaactgatttttgtttgtgagtttttttcttagttgccttacggaaccagtttttttgtctggaaccagtttttttgtcttaaatttttaactagttgataaatataaacaatttctttatcttatatttgagttattgtgtgttattatttgtgtttatttattttgttatagaattggctcttttcatatttatgcctcaatattttctaaaattgatctctatttttttttttaaaaaaaaaaatataatcgattttatgaggtatattatgtgttatgagatttttattgtagaactagttttgtttttaatttatgtttcaggttttaggaactgatttcccttttattttttaattctaatatcggtttgaattattatgtgttacttgtttgtattcattatgttatataaccggttctattttagttataaccagttttgagttatttcatgttattagtttttatccattataacactgttatagaaccagttctattttaattataactggtttaagttattttgtgttatttatttttattccattatgttacagaaccggttatattttaattataaccg

SEQ ID NO: 236343 - DNA, 2872 bp, Cannabis indica
atatatatttctttatacatttaaatgtctaacaatacctggtttacaaactcttaatctctttaattgctataatcttttagcattgcctgacttgacaaaaatgaaaagcctcagacatctcaacaacagtggatgcgaaaaactgagttgcatggtgaaaaatggctcaacatactgtggtttaagtccgaacattcagcttaaaacattgccattgtttgctgtaggcagtcatcttgacacactccttttaagatggcttgagcttcaaggtagtttaaaaattatatacatggggaacattaaatctaaatttttgagactgaataccaatattagaattgagtcattaggactattctgggggagcgatgatagttgcacaaacataactccaaaaggcgatcttattttaagaaagttccagctaagacaacaaactgagccatcaggatcgtcttcagaaaatgatgtacaagatctttctaaaccaagaagagtgctggaaaaaatcatgctacctaatgctcttaaaagtctccttatcaaaggatatccaggattagagtttccaacatggaattctccttatttgaattctatccacttgatcaactgtagagaaagcacacatcttcctacctgtggccatcttcagtctcttactagactttcattccaacaaatgcatggagtgaccataattggtgatgagttctactctagtttctcatatggaggtagaaatgagatatcattccctcaactcaaagagttagtacttaatgattttcctaatttgaaacactggattagtccatattctggtgtaggatcttttcctatgttgaggaaattaattcttaataaatgtccaaagctagttgaaatgccaagcttttcgtcattgagtcatttggatgtgcaggactgtcatgcgagtatatttgtttcttttcagagtctaacatcacttgaaacacttgtaattgaaggagtcaaagacttgtactgtttctcaggaccatttcctataagaaatcctttgcttagaagcttggaaataaaatcttgtcctcagctttcgattttgcccgaagacttggtaaatctttctaatttgaagtcattggtgattcgttggtgtggagagctcaagtccttgccagcaagtttgcagtacctcaattctctagagtcattggagattggtgattgtcatagtctaatgtctttgccaggtggtgaggatagaggcttaagtaaccttcgctctttgtcgattgagaattgccacaatctaaaggacttgtcaatgggattccaacatatgacatctcttgaaatactaactattatgtattgtccatgtattgttgaattacctgaaactgttaagcacctgtctacccttcaaagcttaagcatcatgtattgccagcagctattgttcttatcagacgaattacagaatttgatgatgttacgaagtttggaaattcgcggatgtcccatgttaaaagttttgccaaactggattgaaaaacttgtttccttgagatccttagcgatttcagactgccatagcattacatttttaccagaaggtatgcaactcctcactgctctccagcacttgtccattcatgattgtcctcaacttcagcaaaggtgtaaaccagaaaatggtgaagattggccaaagatagcccatgtcccccataaacataccgaatcacctcgcctaaagcgtccaagagaagaaggcagcaactcttcaaatcattgaaatgaagctgggacttccacaaattaacaagtaagaaacttttggatgcttaagtgattaagttctgtttgaccatttagttttgatgtaaatgatctctttcctcaaccctttaatgtaatggtgttaataagttaattttatcaatacatcatcaaatttgattccaatattctatatagaaggttaattttttttatgcaggcgtggcattttattttctcaagaacaactctgaataaatggtgagcaagaaaccagagttatgaggctgttgcaagttgtggtaatggattagctgtttcttttttctgaaatcaatctatatgattttgtaaagtgaggttgtgtataattgagtaggttgtgacatgatttaattgttatgtatctgttattaaagttagctcttagtgatgtaaatgtagaaatgacttgagtgaataattgagagaacatgtttgatagttgtttgtgtaaattataactgtggttatgcatacgttatatgcctaaaacagtacttttgttcttacaaaagctattgtaatcaaagtgaaaaatgcattaattctcttttaagagaagatcttgatttgttttattattcaactagagaactaagccgcgcggtcttgtaatttttttaaattcttctaattcattttttttgcttaatgtactaattcaattaattcaacttttatgtactaatatgatccaatacaaatattaataaaattttaaaataacataataacctaatccaatttatttaagtctcaaaatctaattcgattagtaatttgattgatttgtttttttaattgaatttttagttctagaacatgatttcaatattaacttaaacatatacaaaatactacataaaaataaaacattaacaatcatttaagtaatagttgtactacataaagttatcaactttttacttttaatgtatataatttttgttttaaaagtagctaataaattaaaaacaacaattaaaatgtctcaaaatattctacacaacaactaataagatgcactttttttttctagaattttctaattagg

SEQ ID NO: 236344 - DNA, 884 bp, Cannabis indica
ttttctgattttataatttaatttaaataaaaaaaataacaaatttaaaagttagcaaaatatcccatttctatttaaaatttcatgaataaaataatcttattttaaatttcaaataaggtctaattattaaaaaattaaataatttaaaaaaaaatatttaaatatctgaccttaaattttaaaataagacaaaataatcaaattttaaaaataagataatacattaagcaaaaaagatagatttttacctattctcaaattcaaatttcactaatatcttaaattaatttttttaaaaaattaataatttaatgctgataattagatttgaatttcgaaaagtaaaaatcaaaatacaaaactacacaaaaaattcgaaattaattccatgaaaaagcataaaaaatgaaaaaaattgcatttggtgcggatggtatgcattacatagcgtgcacaagggggatctagccgagaaatcacggccctggaggctgcatgtagcctttccgtgcgcggataggggaattcggacaaccccgtgcgtgtttcttcggacacgcagtgtccgaacacgctgctgaccgagtgaaactcggtgtccgcgcgcgtgtgtggtgcacacaatttctaattttttttttcaaattttcaaaaatcataactaattcaaataaaatcgaaatcaagttctgtaaaaaaaataaattgcttaattttttccaaactatccaacaaacaaaattctagaacgaaaattcaattatttttcataaaaatttcgcaattatcaaacaatcataaaataacacatatatcaacatgaaaccatccaaatcacacacaaatcattttaagtccaaatttcttgaaagtaaatcaat

SEQ ID NO: 236345 - DNA, 519 bp, Cannabis indica
aagtgttccaagtatattaggcatatctaatgaaaatgagtttcacactatggtttgttttgtaaatgatttaatttattgtacatatatatatacttagtaagcaaaatgttggaattttattttgaccaacacagtttaaagaaacaaataatacaatagtgcaaaagtgatatttttcaaaatttaatattttatgcatccacaaaataattggtattattcaaaatctcacaaatgtaatgtttcagcccaatatgaagagccgaataccaaggagtccaacaacaaatcaagtcaacattcaaagagagagttgactcttccctaatcaatttatttggcccacacaattaaaggcagccaagagaaatcactttctctctccaatcaaggcccccttttcaaagtttgctattaatgggttcgacccactcactcaaagacagcccaacaagaagacaaaccctaataacctaatgtaaaaggtaagttcctaaccctagcacactaattcgg

SEQ ID NO: 236346 - DNA, 814 bp, Cannabis indica
gcctagaccaatggcccaacaaaggtcttaatccgatcttccctcctggagagcacaacctttcgggcagacctagaaagaagagaaagagagcaggtaatgagccaccaccaccaactacaactaaaagtagaagatttggactggttatgcattgctccaactgcaaagaagctggacacaccaaagacttcaaccccacagccacagttatttgatttacatattgttattcatttttacttattgatttttattttacataagtttggcaaataaaattatttcatgggtgagtgttactgatttaattaaattatgtttgcctatataattgtacaaaggaacaccttgatttccctacaattttcaactatgtttaggtggagaagaagaaaggaggtcgcccaccttccaaaaacccaactgaggaaactttaaagaggagaaagaggaaagaaaaatagttggcaagagaggcaagggataatgcacaagaagctccaaatgcaaggtcttccaatccaacaatttgatatagaacactactaaattagtgtttgaattgtaattgtgttttttttttatgcaagtacaggatgtatgaattgtatgcagtatgtgcttcttttttttttactgcttaatttagggagttttatgttttaggatgcacatatggactatgtgaaattaagagctgctgcctttgaatgttcttttttgggttaagttaagtgaacatcagaagcacaatgacaagtttagtttgtaatgaactataaactattaacaaatcagaaattagaacaaa

SEQ ID NO: 236347 - DNA, 1181 bp, Cannabis indica
tttatttatataaatgtataaaaacattaggaaatattaccttctattcacagtaatatgttaaaattagattaacaataataaaaaataataataatatattagaggttagattaataataataataatctattagaagttatgttagttataataataattatgttagaagttaatttagttataataataattatgttagaaattaattaaattaacaatatatatattttccatattataataatagatattgtattagatgtttaaattaatataaaatatatttacagaataattaatatatatgtataaaagaaagaatatttatatgagtatgatgagataaagtgatcgtgttgataacgtgttataaatttagacagatatgagtaataaattttgtattatttttctgctcttcactttgcttcatattctttatcaaagttacacacatatataggtgaatacagggtaaggctgttgtcacgcatgtattttttgcgtgactagtgccgcacacgtttatagccattcgattgtctcaattttgatctaaatgctgatattaggtaccccatatatcattttttatataatattttatttgataaatggaggagtatttgacttgaaaattggaagtgtaaccggttgcaaactttttgatttctgcccccatttagtaaagtgaaggtttctaagaccaaacttcactttcagctcaaaagaacttcactttcagctaaaaaactcactttcagcttaaaaaatctcaaacttcagttatctttcattattttaagatcatcaccaaggcattttatttcttttattttcattttcgtgttcctattagctctttttaggcttctaaacctcctttaagaacaaggtacctttgaagaaggaggaggagggggcgtggggaagagagaaggggcctggaagtggagagttgccaagagcacgtggtgcaacgggcaacactatgtatccaactatccatccatggcttacccaagatgaatagttcaaattgtcacgcatatgatttgttcccacaagattagaggtccgagtccctcttggatacctatagagaaagagaaatgccaaggggcaccttatggtgcaacgcactacaagaggtgacataccgctattagtgcacatc

SEQ ID NO: 236348 - DNA, 714 bp, Cannabis indica
acattaacgagatgcacttgttatccccctacgaccgaaggccaaaatgaagaccagatctgtgatctccgcaccttgaagcgtcctggtattattttcactaatggccattctctatttattatattttcattttatcgtcaatgtttatggactgagttgttggagctcgttcactgttagtatgatatagtgacgagctcgttatttttctatgctcgatttttattcttgttctctcagtctatttgttctttgtttaattattttatttttatttctagatttttgttgaaatattgttggtatttttaattttggcttccaaatcttatatattattggtagccgaacttgttctttttgtatatgcagagattgaaatttgaataagaggctaatttggggtcttatgttgttattttcttgagtgttatataaatatatgtgtatataaattgatttttggttgttcttctaactctgcattgaacaggtatggcggagcgatcgacctaggtgagggtttgttgtcagcgaccaacgacttcaacaaagcatgcatttgtttttgacaaccaacgactttaggtacctgcctcttctttttcttcttattatttcgtaatcatattttctttttgtcttctcaactctccttaaatttctctatggatagatctttgttatatggtattacctctgactctcttg

SEQ ID NO: 236349 - DNA, 857 bp, Cannabis indica
accaaggagtcatcatcacgccagaattaaattgaaattttggtactatatatataattaaacataaactttgctgcatcttttctttgatttcccattttcaattaattattttgtatgtatccataggataaatagtaattcagttgaatgaaaacatgtattcgtatgtaccatatatatagtccataacaatataaatttaaattatatattcatttgaaaaaaatctatttattagatccattttagtgggcatacaaatattcatttcacatgcattgaaatgaatatttgagtggcagctaaacaattttttcagtcaaagtatagtactaaataaaaaaaaattaattgttatatagtacgtgtcacaaaatacttttagaacatgtagttttacttcttttttattcttgtaaaatttaattcttgaaatatatacttgattatttttagaccactagattaaacacaatccaagagacaaaattaaaaacaaaaataaatggaaacaaaattaattgaactttggccaactgtctctcccttcatggctctattttgtgattgttggatcagaatcgaccagatctggtgtggggttagtgttggtggatggcctgttcctgataattgtgatggtgtttcaaaatttacgatggtggtgtttggtttcttatttaattttctttcattttgttatttgtctttttatttgtaaaagtgtccattttactgtttttcgattttaataacgatgtgtttatattcttgtttgatctccaattctttttggatttagacgacgcacttgttattttggttttttttccagtgtcttttgacatcttatt

SEQ ID NO: 236350 - DNA, 999 bp, Cannabis indica
aaaaaaattattaaaatatattagtgttgtcggaggaatttggataacaccaaattatgcgagtattcaaataaagttagaatactcaaaacatatatgcgagtactcacttagaacagtgagtactcaaatataggctactaaataaatagaaacgaaaataaaaataaagagaagacaagagaattatagtggtacagttaaagcttagtttgcttagtctacttttggtaatgatttcaacttaatttatttgatttggatcacccctttatatagaaagcaagtgtcctttaggattacataactgatcggtttattagaaatgtttttataagaaatgacagtatttaatcaaaataaatggttaagggaataaatgaagaacaatttcatccattcttaaattaagtacaacaatgtatgttacttgataagttgcgacttgtccattcatatttcaacacacgagcttgcatgctctacggcgttgtattcacagaatgggcctttaggcctattttgtttgtatgtctgtgttcatctttgactgtatagtcgaacattttatgcattgacaacatggaacatgcgagcctctgacgagttgtcgaacacattagtcgttcggaccaaacttatgtaaagaaacgatctttacttgtcacaagagaggcatacttggtcatcgcatataatcggtattaatacgcgatttgcattaactcttcttagtcctacttattctttcaactatctggggcatagtatacggctagaccttatctcgattgcatcttcttacaagttcacatcaaccgaggttagtcctatctgagctatgtactgacacatcatccttttacatcgagtactaagtccacgtgtcagctatttacgagtctgtactcatatttctaggaaaaaatttagcactataacacatgcccctaattttacaatgacaactatttgtcaatagcaatactatttgatagg

SEQ ID NO: 236351 - DNA, 733 bp, Cannabis indica
tattgtcctcttttatttttacattcttttttaaagtatcatttttacctcttttttttaaataatgtaccaattttgcccttgttactttaaaatactctcaatttgactcttatatcagagtattttgggtacaatacatatgaaaagaggtatatttcaattaaatataaaattaaaggtaaatttacttaattgattaataaaagtgttacttttcaacttaacccataatctaacaaatagaaccgattcaattggattagatcagatggtaaaatttaacttttaatatataattagatcggatttacatagtactaaaaatattaaatgtggtccaataaacaccacttcaaaagaaaactcttgattttatttgtttatatttatttaagataaattattaatttatgagtaatatgttccttttttttttgaatggtaagtaatatgatttttgtttccaaataatatcattatcaaatcatttcattgttaaaaaatttcttttaacttccgggaattccgttcaaatttgactaacataaatttgatgtgacattgttagtgatgatacatgaatgctacagatatttaaatctacacacttttttgtcttcataacataaatatatatatatatatactagatgagagttacgttgcgagccacgtaaattttagttttatataagttctactggtttttgtttaagaattcagtaattaa

SEQ ID NO: 236352 - DNA, 1067 bp, Cannabis indica
aagggaaccttcctaggttatgccttaggtatcaaggggtatagaatttacatttccaagaagggtagaccaaagattgtgattgctagaaatattgttttcaatgagttgtaatatcctcacttgacgtctgggaaaggtagtgtgtctccgtgtgatgcaggaaaagtaggaaacatgcacgcatggaaatggaatatgaaacaaataatctggaagagagtttacagccggaagtgattatggagctggatcaaagtgcgcagatggaagctaatgctgagacggaagatatcaaagaccaaatagatgttctggaaggattcagataggcttgtctggaaggttatcatttggcgcgtaatagaaccaagagagagatttaccctccggaaaggtttcctgacgcggacccaatacatttgcactggcggtagtacagcaaattgaaattgaagagcccgaaagctacgaagaggaaattttaggagaaaacaagtcaaaatggctctaagccatggatgaagagatggattcactctagaagaacaagacttgggttgttgtaccaaagctggagaattaaaagattgtggagtgcaaatggatctcaaggtaagagagaatcaatgaaaatgaactagtgtggttcaaaaccaggttagtagctaagggtattagtcaggtggaaggaaaagactacactggaatcttctcacttgtggtaaaatacaagacaataagattgatgttgttcttggtagcttaaatggagtttaaagttcaacaacttgatgttaagactgctattctgaatggattcttggatgaagagatcatgaagcaaccacctgggttccgggtgtaatagaaaggagttagtttgcaagctcaacaggtccttatatggtttgaaacagatcccaaataatggaacaaaagatttgatacttatatgcaacaactcaggttcaaacgatcaacatatgatcactatttatatttcaagaatctatagaaatatacagttgtgttcttattgccttatgtggatgacatgctcataa

SEQ ID NO: 236353 - DNA, 1453 bp, Cannabis indica
accccattagtgggctttttgcaaaaactctaggcagatcataggcatgtccataccttccctttagcctataaatacccttatatttccatacaaagggggatgaaaaaggaagatagtcgaagctctgctaaaattactctaaactttcctcttatccaagagaaattaagagtacagagttaggatttcttgcataaacattgtaaaaaagatcatatacgccttttaaggctaatagactgactcgtgaactaaggctcattaatgcttgaactacgtaaaaatctccatctcctttattattgcattttactatttattaagctcttattatattagttttaaaaaatctcaacaaatattttggtactttccttgagagctgaagaaaaatctaaacccatagtgctattataacaatggtgcttactcgaaaaacaattaccaaaatgactcctcaaggcagtctcaacactgtttggaagacgtaaaccctctttctccagagcacgctcagctgagcaatgtgaggggaggggatacattaaaagatgacaactgacaaggtgaccccagaaaacaccataagcatgttgacgataaccaatatgctgatgagggaaaagatgatgatggagagtacgtcaaatacaggtactacaaggatgggtatcactatgagcaagaccctaaggtggatcgagtgtctaaagagttcctcgagactaaaaagaagttggcccatcaagaaaactttctcagagtgttgctcaatagtttgtggaaggttttcatcaaggtaaactctagaattcttgcttgaatgatgtttaaatttcaagttaggtttggctatgcaattttgaaagtcggtggttgtttatggtaggctttgttctagaatgatttctgaggttattttgaatagaattaagttgattatagctggttatgttggtttgagagaagaatgagcaagtttgagtttgagaactcaaacttgactcatcaatggtagttttggattttgtgtttgtatgttacttttagtgcttgaattgtgttcttggatgttgttatgggtgatctggaaggtttggtgaagtttgggtacgaattgtgcaagttttggaattgttggagttttctggtgtaaaccgattaaccggttctacaggtcatgtagaaatggttaaccagatcacaggcaggatcccaaaaaattctatttttctaattcgtgtcattttttagatttttggttgtggtgtttcttcaataattagggtattgtcaagttgattatcaatatcaaaacttgtagttgtgagttaggtatccatatcgggttttagcgtgttatttacttatttgtgtatatgtgacatagggcatccatctagcacgtggttttttgtttaggtcgaccagcacacgaattcgaaaacaa

SEQ ID NO: 236354 - DNA, 804 bp, Cannabis indica
gatttacacatttgtggagattttttcaaattcagaatgtacaatgacgttatatatgtgaatttttattttctcggtttgtgtttagtagcagtggaacgagatgttttgccattagagagtcacattttatatggttaggaatattattaatgttgcattattgttaggcattggaagtatcagaagtggtcggggttgaaaaaatgaccaaactacccttagttgtcatttaatctttgaatttttgattaggggcaaaagggtctttttgccaggagagatttttgtcttttgtgaacattattatttaagtttaataaactatttagttagtggatccttttattagataaacataagcatagaaaaagaaaaacctagaacctctctctctatttcgaattgtcaagaactagcaagaaagggaaggacttttagttgtgattcaaggaattacaacagtatctaggtgtttaaatctaaggtatatcattctaacctagctattccttgttttcttaaggtttagttaagttggtgaatgattttgagaatttaggagttgtggatgtgtaacctgctagatttcacgtccttgagttaaatgaggtttatgatggttgatttaagttgaattggtaggttatggtgatgatttggcaaagtttgaggttcagtgtttaaaactgaggtttattgcttgaatttggttcattagagtttgtacatgtattctagaagtttttgtgaaatttggagtttaattgagaagttggcggcaatttcggtggttcttgcact

SEQ ID NO: 236355 - DNA, 1418 bp, Cannabis indica
atcagattagatttgaatgcagttcgagccctcacatctgctgatcatttggcttttgaggtgaacatcgaagaacctttcaaatggttctcccctatgtctataagaagcttgtttggattttaagattttgtagttagtgattcacaacattgctagtgggctaatacacatgccgaatatatcacaaggaaaatctcacctgagcatgtggatcatggatctttctagtcacctcaacttcttataaattggaaaagcgccattgattaccatacttgttgtgactaaatgaccactatgcaatttgcttgctttcagatgggagcacctgaatcgaaaattgcagaaactacatattcataaaattgcattactgttaaataggaacaaaaagaataaaaaagaatataaatctgaacacctgaattgaaaaaagaataaaaaaatcaacttactataagaggtatacttgatcgctaccaacaaagaatgaccactatgcaatttgcttgctttcagatgggagcacctaccattattgagtttttttttttattcagatgggagcacctaacaacaattgaccttgaaatcaaaatcaaatgtaacgaaatcaaatgtaattacaatgggaaagcattgaataaaaccaaaagttcgcaattaaaaccttaaaaaataaaattttcaagcaattgcaaatttgcaattaaaaacacctagaaaagttatgcactcaccccatgctgccgcggtacttgagcgtataaggcccactctccaacatcctcccgaaatggctatgcaccttgtgtctatcctttccactctgatccataagtgtcaattcaaacaacgccctcacatcagttccctcgctagcgagcgcgataaacaacaacacatacattgcattatcctcggcactctttccatcggggtaaaagtaaattgcccacgagtacccaccaacattgaaagtatcagaagcttccccatccaagacccttcgaaagagaatacccattgatcttgaaatggtgagtaacattcacagtctcggtgatcgaagtcgaggtagtagtcgccagaggagaagccacgacagatgaagaagacgacgatgagggcttaccggtttcacggagcaccttacccatgcccaatccgaggaaaaaaggaagaaaaaaaaggaaaaagactcacgtaaacaagacttccgaaaatagaaatcaggatctagggtttacaaaatacgaaatgtgaaataggggcttcgaatcaaaagaatttataaaattggaaacagaagaaaaatcaaattgttcaaccaggaagtgagataaaataagagaggaatgctcggttggaagaggcaattttcgggatgggataaataaaaagtcacccaatcg

SEQ ID NO: 236356 - DNA, 980 bp, Cannabis indica
tcaagcttggatctctcatctttcggaatataaacaaatgctctgcacccaaagactctcatatgaccatatgagacatttttgcctttccatactctctcacgcacatcagcgtttagaagaactgaaggagaaaggttaatcaaatcaactgcagttctcatagcctccccccaaaaggacttaggtagattggtatgggaaagcatatacctaatcctttgtttaattgttctgttaattctttctaccaaactattatgttgaggagtttttagaactgacttcttaagcttgattccgtggagtctacaatagtattcaaatggacccctatactcaccaccattatctgctcaaacacacttcaactttcttccagtttctctttcaattttggcatgaaattctttgaaagcatcgagcacctggtctttagactttaaagcaaaaacccaaacttttctagaatggtcatcaataaaagtaacaaaataaagtgcacctccaagagttctagttttcatagtacagacatcagtgtggattagatcaataacattagatcttctagatggtggatgtgtatgaaaagaaactctatgtgtttttccagctaagcaatgatcacaagttttaagaggcgtacctgacaatggatatcagaacggcagaaaaaaacgtgtttcatgaattcttgttataaaaagtttataaaagaactatatactacgatgcctcaaaaacataaaaccaaaatacacaatagatacagcccaaaacaagtcctgaaaactcaacacgcaggccggtgaggtcaatatgtacattactggagaagactgtcacctcgtggttggtctagcttttctttgtatttacctgcaccacatagcacctgtgagtcacaaggactcaacaagaaaagtaataataataatcatatagtttattagtcaaatgttgtcatttatacacaa

SEQ ID NO: 236357 - DNA, 703 bp, Cannabis indica
agacccaaatattttttcatggcattcacaaatgagcattgaaagatgtctgtggaaaaagacctgtgacgccaacgtggtatttggagagaaagacatgaccgatttatatgattcagaagttggcttgaggctcggtgataaatatccaagactttctttattgcaagacatgaactttcattggcatgacagaaaaggagactgtcatctacaaaaagcaagtgagaaatcaacgaggcatgtctagtgagcttgaaaccactcaactgtcctgcttgttcttcaaattgcaacaatcttgaaagaccttcagaacagatgaggaacaagtatggacacaaaggacaaccttggcgcaagccacgagttggggtcaaggatcatgaaacttctccattgacagtaaaagagaaaatgtttgttgagaggcaagtcataataaggctgatctattattctacaaagcctattttcctcataacttctttaataaagcgccattcaactcgatcaaggccttactcatgtccaacttaagagaaacaatccccttccctctcgtggttccgtttttaatggcatggacaagttcgaatgccactaaaatattatcgatgatgagacggttaggcaagaaggcactttgagtttccgaaatgacatgtgggagaacaaccttaaatcttgcaacaagaacctt

SEQ ID NO: 236358 - DNA, 524 bp, Cannabis indica
attttcctataatttgtatatgtttatatattctaattgagaaactctctcaaggcaaagttgttgccatcatactatgatagatttataatcaaaatactaatgtgaaatttattttgggcaaagcatcaaatttccatcgaattttgagtaaactatcgaactaaattccatcaaaattaacttagaaacacaatttgtgtaaaccatggaaacaaatgtaatcatgtctttctaacaaatgcatctaaccccaactctcggccaagactttgtcttggacttggattgcggcctcgatccataattggaccacgacattggacatcgtctgactctttactagtaccctaagttttgtttaggggtgttcataaaatatccaatctccacgatctaatctaattaaattcgcaaagtgcggatatttgtatttgtgtagattggatgttgattaacgtgtaaaagtaaacgatttaatttaattaaatttcgaactttgacccatatcttggaccttggac

SEQ ID NO: 236359 - DNA, 746 bp, Cannabis indica
tagttgtaaatatataatctatgtataatggaacggtctccaagagaattattagaagcatagtgatcatatcatgaggttatcatacatatatagtctatttcaactagaaagagtatatgtagtctcttgttcctcaccaagtagtatacaaataaataaaagagtctgactatgtacacaccatgtcttataattacatatatagtaaaattatatggtgcactcactacaaaattaagttagctttatactctttagttataatataaattttttgtgactaaatatcactttagttttcaaaaatattacttataattaaaacatagtatttaaatacaaattgtcactattttagttttaatcacaagattaaaaatacatttaatattacgactaatattacatttagccacagaccttttagttacaacataaaaataataatttataattattaatcacaacattatttttaatttcagtcacaagtttatcgtggtattaaaagtaagatttacccctcattattcttcctcacctaaaattaatttttaaaatgaaaataaagtatggttcaaccagaattagcaaaatttacccctcattattcttcctcacctaaaattaattttagtaacacacataaaaaaattgacactatatatatacctgcaactcttctagttaggaatgtttattggaccacattcaatatttttaggcctatccagactcgatcc

SEQ ID NO: 236360 - DNA, 1617 bp, Cannabis indica
tttttaaaagtggtgcactgatatactcctatctatttttagcattcaagacactttttttagtctattattatttcatagtcgtgtacattatagttattaaatatagcttgcaaaatttcaaaaaatcagagaaatttaacacgccgaaaataaaatttaaactgtgtgttgtatgcatcactttttcatttagaggggtacattgttgtgattttagttaattaatatgatattaattttttaattttattaaaaaaataatataataataaggaatattttttagtgtaatttttggtgttgtggttggagtggtaatactttttgacactaaatttggtgatagtgtaacaccaaatttagtgtgctccttggagatgctctaagcattcaacaccatatctcacccgttgttatcaccgtatctcacccattgtctcgacctcatcgtatctcgctccttgtcatcattgtatcattaaatatcgtgtctcacccattgtcatcacaatatcactccaatcaatctcttacaagtttttgaatagtcatcttgttgatgaacatgccttcttaacattataacttccacactcttggagttgtttgaaagcttttggattaatgagcagtcgtttaatcctattaattattgttaatgcatatttttgttaaccaatcatgagcctttttcgtaataaatttaacacaattattataatgattaataaagtataataaatataataataacaccagatattttacgtagttttccagttaaatctgcatactccacgactctatcttattccagattattctgaatatttgatacaatatacaatttgtattctttttccaattgattttttttaatatcccccttttctgtagaatctgcccttacttataagaatagaggtttgcagtcatttacatttaaatttaaattgcataatcgtttcatgaaatgtgagaattgatcacgaattcatttaaccacgtgtggataataattgataaccacataactgcttatcattcttgtctttacaaacggttgatgctgatttggacaacgatatctcgctttgcctatagatgatcaatgctaacttggttaatcatatgccttccaacaatggcatgagcaccaatgtactgagcaaacttaagaactactcttttaccataagacctcgcagactgaacaatcatgtcttgcatatttctaagatgatacacttagttattataatgtgaaaaatacgctaagtgtttaacaattgattcacctcgtatatattctcttatgtatatcgaggtgggtgcctcgctatatattgtccgtggttgattcggattacctcaattattcttttaaaataaacgaatcttattattgggcctatgtacttcaaggcaagatggtgacttatcaatatagatattaataattttgtatccttgtactcgcctaaaactatacaataagcgagttatgaatatactctattaattctatatttaatgagttatttcttttcgcattaaataatataacgttgttatattaggttgttcatattccactaattgacacgtgtcacc

SEQ ID NO: 236361 - DNA, 814 bp, Cannabis indica
cacaaaatcctcctgactggtgcacagatggcctgtattcttttgatgaagcccagtttcaactacagcctttcccactgtcatcctattccagtttcagacctgctagtgaagtccaagcccatcctgatattgcccaagccaatgtttcctttactgccaactctgaatgtagtcaaaataataacaatttgtttcaaatgtggcataatagacttggccaccctagtgagaaaattgtaaaatctgtgcttaacacttgtaacattgctgtcagtaataaaactccttttactacttgcaatgcttgttgtctaggaaaaattcacaaatttccttttccaaaagcatctgacactgtgtacaatgaacccctacaacttgttgtcactgatttatggggtccctctcatataacctcaactaatggctataaatactacatccattttttagatgcctacactaggttcacttggatatatctccttaagaacaaatcggatgctctcaaaaccttccaaacctttaaagctgaagctgagcttcaattaggcaagaaaattaaggtcttacaaagtgattggggtggggaatacagatcattcacaccctatctcactcagtgtggcattgttcatagacacccttgtcccacaacccatgaacaaaatggattggctgaaaggaaacataggcacatagtggaaaatggcttaactttactagctcaagcctctatgcccttaaaattttgggatgaagcctttagaacagctgtatacattcacaatcgacttcccactactgttct

SEQ ID NO: 236362 - DNA, 726 bp, Cannabis indica
atagtatctttcaaggttttattaacagcttctacttgtccatttgcttgggatcttgccaccaacatgaaacttttgataattttattcctttcacaaatctcggtaaataagtctccatcgaactgagtgtatttgttagatactattttaattagaattccaaacctacaaataatattcttgatgacaaaatcaagaatttttttgcatgtaatggatattaagggtttcgcttctgttacaacaactaattttatgccacctcgacctgtgggtaaaaacccaatcaattcgatcccccatattgagaatggatatggtaagattatcattcttagctcggtgggtggtactcggggtatatgcaagaaccgttggcacttgtcacatctcttaacaaatttgtgtgtgtctttattgatagttggccaataataaccttgacagattatttttttagataggcttttccaacctgcatgatctctataaaagcctttatgaatttctctgataatttcattagcttctgtcggtaacacacatcgcagtagaggcatggaatactctctcctatacaattttccttcgactatcttttatcgaggaattgagtataagagttctcgtgcctcattttgtctatggggagctctctatctaatagatatttgatgataggggtcctccatgtagggctcgcatctatcatatcaatatttt

SEQ ID NO: 236363 - DNA, 524 bp, Cannabis indica
tggccagatctaccacacaattggcaaaccacacgagagttactcaagttccctctacctctagaggcgccattgcctctgcctctgccacggttggaattgttcgagttaccagaggtagggggtcgactggtctgggaataaccagtcgactgtgacttcttgacttgagtaaaatgagcttgaggtgcattgagatccaacaaggccgtagattgagttaactcaagacgcatttcatgattttgtaacataaactgcacttcttgaagagtgagtttatctttagaggtcaaattgaccacaacagactcatattcatggccaactccagcaagaacatacaagattaattgttcttcagagaccgaattcccagcagctcgaaggccatcggcatagcctttcatcttgagcatatactcattaatggacagagatcctttctttgtgttttggagtaaagacatgagatggatcatgcgagccttggagcgagtgttgaataattgctccaatgtttc

SEQ ID NO: 236364 - DNA, 667 bp, Cannabis indica
aattgatactaggttcttctaagaattggatagggactacgttagccttatctgttactgtgttacgcgcaagtcgagctaaagcgtcagcaggtatgtgttcttctcttggaatctgcctgagggtgtaaccttgaattttctgagcaggtattgtatcttccttagataggccatcattttctctcttcacgcctcgtactctcctgaaacatgattcactatcaactacgaatcactacgatctcaatgtattcggcacgtacctcccaagaaagttttagtccagcaatgagggcctcacattctactttgttgttggaggcctttaacctaaatttgactaatccgttcaagcgttgccccccaggcgtgacaagggcaattcctgcaccaaaaagtttgtctttggctaacccgtccacgtgcaatttccaggtagttcgatcttcggtgttttctaccaagggttcttgtactggccctgggttctcccttatgttgctttcttctttcggtgtgcactcaactacgaagtctgctaaggcttgtctcttaacagctgttagggattgaaagatagtttcgtattgacccaactctattgcccatttgagtaaccaccgagaggcgttaggtttttttagtacttagcgtaatggttggt

SEQ ID NO: 236365 - DNA, 1011 bp, Cannabis indica
atgagtaattggaaacatgatatacaataatagaattgaaaatttcataacagctcaaatatattagtttccttatagtgttaattctaagagtgataacagttggatccaaatatgtaatgagttataaattaactattcacattaaattaatatcacataaggaattcaagagataattagaagggtaaaataatatttttgaccaactctaattatgagctaataattagaggacaatctacttgtaataattatatcaatggactactagtaagaattatataaatataattctatattgtttcaatttcatattatagtagagtaataattgaattaatataccagattattttattgatgagactcgtaatcaagtattaatttattagaattttaaaatataggttcactactacaaaaactcccttttaaattcatcaaaattggactagataaacttcccaagtctattttatgttagacattataacctgggacataaaaagaatattattttagtctaacattgttagactagaaaaatatttctagtccaactatgttggacttgaaaaacagtcccacaacttaacctctttctagtccattaaggttggacgtgtgaagcacattaaactaatttttattaattttttttaatgaaattggaggcacatttttatttaattttaatattaaatataaatattttgaaaatttaaaataaatatatatataaaatattaaattaattataatttcatattaaaatttaataatttattataattgtagaagcattacaacccagattcaaagaaaaaaatacaactgtaaaatgtgcatttttcattttcataaaccaacaaacaaacataatacaacccaaattcaagaaaaaaatacaacagtttcaaacaaaaaaacaaaataaaatatctatacacaaatcaaagattgttataacataaatcaaatctaaaaaagaatgaaaataaaaatgat

SEQ ID NO: 236366 - DNA, 1083 bp, Cannabis indica
tgtctctctccttctctcttgttaggttgtgcctaagaactaggaagaatttagctttcaaatcttcaattctagggtttgtaataagatttcaagaggtttgatcttaaggtaagctttaaccctagtttttctttaatttagtatgttttagttggcttagacatgcatatttgtgttttagttgttgtttaggttagatatgttttgctgtaaatttcttaggttattttgaggttgtttaagcttattgggttgtatttaggtgtttttttgtggagttcaccaagtttgagctcatgaacgcaaacttgattcaacaatggtgattttagaatttttttagtgttctaaggttccattgcttcgaatgctttattatggaatgtataggtgttctggacctttatggaagttttggggaagttttaggttgatttggagagtttttgtttttttgtagtgaaaaaccacacgccgtttctatagaaatggcctaccatttttactagtgtagaacctagaaaaatggcctgccttttttcagaaaggttccccgttttgttatttttcccgtgtttcgtcgatacttaggactttgtcttactagatatcgataggaaaacttttagtttcaagttaaagtccccagaaaaatgatttagtgtatcacttatcagtttggcatatattgtgacttaggggtctgtaaaccatcgagcagcagttccactcaggttgatcgccacacctgaattcagaatcaggtaagaatagtataatgataaacatatgtcattacatgcttagtgtgcatgtttatggttaaatattagattacattgaaaaagcgatattagtatacattaagttatattagatatcgatgaatgtatgtttggcttaagtattgattgatgctatcacatcggtacgactagagtatcgagttgttgagttttgtgccctaaataaaactcatttcaatataatcaaatttactaattaataaagatcagaaatcgcttttatgatgcatggttcacatgatttacttcatgattatgtttaatgtataaattc

SEQ ID NO: 236367 - DNA, 1491 bp, Cannabis indica
tttatttagggtataaaacccaactgtatacggttcagtgctgaagagttttacttgatttctagtcttgattgtttttgcgattgcaataaactgttattttctcaggaatcaaaccagttagttgatgtctgttttcctggaacaaaaacttttgatcataagtctatcgaggatgcttttttgggctgtaggtggggacaagatgaatccctaggtttgaaactgtttgtgttgtatttcatccattgtttccttattagcaatactcctgataagaaagttgttaggtctgatttagatatcattgacagcagtcgttgggatgagtattgttgtggtagagagtcatttgagttgacgattgattcattcaaaggcataattgagcatggtatcaaaatgaaaaataaaaaagagaaaaagggatgtcagtcttacgatgattagtatagagcgttgggatgtccataggtgttcatagtctagttttatgaatgttgtcatgcgatggtaaatacattttacaaaagagttgcatccaggattccaagaattctgaattcgaccaatgatgttgggaccaaaaatccaactttcaaggacttgaaaggcaagatatttgattcgtcgttgaagtaggtgattttcagtttctttactgttttattttttttgtcccattttattaatctttgttatttttattttttgtgttttagatttactatgtttgtttcttgtttttatttcagtgaaaggttaagaacattcgtccatctgatgaagaaaggtagaagttgtacttggatggcttatttttagatgaatctatcgatgatcgtggtacaacaaagcaaacattcgagagtggttcatcttctaaaaaatttgattcagatgatataaaaatgtttaaatctaagttggaattggttattctagtcaagaatccttggccaaagatttcatttctttgaggtgttttgttgaccttaattttaagtctgtcataactgttattaaggatattcaggaaaaagttaatgtcatttatgatcgaccttctgttcaggcatttattttcatagtttttttttcatatattttttctgttattgttggttttttcctgttttatttcagttgcaatactgttttcaaccaggtaaagtcatctgatgaatttgttgcccaagattctgatgatgatgatgatgatgatgatgatgatgatgatgatgataatgatgacaaaagattaccaaatttagagaatattaaaattgattctgttgatggtgatgagttgggtaaagatggtggtgatggtttggtgatgctaaggttggtgctgatgtttcggctattgatgtggttcaaaatgaggttgttgcatgcattgaagataggtccaaggatgttgaaaatgtcaagggcaaagaatcaaatgtaaagggagattgattttttcaatggtttaagccagct

SEQ ID NO: 236368 - DNA, 1278 bp, Cannabis indica
ttttttttcagggtgggcgactgccccacctcgcctctatgtgggtccgcccttgcgaggcacgatgtttacttaaataaggcgtgtcgtttaccttatttaaggtaaaaagtgtgggtaataaagcgagtcatgtaccttattttaaggtagtatttttcatatttaatgattattttgatttactttcttaagacgcgtaatttacttaaataaaacatgttgtttatcttattttaaggtaatggtttgttattttaaagataaattatattttagtttatcgtatttgaggcacagtgtttaactaaacaagacatgtgtgttaccttattttaaagtaatagtttacctttttaatgataaattatatttttgtttattttatttgagacaaggtatttatacaataaggtggacgtttaccttatttaaggcaaggagtttactcatatagggcatgttatttattttattttaaagtagaaatttacttttcaaatgataaattatgttttattttaccttatctgagacacggtacttactaaaataaggcaagtcatttaccttatttaagacagaaagtttaacttatttaagtgaatccactaaaataaataaataattatggaaaaaaagttaagacgatgattagattaaattgattaaattttttttatatttttcattcccaattgattaactaataccttaattaagggtagaggttaagtaaaaattaatttataaaccaagtctttctaaacaatctttttatcttactaggaatttttgtaaattcttgtttggggttgacttattaatgattctttttaagataaatgaagacatgatctgaaatttcttgaaacaataaagccattaactctattacaactaacaattcttaaaacactatatactcttattaatatagatgcatgaaacgaaaaataatcaagacaaacaccatatgcatgcagttactctcaaaacaacattgatattttttttttgacgcggtgatcaaaatcacacaagattatcaaagcagcaatccacaatcggcgacagcacctcctcgaaccaggatagctcattgtctaaccgaagagcatgctttgccaaaccatgcgctacagaattctcatcccgagccacatgggacaaaactgctcccgaaaatttagacaataaagctataacgtcttcaaacagcaccacatcacattgaaaaaacaccttcccattattaactagttgtctttagagcaa

SEQ ID NO: 236369 - DNA, 3234 bp, Cannabis indica
tgtataaatgtttaatgggccggcccatagtatttttgtaactttttttccctttttgtatttttctgtccattattattcttagatgatatttattttttattttactacgtataataatattatataattttgctaccataatacaaatattttaatatatgtatattatattgacatgctacatatatttaattattatttttatatattttaattgtatgatatattatttattttaaataatatataattagtttctattttattatatacaatgatagtacataattttattgttatgatatttatattttaattattttatataatttaattactatagtatacatatattgagaaattttattgtaggaacaccatttttgtccttatgctagagatatttttctgtcccttgatttataatcttgtggtatggagagtgtagggagtattttaacactagtgggggttaatacattattattttttccaaaatatttaaaaaggacaaatttattatttattattttaaaaaaaattatacctcaacaataataaacataaatataaaaaaaccattattgtctccgttttcctttctttactaaccagcgaacgtttaaaaaaataaaaataaaaatactagtaaaagtcttgcaaatctggaattatacccaagcatatgagaaacagagtatagcagagaaaaatgtatctgttttacttgttattgaactgaagcttagaatacaagagtaaggtctatatatagaccaggtgagtcggtgaagactctaacagaaaaggatacaactaactaacttcctaacagaaaattaactaagtcttaatagcccccctcaagttagagtgtaaatgttaatgacacccaatttggatacaattttattgaactgagatggaagaagagatttggtgaagatgtcagctagattgttgttggaagaaacatgtagtagatggagtgaaatttgttggaccttttctcgaatgaagtgcaatcaattttcacatgtttggtgcgtttatgatagacgggattctcgctgatgtgcatggcaacagtgttgtcataatatagcttttgaggtgaaccccaaagtctttgagaatggcaaggatccaagtgagttcgggtgtggcattggccatggcacggtattcagcttctaaagaggaacgggatacaacttgttgtttttttgatttccaggatatgagagatttgccaaggaagatgcagtatcctgagatggatctccttgtatcttgacaactgccccagtcagcgtcggcaaaaaaagatagctgaacattggtaggagataggctagtttctgcaaaagcaatgatgttggggcaggaatttgtagggaaaaaaatgccctggcctggtgtctttttcagatattataaaagtctatgagcagcttggaggtgaggaactcgaggacatgataagaactgactgaggtgattgactgcataagtgatatccgacctagtaatagttaggtagattaattttccaataagacttctatatgcggtcgggtcagtgagtagagttcctttttctttgctgagttttaaatttgtctccataggtgtggaagtgagtttggttcccatgtaacctgtgtcatggagtaattgaatggggaagggtctttaagaaattgagatgccttctttggtgcgaccgatttcaaggccaaggaaaaaacgaagtttaccaaggtcttttagtttgcatttttggtcaagagaattagtaaaatgaatgatgttagttgtgttatttcttgccacgattatgtcattcacatatatcagaatggcaatgaagtctggctgtgagtgtttgatgaataatgagttgttagaatgtgattgtttaaagccatcgttatagtgagtgtggtactgagtttagagtaccattgtcgagaagcttatttaaggccatatatgttcttgtttagtttacaaacagagttaggaggggctttatatcccgggggatttgcatgtaaacttcttcatagaaatccccatgaaggaaagcattatttatgtctaattgatggatatgccaattgtggattgttgcaagagccaagaagattttgaaagtattgaacctggcaactggagcataagtttgagagaaattaatgccttgcctttggttgaaacctttggcgacaagacgagatttaaatctgtcaacatcaccatgttggttatatttgactttataaatccatttgcacccaatggcctttcggccagggggagtttggcgatgatgacccaagtttttttttttcgagagcttgggtttcattatccatagcctgaagccagtgctgaaagagtgatgcctcagcatacgtttttggctcaacttgtgagtatgctgctaagactgtagctaaaaactgagggtgtaacttgatgtaggatagaaatggttcaataggatgtgttgtagacgttgtgtgacatattaagtcttttaagtattctggttttttattagtgcagcaagaaatggatttagcaggttgaggctgctgttgctgaatattggcagtaggaagttgctagttttggggcaaggcaccagtcatctgctgggcatgaggtgcaacagcagggacctattcatgctgatgatttacaacaggctgcagcaggtcatgagatttagcagcagggggctgcggatctggggagattgcagcaggaagctgctgatttggagcagcaggaagttgctgattttgtgaatttgcagcaagaagctgctggtttggggaagatgcagtagaaaactgctggtgttgagggattgcagcaggaagctgctgtgcaggatgtttatagtgatcttgggatgatgaaacatgagaaaaatcttgttgaggagccattgaaccatgatgaacaggtttggctgctgatttttgttggatagttgagacagtagggagtacaagttggggaaatatagtgtcgatctcagatggggatgtggatgagaaaaaaggaaaaatgtgttcataaaacacaacatcccgtgagatgtaaatttgtttagtctcaatgtcaagaagcatataagccttcatgccatgtggataactaatgaagatagaggctctacttcttggtgtgaacttgtgtcttttggagagaaga

SEQ ID NO: 236370 - DNA, 2451 bp, Cannabis indica
acttgtgtataaatagacattcattcaataaagaaattagttctgggttttactctttctcacatactctatttccctctctgttctttcttttgtgttttttgttcttgatcttcatactctgaagttctacatggtatcactcaccattgactaacgtcattcatggagtccacgtcctccgatcttgctccagctcctagaacctcatcggctgctgccaatacgacacaacaccagctgaattccaactggaaccccttttcgaattctttaacctctgttctaactgttaaacttgatagaatttattttctgtcttggaaatctcaggtgatccctactatcattggacacgaactggatgagatcttgcttgttggcaatcctcctctccaacacttacttactagagaaccaaatcctgagtacagccattggaaacgcaaggatcaattgttactatcatggctgcaatcatcgatgaccaaaggagttcttgcatctgttgcaagtttttcctcctctcattctgtctggcttgcacttgaacaaaagttctcgagtcaatctaaagtaagatttcttcaactcaagaatcaattttccacaattcgcaaaggtgggcaaaacatctccgattatgtttacaagatctaatccattgctgactcacttgttgttgcaggttctttaattcttgatcaagatctcatactccagttactaaatggccttggaccagagtacgatccagttgtgtcagggatcactgtaagaagtgatgttctctcgtttgaagaagttcaagctttgttgctctctcatgagagccgacttgaacatcattcttccatgacagatctaacaatgaaactccaagcaaatgtggccttcactggatcaaggaacaacccctatcatcctcctcaatcttccaaaactagaagcagagtcaacatctatggccagaatccacaaatcgccctttgtgccaactctgtcttcgttatggacaacctacactagtgtgtcattaccgatttgacaaaaattggttcactcccaaaccaggatctgctagttcatctacaaccaccaataattctactcctcgtgcttacatgacagaacatgaactcgattatgatcctcaagcttttcccacttcttttcttcctgattttggagacgattcaggttggtttgtggataccggtgcctctaatcacgtgaaaaatggtcttgaaaaccttgactccactgtggcttatcctgattcagaaggccttgctattggagacggtaagaaactttttatctctaacattggcctagctactttacctactagtaataatattcatcttaatctaaattttgttcttcatgttcctgcaataacaaaaaacttggtcagtgtatctcagctcactaatgataatcttgtgtttcttgaatttcacataacatgttgctttgtcaaggacaagcaaacagggacagtgcttctcaaggggacccttaaagatggcttatatgtgctagaagaatggtcaaaagcatcgaaggaagaaggcttaaagaaaagtgtgtccaatggttatagacctactgctatgagttgtattacttctttacaatttcccaatgtaatgaatgacaattcatgtaattcaacccatatcaataaagacaactttactcacatgtctctctataacccttacgaaccagtgctaaacatgatatcaatgtatggcaccataggctaggacacccatcatctaccatattgaacaagattctatctcaggttcctcaccttggcaccacccaacaactccaattctgtcatgcatgccaacttggcaaaagccacaaacaactattttttagcacaaattcaaaagccacacagccccttaagctaatacacacggatttgtggggtccttcccatatcaaatccaaagatgggtacttttactatatccactttcttgacgactacagtcgatacacatggatttatcctttaacacaaaagtctcaagcctttgacatgttcatcaaattcaaagccatgatagaaaacaatttaatctatccatcaagaagttcaagccgattgggaggagagtatcgaccattctctaaattcttagtgatcaagggattcactttcaacatccttgtcccaaaactagtgaacaaaatgggagagttgagcacaaacacgggcatataacagaaatgggactcactatacttgctcaatctagcctagacttctcctattggtggcaggcctttcacacagttgtttttctcataaacaggctaccaactcatgtcctcgactattctaatcccactaaatttctcctttgtcaagtccatgattactctatcctaaagccttttggatgtgtgtgttatcctcatctc

SEQ ID NO: 236371 - DNA, 2392 bp, Cannabis indica
aattagcactaaattcttaaacaaaaacccctagaacttgaaataaaattaatatttacgtggctcgccatgtaactctcttctagtattagtaaaaagacaatataactaaatcatgaactttattattaagtatattagatttcatttattataaaaagattaaaaaattattactcaacataaatatatattaccttatataactttgattacaaaattaatatttatgaattaatgcaaaatatacgttggaaagaagtgatgtttattatgtactaataagaaagtactcatgttatatgattatagttatataattatatataaatatataatgttgtatactataaaaaagttttttcttattattgttacgtatattattaactttaatgaaagattagttttattaacaatattcatgtaattttgaaagcaaggattatctaatgtatcaccaagtatataattataagagcaatttgcggcgaaacccccttatgttttgatttttatacacttaatggatactgtttggatactaaatggataccttagttaaccccgaatgtttggataccaatttaatttatagttttttttctttgttttatttggatacttaatacaaacgattagatactaataataggtatcatttttattttagttggatacccaaaagtagtagttttactttaaattgaataatttatgctatatttgtaagtaggataccaatgggtatatttttatgtaataagagcatccaaattttaaagtacatttatctaccactaagttttataatttgaaattcaaaagcaaaatatgtagtacttagctaccacctaatacataagaatcctaatataaaatcattggtttagatgctattaggttcgttggaggaaaaaattgtaaataaagaattaaatttaatgtataaaatgttatttcaaaaaaaaatatatattatctttcaaaaaaaaaatatatatataaatatatattatatatattgggtacaataaaatagttaataaattttaaatactgcttatttaagatatttaatatgaaaatgtgggtatattaaactatacatgatatattagtaattaattataataaatggtatttatatataatttttttaaataaattattttgcagattggattgtattagattcaaaatatgaactcgtacttagtatgaatcaaatacactataaacaaaataatacggattgaattgaatgaataaccctatttgttgacacactattacaacatattgctaagtgagcaaattttaccacacttattataattttatttgcatctccattatttgtatcactaatcgagattggagatgctctgaatagtattttggttagaagagctataaagggcgatttagttttcttggaatagccacatgcatgctcttatttattagtaatagttgactttcttgtgttgaagataaccatccattattggtaagcgtgccatattaaatttcaaataaataggatttttgtattctctaaattatcacccttgtgcaatttggctaggtgaattcttttggttaaaaagatttctctcagctatgttattaatgcaaatatcttcatttaattatttttaattaaaataatttatttatatggggaaaattttcaagtaacacagttttttattaatgaatctaagaaaatcataaatgaacaaattttacaaaaaactgttatttttagtgataaccttttagtcacaacataaatattttatgactaaatgttacttttagtcacaataaaaaattatttgtgactaaaacatagtatttaactacaagttgtgattaatttaattttagtcacaacaaatattgtgactaaaaatacatttaatcacaataaattataatttttgtgactaattcttttaaccatggacattttagtcgcaacataataataataatttataattagctacaacttttttatctttggtcacaaataatttataaaaaaagagatttgacaatgatgaacactaggttttaaagtagtttactctctttcaattataataggctagtctacttgtattttgttagtctcaatgcttaagaatagttcttcaaagttatattctccataaattctagaaatatttgcaccaacaactattattattaaagtatttaagaatttaccattacctattttaatactcacaattcaggtatttctttttgatagatataccaatgtatatttattgcttctctctcctaaactctgcctacatgctagcttttttattttttttccagacacagtagcttttttttttaataagaatct

SEQ ID NO: 236372 - DNA, 721 bp, Cannabis indica
tattgtgcttagccttgcaaggatttgaggtagtttctttaaagctttaattctagttttttgctgaattttgttgttggttgagcatggaaaagggattgtgatactttgatttgcatgtgtttgaatattaaattgttctatgtgagtttatgcatgatttggttgtgagttatgttattgagctttaggtggagttttaggggtgttctttagctctaatccatgtgtttttttatggtgttttgttgctggaaatcgattgagataattgggtttgaagctcttgttcaagagcttaaagttgctaagttaagcttaatttcatgcatttatgtgcaatctgaaatatagggttattattggattttaatgcatgaaagttggtatcttaattccctgtcctttcttagcaaccttaccttgataatttgaaagtttgattgtgatttgtggtgaaattgttgaatttttgttgctaaaattcgtgttgatcatggccgatttctgggttttcaacccaggtgttgcggcatggtctgagcatgctgtgacccgcccctgttggtggaacctgggaattggtcccagatgccgcggcatggcttgggcatgccgcgacccgccctcaaatttttgggcagtttggggttcaaattttgaaagtgcatatctttttatttcgaactctgaattgagagttttatatatcattggaaag

SEQ ID NO: 236373 - DNA, 607 bp, Cannabis indica
tttattttatttttttttgaaaagaagtttaattgttattaaagtaataattttaatgctttggtgtagtgttaatactaggagatgaacctttcatttcttaacttgacacgacactttatatactattttaatgcattttttttattagtttatattatatatatatactattattaataatttttttttattttggggatgagcttaaggagcacaaggaagatgccttgccttgctcgtctcaactcagggtttgaccctaattatattacagtagagtctctatttaagaatactttattcaagaataattttaatttattataaataataattctcaatttaaacctgttataaataaaactaacctttaaattataattaattttattttttctaagtacaaattaaaaaaagatatcttcatataaaaataatattatcaaaataatatatatagattataaagttagttatgtacatataataattttattataaattataacatatgtatatatattatatttactcaaaaataactttacatgacatatataatatatattattgaccgaggttttcggtaaccaataaaataata

SEQ ID NO: 236374 - DNA, 659 bp, Cannabis indica
tgaggggctgcattgtatgaggaagaatagatttgggaatggaacgaaggtggcattgaagcttgatatggccaaagcttatgatagagttgagtggtatttcgtagtggaagtcatgaggaagcttgggtatgctgacgcttgggttcgaaagattttgagttgtttgacttcggtaaagttctcatttattattaatagggaagtgcgtggtcaggttattcctaagagaggactaaggcagggtgatcctctttcgccttttatgtttctcttttgtgctgaagctttctctagtttgattcatagggaggaagtggcaggtcggttacatgggctgtcgtttggccgtcagggattgcaagttactcatttgttctttgcggacgacagtttagtgttttttgatgcttctttgatggaatgtggtcggttcaaggatttattggacaggtatacggcggcatcaggtcaagcagtgaattttaacaagtctgagatgtgttttggtgcattggttgataggagtcttcggagtcggttagctgctttgttggatgtgaaagtggttaataattatggtaagtacttaggacttccgtcttttgttgggagaagtaaaaaggagttgtttgaagttattaatgttgggttttatg

SEQ ID NO: 236375 - DNA, 1552 bp, Cannabis indica
acaattacttttttgtttttttttttttttttttgcaattgaaggaattccagttgcaaatttcaaaactattattctttaagatttttgtcttgcaaatgatgttttatgggatcaaacttctttatgtcgacatgtctctggaagcccttccaaaagtactgaataacttatttgaactttttgaagagtttaccaagaatacaagaaacaactttgatcttgcatgaagtatttgactcaaattcgaaatgaatatgttaaatttctatcatttgccttttaatctaaccttcaaatattaatgactttctcaagataaattaatcctcaattttgcatctaaaagtcttttttctcttttaaattctatttttgtttcctaatattggttctatcggggttgatctattggtaacgacccttgactcatagaaaaagccaatgtttctttcaaaaatctaaaagggtggtctttgagatgtaaaatatgtaataatttattggttatctttatcaaataacattaatgcgatatgcatatttatattatgataaatagtttcacattggtatttaaaaacttaatatctctcatttatctttgtggacattaaccaatatatctttcttttagagttttcattaggtttggatacttaatacttctacaagaaaaatgtcacttttatcagcatattttttcactgataaaagtttgatattgtactagcaaaacgaaatttattttctgtgttggtaaaaggggttggcaaatcaatattgctattagaacttttgctaatgctaaatgaaaagcgctagcaaaactaattttttctagcacataaatgtaatggtagaagttagacttttgccactgcaaatgtgcactggtaaaattttgacatttttgtcaataaatgcaattagcattaattaatgatatttttataattatttatagattttttaatgttgtgggtctcatttttaaaaatggaaattagagttataatttcacaatttcaaagattttattaaactttagaagtattatttatattaaatatgaattatgcaatttttatgatttttgtttggcgatgacggaaaatgcggtggatggccgttagagtcacatatgtaaatttagaacctatttcttagcgagacaaatatttgagatattatgaataccagaattaaacaaaatattcatgatttatttatatttatgtatgaatatcgggacaaagaaggagaacatatttatattcgattcggcaaaatatatatatatttatattttaacaaaatatatatttatattttaatactttgttccatcaaccatgatgtattaaacaaagagttttgattataagtggattcatgggattaaaagagagtcaaatggcagtaacaagtggtctttctttttcgaaattaatcctgttttttctttccttttgtgatgatcatctggaaattttatcttgaatgcaaaccttgattgaagatcgaatttccatctttgaatgtatatttt

SEQ ID NO: 236376 - DNA, 1250 bp, Cannabis indica
cgaagtacagccacgtctttgccatcgggtttatttcgcatctatgcaggatattgggcgacccgtcttgcccatcattatcgtggaaccttaaccctgcaaatcccactgtttctgccacatccaccaaatcaaactgctcttcctcctcaataattcggaggcgctgttcctccctagagtaatctgggacagagaacataacattaaatgcatcagcagtggcaggaacctttttaccccgcacctttacctccccattcttgcgctcgggccaattggcaagaaattcacatgccatagtcacattggcccagccccgagcatccacaaagctaccccatttcatcctttctatttgggctcaaattgcttcgaacttaggttgacgcctcaaggggttctcagggaattcaatacccctatcatcaatgtaaggcctaaccttaaccctcatgaagcggttttgtgccgcctcacttgcaagctgggttcggtcaaaacccgtagatggcgggttcgatgatgaaccaccttcctctatgtgcctagttctttttggccccataatcttagaaatatatatatatatttttcaaaataattctaagaaaaattggacaacacctccccttaaatttctacttcccgaaaattcaaaactacaccagaataatccagacaaatacatacacagtccaaaatcacaatataaacccaattattcctctatcaaccaataattcctagaataatcactattttcacaaaaaatactcaaaatctcatgcaatttctcaaatgtaatagagaatgatacttacaaacctgaagacgccactactccacctccattattgaatatccttgaaagcttgaggttgaagatgaagagcaatggtattttcgaatttggggtgaaattgatgattattggggtggtttttgatggaaagtgaagattgatgagtgaaattaggttttgggatggattgggattgagaaattggtttcaagatgaaagaattgaagaatggtgagaaaagaatggggattttcggatgagaaggggtttgggacggctgaaaagtggttttgaaggtttagggttaatggggtgaaaattagggctattaatagaaattcgtcagctggtcgcgactagcttgaattcaaaaaattctaggtttctggaaaatggcgtggtcgcgactagcacaagccttggtcgcgaccactggaaccaaaaa

SEQ ID NO: 236377 - DNA, 754 bp, Cannabis indica
aggataaaccactaaaagaacgtaatgtatgaattatgtatatatggatagggttatgcgggcaagccataattaagttagactcgctaactataaccgagataaactctactaaggccttattgtaaatatatatgtgagcgtaacatgtgggtctatgctgcatggttatttatattgtcttgctgggcttggtttataggtgctctactgtgcaagaaaggttaaatcagtctacgatcagccatgagtgcgagagcttggcgatgcttgtaaatgttcgagccacactagaccaagcgggttagggtctaccaatgatgttttttgtaactctgattttgctgtttatgtgggctcgtaaaatgaacttgtaatattttgtgaaaatatttatgggatcccgtaacatgtatcttttggttgtaaagttttaagttgttacaagtttaattttcatttggttttaaataaagtttaaattttctgcgctaatccttttagtaatcccgaatgagggaattagggtttaatattcgataagtgtagcgtgcctaattgttagggcgttacaaaaaaggaagtgagaggtgtagtcgatgccaatgccaatatggaggccactataaagcagagggtgtccaaatctttggataaatccttggccaaggaaaataaggtagccaaaatggagagggaacatggagataaatacaaagacatgcactccaaggcccttacctgcatcaaaaaa

SEQ ID NO: 236378 - DNA, 522 bp, Cannabis indica
aatatttcactataatctataccttccctttgagtgtatccttttgcaacaagcttggctttgaaccttgcttctgcaaccccttgcattccttccttgtatctaagtacccatctgcatcctacaaccttcattccagcaagctttctgactaaaatccaggtttgattcttttcgagtgaggtcatctcatttaccatggcttgattacactcatgcttgtatgctgattacactcatccttgtatgttgatttcatatcctgagtaatcatgaactcattagtttctttgatttagtcattacactttctcagagaagatgattcttacaacttcagtttgggaagaagatgattcgaaccaacatgtgcggtactacccaagtttgagaataatgaaagggcaatgaataatgggacagagaagccaattccaaggagagcatggatctaaagcttatttttttaacacgaggtttagaaacgactagatcagaatcgaatatcttggaactccatgg

SEQ ID NO: 236379 - DNA, 778 bp, Cannabis indica
aattttcaatttttttttaaaaaaattcgaccaaagaccccttatgtttttaaaatcaattttttgtttttaaaaagtgaaaagagtttttaaattataaatattcacagtgtaaatttataatcacaaaacgaccataatggtcttttatgatcacatagtacatagtgtaatttgctaataatttcttttagcaaaaatctaaataaactaaaaatgaacaattgtagagaaaacaaaagtatcctcactgcacgtgaaaaataaaataaaatgaaagctgaaaacaacccaaaaagagcctcattgaatagtttgactctcaagaaaaaaaaaagccatcataagggatgagaaaaaaaccaggttgaacaccgaaacacaagaaaccctaaaaactcaaagtgatctctctctctctcaccctccctcctacctgaaacacaggaagaagaagcaaaataagaaaccctgaaaccttgaggtgatccctctcccctccttccccctccctctactcagagtgaaatcgcatattataacaatcatgttcaactctgttacagtggtcagattacattttgctaacattgcagctctagagctacaaccatatagtttgccttacactaaatataacagcaaacattgatagtctatagtatggggtttctcatcaacaatcagattgtatatccaaaataattgagtctgaaattattggaagtaataagagaatgaggactcccaatgtaattcatgtcataaaaacaaggat

SEQ ID NO: 236380 - DNA, 1781 bp, Cannabis indica
ataaataaaaaaatacttattttaaatataatgcatatttgtgaaactagcccgttattttttctagtttaatgtgaatacaaaatagatgaataaatatgtgcgttaaactaatatataactttaaaatataatgtttattgaaagaaaaatagaagatgtagtattattatatgatggttttaaatagtagtagaaaaatttggctacaagctagctaagaaactaacacagaaaaagaatgggagaggaagagtgttgttggagaggagataagtaggcatttatataggtttaagattattgtgtgaatattactaagttaagttattaaaaaaaaaaatagatggtcattttataaacctaaacagccgatttatggcttaataatttagattttattatttttttaattaatcaattaataaattttataatccaaataaaaattagaaaaaatgagaaatttaaaaagagaatagataaaagtaattggaataattttagaatagattttattattaatcttaattaattaatcaataaattttataaacctaataaaaaaattaaaaatataataaaaaattaaaaaaaaaatgagaaaattaaggagagaatagattaaggtaattggaatgattgtagagtgccatgtcaccgtctcatatttctcctatatatatagatcttaattaattaatcaataaatgttataaaaaaaataaaaaaaaaaaaaaagtaaataaaaaattaaaaaaaaataaaaaaaattaaggagagaataaattaaagtaattggaatgatggtagagtgtcatgtcaccgtcccatacttctcctttatatatatactaggaaacaaactgcgcttcgcgtgcggttctattttgtttagtaatcattaagtcttaactgaatattaaattttaaattttaatatttttgatataatttcttttaataataaaaaaaaaattgcttagaaaaattcataaagtaaacaaagagacatcaaatgttataattaaaaaattaaaacacacaaaaaaaaagatcaaacattgaagaatcctcgtatatatataaaatagaaatataaaataaaaattgataaatttatagaaaactcatcatatgatttcaaaatcattgtcatcgccgtatctcatttgttgttgctactatattcaagattgttgccattactatatgtcacttatagtcgccattacattcaaaattgatgtcatcaccgtatcttacttatagttgtcactatcattgcaattaggtttgttctccacataaaataaatcaaataataagctaactactataaaagaaaactattatgtcaattaatttacgtctcagtcattatgagttaactactaatgagcggaaaaaatatatatttttactttatgataattgagttactaaaatgtaataagattttaattaatattatgtcaattattttatgtcataaaaaaaaattattatctcaattactttatgtcttagtcattatgagttaactactaataagtggagaaaatatatgtttttactttatgataattgagttactaaaatgtaataagattttagttaatatttttatacaatgttttttattaatatgagtaacctgtcaaactttaattttttttataaaattaaaaggaattaatattgtagaattcatatttcttgattatattttgaatttaataatttattacaaacttctgttttcttttcttttaaataat

SEQ ID NO: 236381 - DNA, 1281 bp, Cannabis indica
taaaataatttccaacaaaggcagcatcgccccttgcttcgtgtgggcacccgaccaggcacggtgcgctttctttgggttagttgccccgtgatttggagaagggagatagcactcaagtgtacccatgtacccagctttttccgaattcctcaatcggacctcgattatgttggatggaggacacacccatctggcacctaaggcaccttgcctcttatgggggaccgcttcggtaaactcctcgatgacatagtcttccccctcaaccaagacgtcaccctactcggatactgactccccagcctcattatatcctccaaagcgtagaggcccgaccactccttcctcctcagcctcgaaaggactatcaagacggacgtcgtcctgctcctctatctcctagacctcaatgtcatcctcataatcttcctcctctgcggcgggcagatcctgttcagcacttggtagtgtggcatgctaggccacgtgaggatcagaagcattaactctctgcatcgtctactttgtggggaccatcattcttctcttggacagatactggtgtgtatgtcgtgcaacagttacagcagggacaactattggaataccaaagttaccagaacttggacgccctaatggaaaggtatcggctacaccaggtcggacattataagtccagctggagtaggagaacattcactactcacttcccaatcctcaaaactcaagctagaaagtgtgtcactcgaagaggatggactggcgcgaagacaaggttggtcctcgtacagaagttgatgcagatccagctcaatatggtgtttgcctccccaaaactcaccagggttcatctacaaaagacaatacacgagatgactatttggctgggatatcgaacaaaaaacaggcaaatatgctgaccaggactattcaatagattaaaaagacgaagaacgcgtaaagattaagtcataacccaggagtttaaaatttttgggttaagggttaaatttcacgaagctttgaatgagcaaggtgagaatcgaacattacaagactaaagccaaaattttgtaaataatgaagttgtacaaactgttatagagaaaattacaaaatttgaagcctagattttctacatatctccaacaacaagtcaagaacagtcgtattttctacaatggaaaccaaaaaaattgaagatacaaagttagaggagaaaaagatcaaaaacttactcactgtttgaagccaaaatgatgttcagatgaagctctt

SEQ ID NO: 236382 - DNA, 1109 bp, Cannabis indica
ctttcttcttttttttacaatggcggttgcaccagaccgacgataaaagaaggccactgttggtgatggaagtgtgtgaccaccaccagacccgagcattttccatcattactgtctctctctctctttttttcaatatttatttgaatctgatatttgagatctgatatttttgttgtgttggtttgaatctaagatttgagatatcatactttgtaaatatgaatgtgcaaagaaaatgtgttattaagcaaagaatgatacatttaatggttggtctatctttttttgtatgtcggtttaaaatcgacgtctatgccattctattttgcgtcagtggtataggtgtcaaacttacaaaccaaaagtaatacaatattcgattgttaaaatagccaccatcttgatggaggatgttaaaaagtctcatattgataatgcgtgaaaaataaataaagtgcataagatgcatgggttactcctctcattgtcaattggttttgaaatagaaattcgcacatcttatcctgcacactctattctaactttctcaaccatacaatcctcaattttaacatggtattagaggcaagttaaactctaacgagtataagatctaaattcaaaaacttgtccaaaaagacgagtcaaaagaatcgcttgtgattgagccgtacaagattggtaagcaaaaaaatatctatcatcttgagggggatgttagagagtcccatattgataatatgcagaaactaaatatcatacataagatgcatgaactactcttctcattaccaattaattttgagatggaatcccatgcaccttaccaaacactcactctatctacctttgtctaccacacttctaaattttaacatttagcaagttcatttatgaggctacaatttttttagtgatgtttatggatttgtcccccaaaaaacttagaataagttgatgaatactttttttactccactaattaaaaataccttcttattaaattttattaaaatatacttacttttatgagtgagttgtccaatgtactatcactctctacttaagtctaagcagataatttatattaattcaaagggtttaat

SEQ ID NO: 236383 - DNA, 1277 bp, Cannabis indica
atatgtatacttgttgttgttgtatatgatttaaattaatatatatttttttattaatttatttatgtataagtaataaattttagcgattttttcatttttaaacttcgaaacattttttttttttgtttttagggaattgtccatagaaacctctattgcaactaattaacggagcaacctaattgcaaccaaaattcatataggaacccatatagaaagcaccagagaaaccacatgagaaaccaaaaccgtaaatttgaaaaaaaaattaaaaaatagtatatgagttaattctcctaaattttaatttatttatatattttctttataatgtatcaagggagtattttggattcttatcccaaaggcaaatttatggtgattagttcactctatattttatattgtaaattgagtcatatatgtgtgttatgttctcaaccaaagggaagattgtgatgagcagttaactctatttcctgataatcttgtgtaacttgaatcatatgtgtgttatattattactcatggggatgtatgtaataatgaccaccttgactcgatttctatattttctcacacattggtcaatgcttatattttaatcaagttggttaattttggattttgtctccttttctatgaactataatatttgcttggttttgaaaggaagttttagtcacccatagccttttgatgtaattagtctttcaccgagcacatcatgaaaaattacttaatctttgaaaagctcaaaatatgatagagtattttttgaattctaattttctatcttgattcgtttgatgaaaatattctattctttggtgatcatgtggtgatgtattggttgcttggcgatgtggtttgactatatactttgtttttaaacgatatcatatattatgaccactagattctcatttcaatgtttttttaataatcaattcatgcaccttatggtgattattgaaatatgaattttaattttgtgcaagagaaatattttttgtgcttatttatggggtctcccatgaaatgtatggattggaattaattttgtttacaattgtgagatataattttttgtattgattatttctaatttaactatgccaacaaaaaaacttggagttgaaattttgtaaataagaatattatttttagtttgaattctacttcctatcgaacttattaataatatatttttttgttttgtttttctttttagtaataatttagttttgtctgacaattattcattaggtaac

SEQ ID NO: 236384 - DNA, 2147 bp, Cannabis indica
tatactcttattaagagaaaaaaaaaagattaaactagttcatatgtagtcacttatttatttactctttcaatcaattttataagatgaatttatgttataatttttgagaaaatgaattggttatataaaacttccaatagtactgttaaaatattggttttatatgtacaggtaatgtgtctttacattacaggccatcttaatattattttgagtcctgagcattgcaaagaaattcttcgttacatatattatcatcaggttacgaaattataatataaattataattttgttgttgtatatttatttatatgttgagatttttagtttttaaattcaattctcatgtgtagaatgaagatggtggatgggggttgcatgtagaaggtgaaagcactatgtttagtacagttctcaactatatttgtatgagaatattattaggagaaaaatccaataatggtgatacttgtgaaaaagcaagacaatggattcttaatcatggtggtgcaacatacataccttcttggggaaagacttggctttcagtatgtatatataatctataattatttgctataaataatattaatattgatctttataattaggttatgaaattatagaaatgataaatatcccttttgttttagaaattttaagaatttgttagattttattcatgtacctcttttttgttttgttacaatagtcatagacgtagtctaataatactaggttcttctcatcaaatttgaatccactctttgaatttattttaaaattctgtacctaagctaacctaaagtggcttagacatacaaattttatttgtactttgtgggaaaattagaactgaagaatacaattaactataattgatccatgaaatgattagtaatgataagattaacagaatgataaaccaagaatcagaaataaataaataaagtacaaaaacaaataaaatcaacaccaagatatatcttattagttcaagtcttatagatcgaagtgattaagcaagaacacatatacaatacaatcaagatagttctctgttttgattctctaaaagtgtttatctctcacactcttacctaagaatcttcttcatatctacaaaagattcttcatacaaatctcaaaactcaatctctctcttttctctgtacctcttaatctttgtttgccttcttaatctttaacatcaaagtcacttctccaaaaaactctctacttgcaaatgatgagtatatggtggtatttatagattagggacatggatccctaagtcggcagttgtagtaactaagctgttaagttagttacaacttaacaaactcctcgtaataatatctccatgtcagctcaagaaagagcttctctggatgagaggcacgcttcctagacaaaagaccgaagcgtacacttttaacccccgtacttttataaaaatattcattttatttacaagtgctaaacgcaaaaaattataatgttgtatttttatttaatacatgaaagtgttcacaactggccagtttttgtacttaagataaaataaataataaataaaaataattgaaacatttatttaatatcgtaaataaataaaatagagcgccctagactgcccgcagttatatgtccctcaacgagttcacacacacaagtattactcgccaccgaccttctaaatttttagttacctttgtctgcacatggtaatttgataagggtgagctactaaactcagtaaagaaatgtgtgtcaagtaatcacataaataaaaataaaacacaactaaatcgccatgcacatatttagacaaataagaatacataaactaaattttatcactagtaactagtaactagtttctaagctaagtcacataataatgattatgcccgagtccgactttggcaaataaacccgagctattggactaaatagcggagggctgggttcaataaaattgtacccactactaaatggcccccgtatctaccatatagacccaacagtcaagtatttaaataatgtcaaactactatttacatatatgtcagataagctatattctacttaatttaaataatgtcaaactattatacattattaaatacatacaatcata

SEQ ID NO: 236385 - DNA, 1017 bp, Cannabis indica
gcaagttgattagcaaacaaatgcagacaaacttttaggaaacaacattcaaaatataataaaatgtgatcaaaacttcagtacgtatcatattacccacagtagaaaactaaattaaatttcaattacacaatacaaataccaaggaaacttgggtaatagattctgaactaaacaaggtatacctgagcaactggatcttcttcattagccacagcctccatgtacttcatcacatagataccgcaatctcggtcattatcttgttgaggaaggccatgatctttattgtcaattctaaaatccccaaaagtcacaagtttgacttattctcatcgcataaaaggtctaacgtcgacaactgcaaagatatagaattagttagattccatcaagaatgaattcacatcaaacaatgacactttgtaactttactatttttttcgcagcgtcaacatgatatttttcatccattgtgctatgtagggagtctaaaaatgagtctacctttgacatcatattaacttctgtaccaaaccaatatggtggaccttctagggttaaaaccgacacaaacatctacaattgataagaaaaacagtaaaatcataaatacattcaaattatagaccatatagctttttgacactacatttttttgtaaataaacatggtgatacatgatcgacacctgtatagtctttacgattaatggaattatttgaacacttcgattccaatatgcatcattaatataaaacagttgtcaaattaacaagtaagaagacaactatgtatatatatgatgaagtacctttaggcatttattaaagttctcttcataaaatggttttgaccattcttgttcctttgtaatcttcttcacattaaacgaacccaggattttttgctatgaatgcccacatattttgtcaaataacacaaactattgttagtccaacaaagcatacgcaatacaaaattacaataagttgtataacaaagccattaccgaga

SEQ ID NO: 236386 - DNA, 700 bp, Cannabis indica
aagggtaccattaatcatggactacatatcaagtacaatgaaatactagcattaacaggattctcagatgccgattgggcatgttgccttgacgatagaagatctgtggctggctactgtgtttattttagtgatactttggtttcatggtcctccaagaaataatttgtcgtctctgctcaaatactgaatccgagtacagggctcttgcccaagtgtctactgaattaacatggattcaatctcttcttcaagaacttcagtttccactcaaagacattccagtgacatggtgtgacaacatgggagcaaatgctcttgcctcgaatccaatataccatgctcgaacaaaacacataaagctggacgttcactttgttagagacaaggttttggctaaatctctcgacatcagatatgtaccctcacacgatcaagttgctggttgcctcaccaagagcttatcaagttcaaggtttcattttctagttgacaaactaggtgtggtttccaccccacttagtttgagaggaggtgttagaaaatgataatggttacctattactaatttgttaccatttactgtgtactctgctgttatttccctcttttactgtcagtacttttcatgtgttatgattggtgaattatgcacgttttctctctcctttctgttatatgtgtcagagaatatcctcat

SEQ ID NO: 236387 - DNA, 2201 bp, Cannabis indica
ttttgatgattaacaaatatttattattatttgttactaatgatttgttgattttgtagcacaattaaaaggtaaaataaattttcaaggcaaaatagtaattttaccgaacttctcaaagtgacccaaagtagattcaacaagcaaattaactacttcatacttgataagagcaaaagattcatcaaggtatcaagaattcaagaccctattcaaaagaggtcttcaaaagctcaaagtcaaaaatcaacccgaaaatcaaagtcaactctcgaaaaaagttaattttggatcaaaacatgaaaatcaaactaggaatctcatctacattaagactacacacaatcaaatggcataaatttactttagtcttgttaaagtgatttgcatagtacactagggtttataagtacaaattttggcccactcactaatttgtgcgacaagttttctcactcgatggttcaaaaaaaatttttgattgactttttaaatcacattttatttaactaagagaacaaaattagaatttctaaaatcgggtaatcgagtaaaaagttatgcacgtttagtctaaaaaaatgcatattttgccctgttagccatccagaattccgattggaatccaaaattctggttgtaatcaatctagaattttggttcacagcaggattcttcttggaatgtgtgctaacggctataaacggctacattttatcccaacattatataaacttcatttttactcaaaaattgtagttggttcagcatttatatcatatacctaatctattcaagtgagattaatgagctcccaagtttaaaatttaacaaacactttacacacactttgaaccaaaatttgtgtatattcatttcaagtgtgcttgcttatcactctaagtttctattgtatcatcatacttctagagtgaatttacttgtaatttcaaatatatttttatattgtgattgaggtgaggttggcaccagtattgtaaacaactcagttatagtgagattgtcactacaacaatccaagaaagaggttaatagtccttggcggtgcaaatcattgtatgaggtttggaaaatatacctaggtgaaaatttctcggttgtaagggttagtcaagcccattaacttggctcgatattggaacttaaagctaggtccatagctttgaaggtggcttagctctacctaaccttgtaaaaattgagagtttgtaatttcttacccttaaactctttactttacaagtttgattatttgctatcattattgcttgtcatattacttgtatttatttaatgaagtgtttaattgcttagttttgtattaaaagttttaatttaccgaaattagcttaaatttccaattcacaccctcttggaaacatatcttggactaataattggtatcagagcaaaggcttaatttatttgattagatttcataatctagagtgtggcgtttccaagtaattcataaaataacatgtttgaaggttttaacacaaataaagcaccatactttaatggagtagattttccttattgaaaaattagaatggaaacttaccttcaatctatagattatgatttatggcatattgtgtctagtggtctttacattgctaaacatgttataaatggtgtagaagtgttaagacttatgaggcatatgatgagaatgataagaaaatgctttctaaacatgctaaagctacatatgcacttatatgtggtttggatagaattgaacaagcctctaccgcttttgatatgtggaaaatgcatgaagttactcatcaatgaactagtgctatgaaagagactaaaattcaaatttattccactcaatatgagaactttaagatgaaagcggatcaaaccataattaacatgtatactctctttactacaattattaatggtttgaattctcttggcaaggtgcttactcaaaaggatatggtgaccaagattttgataagtctcaccaaggcttatcaaggaacagtggttgtcattcaataagccaaggatctctcaacacttcccttggaagaattaatcgactcactcatgaaccatgaaattttcatgagtgctcaagaagaagaggaagttgagaagaaaaaaaagactattgcattcaagtcttcatcctcacatgccattaatgaagaagatga

SEQ ID NO: 236388 - DNA, 1665 bp, Cannabis indica
aaatccgatgtgcaatctatcattcccatgttctataacatggtttgcacacaatattctaaatccataaaagctattagatccgacaatgctaaagaactcaacatgcattccttttatgctaccaaaggcatcgtccattatcatcttgcgttgagagaccacaacaaaactccgttgtggaaagaaaacatcaacacatcttgaatatagctagagctctttgttttcaatccaacttacccctttcttattggtcatatctcattcataccgcaacctacttaatgaatagaactccctctattctatttcaaggttgcacctcatatgagaaactccataaaaaaccacctcaatatgaccacctaaggtgttttgggtgcctcgattatgcatctactctcccatcttctaggcacaaattttcacctagaagccgtgcttcaattttcattggttacccccaaggaatgaaagcatatacaatacttgatattgagacaaaacaaatatatcaatctatagatgtagtcttttatgaatcaatttttcctttaattggtcacacatctcattctacacatccatagttttttccaagaaccatgtttacctatgtctcaaccattatctcgggtaaacacaaaaacaacaccagattcaactggtgtatttcaacaaacacccacacaacttcgagtttctggcagtatttccacaccagcagcacatccacgtgctaaatcagcacctggtgccataccagctgctcacaaaaccacaccaaatttcattgttgttgatacaatttcagaccttccatccaacaatactacaactcctattattgccaatgactctacaaagtgcaactctgatatacaacttgatatcacaattgattctccacctttacacactgatactgctgatacattcaccccagcagccacaacaatatcttccctcacacccgatgtgagcaatcaaaatcaaacaattatcacaactaatcctgaccaacataaacaatccaacagtgacagatccatccacaaaccctcacatttgaaggactacatttgtcacaccacatccacagcttgtccaatcaaaaagtttatctcctacactaaactcagtccacaatttcgagccgctgttcttgcagcttattcacaaattgaacctcattcatattccgaggcctcacagttcacacattggctcaaagccatggatgatgaaactgaggctttagaaaaaaaatcatacttggatagtcaccaaattacccgatggacacaaagccattggatgttaatgggtttataaagtgaagtacaatcaacaaggagaagccattcgctttaaggctcatcttgtcgccaaagggtttaatcaaaaacaaggaatagattatgaccaaacttatgctcccgtagctaagttcaatactcttaaaatattccttacccttgttgccatgcacaattgggatatccatcaagttgacatcaacaatgcgtttctccatggtgatcttcatgaagaagtctacatgaaaatcccaccaggctataaagcccctccaaacagcgtttgtaaagtcaacaagagtatttacggccttaaacaagcctctagacaatggtacgaaaa

SEQ ID NO: 236389 - DNA, 3242 bp, Cannabis indica
cggacccttagaactagtattttttaatacaaaaataaaacttaataataatcccatctaaagctgttatgacaaaactgtttacattttctgtatcttttcgtgttaggaattgtcttacaagttggttaataataaaaaaaaaattgtaaaaaattaagctcagggtcctactttttactattttgaaaaatacaggattcattttgtacaatttaaaaaaacggatagtgcaattggtaacttttgcaaaacacatggtctagaaatggtaatttaacccaaaaaaaaaaaaaagataaatagagagacaataaaaaaaaacaaaaagatagaagtcaccaagaaaaaaaaaagtcaatgaaaaaaaatagaaagatacataagtaaggagaaaaaaagttttatggaagctttaataaataataaaaaaaaaagtaacaaagtaacaaaaaaaaaatatgtaggaaaaatataaatgtaaaaattcctttgtaaaagtgtaaatttaaactttgaagaaaagttagtatatggtgttaatatcccaaaagaaaattctacatggcgattgggagttgatagcactcaaaagaaaaattaagaatttttatatgtagataaataaggttccgaaacatttttttctaaacaaaagtttcttcaaaattaattgctcatacttatattttttttttcaagaaagagtctcaaccaccaaacaccaagagcaataggtactctaaaacagtggggtgagaatttattcaaagatagcattagttatggatagatccttgatacaatcaggacacgctggccactaaatcaggctgcaacttgttgttaatgcaagtttggccaaatcatgagcaatatcattactagatctcttacaatgaaaacaactaataactttgagcctattacaaagattaagaatatcatccaatactagacctaacgaagtgataatagagatattatttttaattttcagcacgacactcaaacaatcaaattcaataataatattttcatatccaaaagaaagacactcagacaaagcttttcaaatcgctaacgctttagccaccacaggcaggaaataaccatccaaacaccagctcgttgaggcacaaacaaagcccacatcatctataataaccatgcccaaaccactgaaattttttgaagaacatatagttgcatcaatgtagactttaagacagcttagaggaagggtggtccatttagacactttaagaggggaaatatgttgcacaagggtatgctagaagagtcagccatcgccaaaggaggaggaagaggaggatggctagtcaacgaaccctggttgttaagaaatgtccccagaaattcacgagcccaaaagacaatgagagtaggagataaatttacattgttatggaccattttattaagtttgtaccagaatcttcacaagatcaccaaaaccaactcaatcatctctttcgacaggggattagtaaatctataaataaagtcaagaaaatccccacaaggaataagagcatctttcaacataaatgcacagagcattctacattgagtgagagagctgcagccctaacgaacatggtgtgtagtttcttcctctatcccacataaaggacataaaccatcagataaaagaccatcactagcgaaattgatctttgttggaatccaattatgggaagattgacaagcaaaaagtctcacctttggagcgagatttaagaaccaaatctttttccaccaacctgacaaaatgccctgaaggagaagctcgaggcattgccaagttgtgaagagcaagctaataaccactattcacagaattccatcttgactttttaaagttctaaattatcttatctgacaaattaggagaagctcacggaatagaaagaatagcctccttcactagtcaagaaacttgagcaaatcaagtctttgtcccatcccctcgatgcatccctaagtaaagaggccttacttgaaacatcaaatcggagggaagggatcaagacaaaggggggcactgacaggatccaaaagtttgtgtaaatagtaatatcttgcccattcctaacacgccatgtcactcttgaatcaaaaagctccttgccccataaaatattcttccacacaaaggagcctcttttagacttcttaatatcgacaaaggacctctttcggaagtacaaaccttttaacacacaacctagccaaagagtgaggaacattgtaaatacatcatgcttgtttagcaaagagagcctgattaaacaactagagatccctaaagcccataccactatcttcttatgcaagcgaagtttatcccaagtacaccaatgcatcttttttgaaactcattaacccatcacatgccaaaaatgagcacatatacgatgactatttttttataaaagcttttagaagcttaataaggttcataagataagttagaatagattaaataactgccttgataaggacctcacgagcagccatggagaacggtttcgacttccaaccattaagttttttccaaattctatcgcgaattgtgtgaaacaaacacatcttgctatggcccggaaaacaaagaaggcccaagtaacttttatggaaataaactcccttaacgcctaacaacttcactagtttagctttctcaaaattcaaaatattggggctaaagcaaacaacagacttgtcaaagttatccaattggcctgaggctaaaccataccacctcaagagttgcttgaatctaacacaacacacatcagaaaccttaaagaagaaacaaattatcatccacaaatgagatatagaaaaataataggaccactgagaccacaggaaggccaaacaataatttattctcacaatctcttttaaccaaacttgaaagaacttcgacacaaagtaaaaaaaaaaaagataaggtgacatgggatccccttgtcgaagcccctataaataagatatatagatggatgaaaatgaattacagctccaatatcagtgagcatgagaggttctttatatagcagagtgatgaaatacaataaccgttaggcaattacagctgtcacaattacaatgaaaaggaatcaagaatattctgactagagaatctccctaatgattacataatgatttggcataacagaattgacaaaatacaaaaaagggaatacatt

SEQ ID NO: 236390 - DNA, 1065 bp, Cannabis indica
aattgataagatgaaccaaaacataaaaatgaataaaaaatacttctgtttctttattgatattgaataaaagggattacattgaaatggagttttatttagggcataaaacccaacatgccgtaggtatcatagggattaggtgagattaatctttatctttctttgattgatgtgatgtttcataatggagtcgtcactagtccctttaattactgtgtaattcccgtaaacgaagcttatgttgtctaacatgtcctcttatgggcgttccaagacatttttcccatgctgcattaaatgcggggtgattgtttgagtataccctcgtcctcctagagatgctttattatatgtctgtcctagagaggaaagggatgcctattgcatttctctgggggctcacatcctgacttcacttgtctgtttgaatatgcctccgctaattcttgggtgaggtgtccttttggtccatgtgtaatacgtgatcagggccacgtattttgggaaaaacctggggcaacatttacccccaagtcttatttagtaacaggtaaatgagacttgtatgcggcctcctgtccttaataaatatagttacacgtgcccctggcgcgtgggtcacatttatgatcgtcatcattgatgttttttctccttttccaggcaatgattcatttcttttccattgatagacctttgcattaatgtcgatgtcagagacgtactcaagtgtttcgaccgtcctttctccttttcacacctgttcgccccatccgtttgatcacagaaatcgaatcgctacaaattatcaccgtacggtggtgtttgatcacagctgccttgcaccctttttggcctataaaagccaacacttttcctttgttgggttactttaaccattttgcgattttcaacccaaccaacacatttgaaattttttagaaacctccgacttcctactgctgttccttcgccgttgccagaccaaactttatcaccagacgccatcaactttttgcttatcatctttgtgtaagcatctgtacacattttctttgcttt

SEQ ID NO: 236391 - DNA, 579 bp, Cannabis indica
caggtgggttttgaagttagcacgttaattgttgtagtgattattgagaaaccaactacgattatcagctaatgaaaaatctgacatagagtaaaccacaaatcaatatccaagttaattatgtaaacaatagagtaaaataactagcactattatggccatatgaacacaattaagaattggcataacaaatgtgaaaaaatgtttacagttttggggtgcttgaaaaaaaatctctacaattgtgtgattgcttaattgttcccagaggccatctgatgcaaatattaggaatacatccatctaaggccatctactggaaaatcaggtctctataaaagtgaggcttctccggatacacatcgccaatattaaaccttgacacctaagaaaacaacaagatatgacttagaacattctttccatcaaattacataaaacgaaaaaatatcaatcaattacatttatattgaatcaataagcataatcaaatgtattgaatttacatagtaataaagagttatctcatcagaaaagtttgacatgcatacaaaatctttcctttttttaaaaaaaaaa

SEQ ID NO: 236392 - DNA, 869 bp, Cannabis indica
gattctaatgcctcaaatatattcgtgacatatctaattcatgtataagtgcaaaatttgggtcattttcactaagacaatcccgaaaattaaatcctggccaatttgttaacctaggcgctaggtgaaacactaagcacctaggttggcttctaggagtctatttcgactcctttcaatttttagccttcaaacttggattcttcttgacttcattactcataatactaaagaatagtgacttaaaaataatttggcgggatccaaatacccattgtggagcctcgaagtgaacctaggcgaagggaaagggacccttccctaagttaactgctatgactcgagttccttcactatgggaatgcaatccttcttaccacatgttaaacattgatgttcatgttattggggctacttttcgtgtaaacacatatattaatccaataatgaacaacattgtgggtgagggatagaaaattcatatttctaattgggtgaattgtattaagggttagaatttcaaatagaataatttgttaaaattaaacaataaaaaaaaaacaaacactgttaaatcgagaatgacatcccacctatccatctctctctctccaaaaaaaatatttaatatcttagggctcgttaggtacaccgtataagagttgtattgtattaaataataaataacactatatttggataaagcaatgtattgtattaattattacgaccaaaaattttaatacaatgtgtgttgtattatttaatacataacaaatggttcgtattagcttgtatgataatatttacaaaggattcgaggtcaacaccaatctccgatctggacttgggacccggactcggacccg

SEQ ID NO: 236393 - DNA, 622 bp, Cannabis indica
atttaaacagaataatgagacgaaatctaacaaaagaaccaaaattctgtaaatataagagttcaagaagaatttttaacaagacgtatttagggagcagagtcaatattgtcgaaagtttaatatgtaaaattactaattattcttttatataataataataataataataataattgaatttgaaagtctaactaggttttttccactctaaactttgagatatattaaatcgtaccaccaaaacttttcaaaccgttaaaatttacttcaaagtattattgagactgattgatttaaagacttctatccaaatgatctgtttaattttactattggacgtttgacatggacgaaatttaaggggcaagatttgaatcatgtcaaagtttagtggatacaatttagtaaataacaaagtttaggagatatgatttaatgcataaacaatcgtttagatatttattagtttgaatagaactcttgacagaagtctttaaatcaaacaacatctatagttcaagaaatatatttcaaatggcctaataaaaatttagttgtttcgtttggaacaccgtattaggtcgtattgtattatattgaattggattatatatcatat

SEQ ID NO: 236394 - DNA, 5266 bp, Cannabis indica
gaattaaaaaagtattaccaaacaccaccctaatcttttaaggtttaacttcaaaataataataataacaaagaagaaaaaatagaaaataataataataataaaaaaacaatggaagagaatataaaaaaaataataaaaaaaaaatgagatttattgtgcaaaacttgtaagttccaccatgaaaactaactactaccactactaaaccttcagcaactcacgaacctgagcttgtatgtaaacaaatttatatatacaacttaaaaaaagacgccagaaagaggtttacaagctcttgccaccatagccaagatactaataatgaacttgtcaaagatgtatttacgtcttataaacctccaactttttccacttctatacctgcacgcgaaatctaaatccggcagcactcctattccctatttgcaaactgtaactgggcagctttgtcgaacatagctagctatgactaaaatcttcgaatttttccaacatgggttcttttcagactcatcattattagaaaccacttcagcacactgactagcttcgtccatcttctctgagccttgccattggcgagagtcgaacggggaaagcgaaagccatctactgcactctgtaaatcagctggtgattccaaactcatactctgcgtctgaagatcagtatcaaaaaactgtagatgatcctcgtcgcagaaagcttgagtgattcgttccgagtcacagatcagggaggtactgacttgacttggaaaatttaaagcctgatcaaatctaagatccatgctgtcaattgtgtgcaacgcgtaatcttccaagctacttgttccgccaacagaatatatggatgacatgatatccggtgaagaggcagatgatggtggtatataatcaaaggcaccaatcttatgtgaagccaaaaacttgctcccagcagaaccctctatcttgggtgagcttgaggtgtaaagcacattcgtcaagagggctgagccagcagtaagcgaggcctcatcgtcaaaagatacaacctcctcccagtgttcaaatgcagaaattaacatattatgtgcatcagcctgatcaagaagttagattgtaagaaattagactacacaaagtaaaagacagaaatgtttaaatctggtaaaactaataccttctcggtttcagatagcttatcaatggaaacatattggccatctgaaagttgtcccagtaattgacccacaatattgaagacaaccccagttttatgctgtgaattggaaggaatgtacaagaacatactcttctcaagtacacatgtccgagcatgctccacagttacttcccacatcttagcagacatacctgtgccaaggatctgtatttttccaaatgaaccaccgtttaacagctagcttgtgaaatttcaaatgctaattttactttatgattcactaattgcttgtttgaaacatttttgttttctgttctagaagataaaatgaagtaacaggccaatcaacacctctaaattacaaaacagagaaaacattatatgtgcagatcacaactttctcttttttcaattttggaaaatgaagaagtaatgaataagaaatattggcagaaaattttttttcaaaggtagagggaaagaagagtttctatttacatttcggagtctttgaggatccaaaaagagtaaggtaaggaaatccttcacagtaaggatcttttcccgagtcaaacgcttatggaatgctccatctttcccaatcttctctaatctccatacttcatcgtatagagaaggaggatggtgcttcttgtacactgcataagaacaagaatcacatttaccaaattgtttataatcctcaagctagcaagaaacttcacagaaaataagagagcaatttgttcaacattcaatgatgcagcttaaaactaatgaattgaacttttatatgatatattcagcttcatcttacaagcatagtcagcatacatcaatgaaaattatttctcattgcaattaagaaaaaaaaaaagaacaataagcaaaaggatttatactaaagcaaaattataaaggatgcaaatcagaattcaaaattacgaagaaacaaatctaaatgatgtaaggaaaactaaagagtaatgatgcaaggacgggaaaggtgaaaataaattataccaaccgttaaaggaatgagtgactaaggaaaggttccaaaagattgaatactaacccctaccccaccccatcccatcctaaagaaattgtaaaggaaataaattccagcactttgaagcagtatacgattagactaagttggataaagataagaactcacattctccacgatgatccctgacaataaaggattctgtcttcgcttctcttatttcaactccgtcaaagttatccacaactctcacccctagcctgaatctacggctccttgtccagcttgaattatctgtaaaagaaatttcacccacagaaccttctccgtctttaagattcagaactgcatctccagtaagaaggggtttcttcccttccctctctcttacaatgttattcttgaactcttcaactgtccaattgtctccctcatcaccatcaaagtcaccctcaagaacaacaacttccaccttggctacttccaccttggctgtggattctggcccagaataaataatttggccagtaaaacaatcaactaaagctacttgtaatgggaacccttcttctccttcaattcgagctccagtgaatacaggaagagagatattatttaagaagcgaagctttaaactctttgcaacagtagaatgcatctctttcacgccattcctgacataaacaaaatattcactggttatcaattgcgacacaaggtggtcaactgaacaacttttgtcgcatcagtgaggtgatgatatttggaaacaaaatattattattccttactgtttcatattgtttaaatgtttttttaaggctatctcaacttcctctttaacctgaaagaaacataagaatatgtttagtaaaatttaataaacctccatttgatatggatatacaaatacaagagttaaaaacggcacattataggtgtaaagcataaatcaacaaaaattctaagattaaacagatacaaagactatgatatattctatgtcaccaaactccttttcaagtaaagaaaaaaaaaagaaaattaattgtttgaagttacttaaggagaaagttgagttatgttattttatgaaaagcgataaaattattaataaaaagaaataaacccactagtctaataattcgcaaagagcatattgtaaaatgatatagaagaaagacgaagcagagtagcaattatttccttcacacttctctacctttatatcaatcattcaacccatgacgttaacataattttgacattttatacaaggcaatccagcattcccaaatgaacaaatccacgataacagcttatcacgccaatggacgttgtctcttatagtgcatcattactcaaagtttacaacttctaagtagttgcttagcaaatttaagtgctttataggaattatgctaatggctgttaaaagatttcctattaaaagtaacaaaggtccttggtccatacaaggatgatgagaactgattacagtaaaacaccataaccatttaactaggctagctggtatcaagcaataatatacatggtattactattaagtgcatgaacatgccaataacattcatgagaaaaagccatgttcaggaccaagtggcagtggggttcaagaaacgttaggtctatttcaatattctaaggtgaaaaggactactttaaaggaaaataaacctaaagaagtgaaaatgatagatggtaataggccagaggttgttccacatgggttgaacatgcaatgcatttcaaaagtttttcagcctaacatttagagtgttgttctctagttagttagcaaagacataacaaatagtccacatgaggatttcacataagtggatgctgatgaccccatgatcgcaaagagttgaaaaatcgaagatacctaccactcgacgaatcaaaggctccaaggagcgttcaaatgtatgcaacttcattacctccaaaacaacactgaaaatcaatgaaaagaaaatcattagaaataaactcattgtagaaattgtagcaattatggtctaaagtgcaacacagtcttgaagagttttacaaagaacttctattaactaatcatccaattgcataaacctaaaaatgctcaaaaaagttatcctacattaagatgaaaagtagttaaggtcaactacagtaattgtcgaatatatatgttcttttcttcacttatatatagtataagataaacaattcatctctccttttcaccatgtcaagtaaaataagctagataatataatacacacaaaccgcacttttttttcccttgaaaacaaaataacattagtcacttcacttttcacagcacatatttttttaatcataactctttgcaaagtagactttctgactcactctcagtggaatttacttacacttgcaaagaatcatcaaagcaaaaccattttgcaaattgacaaaaaaaaaaaatcaaattttcccccaattacatattattattcccaacatgcctcttttcctaaggttattaatgctacatatataatttaactcgaagaaaagaacacaacctcaaaacccacctcagcctttcaacctaagaaatgcaattaatttaagctaaggaagagcaaaaaagccacaaaacgaactcaaaccactaaaaccaaacctcatcgaaaataagaacagaagagagcccgacccagttcatttcccatcccagaaaatcaaagtggaaagaaataaagagaaaggaagagagtctcttactttctgaaattgggaatctttctacgcttatcgtcagaattagttccttctggtcgaggagctcgaccctcatcggggtttctcttctgcgacattatcgaagctcccaacaacaaaaacgcttaggtttaaagagaagggcgttacaaatgaacatgaacgacaataaaacccaagtactagaccaacatgcggcgggcacatcaaacgataagattgtacaaatcctcttattcatgtcctactagtatacacacaaatatatatatatatatatatatattatgtagagagagagagagagag

SEQ ID NO: 236395 - DNA, 561 bp, Cannabis indica
tttttttgaattaaaacttaccatgttagagatgagcatggatcaagagagagcaacttgagaatgatgagttatttagttttagggttaggtattaagagttatattatatatatattgggagatatgtatctgagttatattattataaataatatatttataaaatttagagagattttagtatttttttagagaatttattaagaaaatataaaaatactgatttattggtttatgttttaacaaaaaaattagaaaattaataaggtagaataaaactaatttagagtaccacgtcacatttatatcactcctttatatatatatatatatagatatatatataggtgtgaaaacttaagatgcaaagagaaacagaggaacagaaatgttcaaagcttaggcaaaaatattacctccaaaggaggcttttctctttatttataggcaattagacttgtaaggtacaagagtttataacaaaattagttaaggaaatacaacagaaaactaactcttgactaactgcctaaactaattgttggttatcatccccct

SEQ ID NO: 236396 - DNA, 1279 bp, Cannabis indica
tattacgatagtatttaaaatgaaagtctttattttgaatttaattaaagatttaaactaaaccacacttttccaaaatttatagattagtgattataaatttgtaaaagcacacacgtggcgtccctgagggtcagggcgttacaataatactcttggtgtatgtggatgatgtgatccttgctagcaatgacataacaacttgggaaaaattaaaactcaacttgaataatagattcaagttgaaggatcttggtgagttaaaatactttcttgggattgaaatttctcagactaagcaaggcatttttatatctcaaaggcactatgctttacaattgttggaagatttgggccatttgggatgtaaacctgccaatactccaatggaagttaacttgaaactcagtcaagatggagaagagaagttggccgatccaaagttgtatagaaggatcattggaaaactgcaatatttgacaattactagacctgatttagcatacactgtaaataagctaagtcagtatctagttactcccaaaatcacacacatgaatgctgctcaaagggccctacagtacatcaaaggaacccctagacaggggttgttttatccagctgaatttgaagttaaacttgaagcttataccgatgctgattgggcagcatgtgttgatactagaaggtcaacaaccgatttctgtgtgtttcttggaaagtcattgatttcttggaagagtaagaagcaacacacagtctcgagatcctcagctgaggctgagtacagagcaatgtctaacaccacttgtgaactggtttggttactttcattgctgcaagaaattagagttgaacaaaaggggcctgctgcactatattgtgataataaagttgcacaacaaattgctgccaaccttgtgttccatgaaagaaccaaacttattgagatagattgccatcttgtgagagagaaggtccaagaaggaatcataagaacagttcacacatctagcaaagaacaaattgcaaatatttgtacaaaggctctgctgcctaaccagtttcaaattctcaaaagtaaaatgggaatatgcaatatctacactccaccttaagggggagtattgagatatgtaagatggagtgttagttgaaatcggttaggagtttgttagagtcctattatgttagttgctagctgtcttgagtggttggtttagtcctgaaatgtataaaaccagattgtattgctctgtaatcaattaatgaagaatca

SEQ ID NO: 236397 - DNA, 1457 bp, Cannabis indica
ctcattcattctcttttctttaataacttttaattgcctacctcaaaatacaaatatatatataattatatatataattataaccctaatcccattaattaattaattcgttctttatttatcgagatcacaaacaatttaattatttattaattaacaccctaaatagatatatctatccttccatctgaattcattaattagttctaattaaaataaatgcttaataaacacaagcaactctactatactagagttgataaaacacacaagaattttagcataaacgattttaacttatactagttttaggaaatttttaaataattttgataagtttttttatccatatatattgtttacaaattaaatagatttttgaaccctaaccatatgcacaaattattcaaaaaataaaaataaaaaatttaaaatgggtaagagaactcccaaagctaggggtgcccatttacacctaaaaatccattcacccaacaaacccgccaaggtttcaattttagtagaccgagttcaggtgtaattcggttttgcaccgggtcgggttcaggtttaatatgtttgaaaatccaaaattcgaaactaatctgaaatccaattagcattttttatatatatttttttattttttttatgtatataaattataattatattataaatgtctttttaatttttaattataaatttgtgagtgtgttaaattgttaatgtgttagtttatgtaaaatgtatatataatatatataagtatttttttgaaaaaaagtaaaaaaaatcagcattacaaaaaattttacttttagttacaacaaaacttgtgactaaataaagtgaaaaaattgtaactaattataaattattattcttatgttgtgactaataggtccgtgactaaaggtattagtcacaaaaattacaatttgttgtgactaaatgtatttttagtcaaaactaaattagtgacaacttgtaactaaatactatgttttagtcacaagtaatattttgttgtgactaaaagtcacattttgtcacaaaaaaattatattgtaaaataaaaaattgtcactaaaagtagtaattttttgtagtgtagattgtgtataattaatgtatttgtgtaaaataaaaattgatgataatatattgtattattgtgtataagtgtgtattgtgtttgtgtatgtgtatgataataatatattgtataattgtattgttttgtagtttttttttgttaaaaatgtgatatttaaaaagtaaaaattgaagcctagcccaactggaaacccacccgaacctgtcccaacacgaacccgaccaaccgccggaccaaaaaactcgatctctatacaggtggattcgatcctaagattccaaaaatctggacccaaaaaaaaactactggaaaaatccacccaatgtgcaccctgtta

SEQ ID NO: 236398 - DNA, 1085 bp, Cannabis indica
gacttccatttatatccaataacagcttttcaaaaaatatctttgatttaatccacacggatatatggggtccttttcacattattagtgttgaaggttataggtattttcttaccattgttgatgataaatcacgatttacatggagatatatgctaaaaagcaaagctgatgcccctactgttctaataaacttttataatctgatttgcactcagttttccactccaatcaaagcaattcgatcggacaatgccaaagaattaaacttggcatctttttttgcccctaaaggcattatccactatcactcttgtgtggaaagaccacaacaaaactcagtggtagaaaggaaacaccaacatatataaacatagctcgggctctatgttttcaatccaatctacccctagtttattggtcctacatcattcaaacaacaacctatttactcaataggacaccatcagctctattcaaaggattaacatcttatgaaattctatacaataaaccacctcaatatgatcatttgaggacatttggatgcttggcctatggatccacacttgtctccaagagacacaaattcactcctcgaagccgtgcttccattttaattggctatccatatggcatgaaagcctatactctcttagacatagaaactaacattatttaccactctagagatgttacctttcatgagaatatctttccttttttttctcaaaaaccaaatactgatgttgagctatgcttccctcatactgtgataccttcccatcacaccatccatactactgcttccacagaacaacaaccagaaacagtgtccactatcattcaaccagctgctctcaatgagcagactaaacaaatgcctcccacggctacaacagacttcaacagagctattaaccgcactccctctgctgcagaatccctatagaatacaaaggcacatatacattctgatcctgctcttactgtgcccataacacagacaaaatatggtcgaataacaaaaaaaccatctcatctagatgcatatgtatgccacacagcctccactacccacccta

SEQ ID NO: 236399 - DNA, 1178 bp, Cannabis indica
aaataaatttttaaacggtttttttaacccaaaaaaaaggccttatggactaatattattgaaaaaatttaaaaataaatcttaaaacattaattttttgtgttaaatttaacacaaattttagatgatcttttattttatgtaaaattagatacatatcttacattactcttggaatttcattttattaaaacaaaataatgatatactattttttatatcactttattataattaacaaatatttttataattggtactatgaaaaagttgaacgtgtaaattttttttaaattagttttaagaataaagggggtgttcgatgtggaggaaatcttatgagattggatccttgacctatgtttggtgctttgttaggctaggcataaaataatcgagggccaatataagaaccttagtaagaaactattatatcccatcatgaacttgggtaagataagcccaggataaaataaactatttcatatttattataattgataaacaataattataaacctgaacaaaaaaaaaaagttttcttaaaaaaagaaaaatgtcattccacgtaaatcagacataatctattacataaaaaaattgctcataattaacaataataaactaattaagctgtttataataaaagaaaaaaacaaaaactctaaaaatatcttcaattaaatgacccataaattataaataattttatagaagtatacatatatttttttttttgaataaaactagtaaattttataaaaaaaagtaaaatcaattataataatggaatgtacttaattaagaagaatcttccaacttaatcatatgacttgaagagaaacaataactccttactaataaactactttgtttgcaggttatttaacaaaacgtaaattaacattattaagagattaaaacaaagcacaaacatcctgaattattaaaccaaaaccgagaaggcataaaaatactgcttcgtaaagcttggacacagatcaaactatcaaattcgagagtgacttgaagctagagtgtcgagcaatattccaactcaatgcctctttaataccaataatttttgcaactttaggtggaaattgaataatgaaatggaaaggaaacaattttcattctattccttatttggtacatttaaaatcattggaatacca

SEQ ID NO: 236400 - DNA, 1060 bp, Cannabis indica
aatatgtctggttttcttatcagatgtgtctaaaactgaagagaatgttcccttaaaggtttttataatattctaaaatctagaggtggtcttcctgctgcagacaaccaaatgctctctcttatactcgtgtgagggaacgttcattcttatataacagtattataaactgaaatgttcaaactctgatcaggctcatatcttttatatcttgggttatgattctatatcttgtgtgcgtttatttcattatatgtatgcatatagaaatctgagccacccaaagtaaatccaaaagataacgaaactcttatgtcatatgcattatattgtgactgatcactcacttttaagaggagcttttttatcttaatcaatttttagggtggaggaggtttgatgtagaaaaaattgttatgcattgcaggtttttttttattcctagcccttgctagaaaatccaagtataaataaatatttctatccacttttctttgtcagttagtcttcaaacacatgtatacttattcatagccactcactaatgtttggcggatgctatcttagtttccaaatcagtggtattaatctcagcgaaatcttcaggataaatataaactcaacttaattctcttatcagtttgcaaagctatttgtgaaacacacagatacattgtcaacttgtccagttcattaataaatatcaacaattttgttcttgccaaaataattgtaaagaggcatttttattgtaatgcaaagatgtttcttgagtcgtctgttggtgagtcctgtagatgctttggtttggaagagaaacacctatgacattagatactatagaaggtttccttgtccatggctctttttttcaaagaatgtttattcttttatgaattacaaattcaataatattgtgtttacgtcttcagtcaaatgggagtgataaacctttgaatttaattgtggataaatattctacatattttaggtatcacaatcaaaatttgattttactcttttcatttattttggcagttataatttagattgctgtaac

SEQ ID NO: 236401 - DNA, 1039 bp, Cannabis indica
attttctgttatattgtaaatgtctattatttagtaaatctattacaattaaagtaaataggcttgttggcatcctactaaaaaattttaaatttcaatggatcgatatttaatcaaatggtgcatctcctatcatttctagaatgtgatcatactcatacaccaaattaacaccctgaaccttgttacacttagacgttccctcgcccagaacactattcttttctccatgatgaacctaaaccttatctcttgtctattccgttcataaacaaatgctttttcatcttagtaatgtccatatgctccatgctaccacatttaagacaagggcaaagaatcaatttaggatttttgatatacttctaataatagtccaaaaaatagtcaacaccttgactatactcagctgataatctattctcactcatataatttctgtccattttaaatcttcaaataaacaaaattttattcaattttttttgaatatatgtagaaaataattagttaaattaattaccacacatacataatttttagtgaaatttatcctaattctagcaaaattgcagcagcataacggctgtaatcggacgttcttaaaaatttcaaacatgacaaaaaaacacataaaatacaaaaataacaaaatgacattaaaaatacaaaatatccactgattcgactgcagtacttcattacggatgaatatttaagatattcaaactcatctaacatgcatattccactcatccgactgcagtacaattaatcacacaacctacttcacaacaaataaatatttaacatatttgaactcgacaaaatagagaattttaaagttttagtgagtatacctttctccaataaagatagctacaattgtgcactcttcaatcaacacaaagaactcgatacctataaaatatttaaaatattgaattaaaagtttctatttataaactcatcaaattaaagtaaacgtagataaaattttaatctttataactatatattatcaacttatatctaaata

SEQ ID NO: 236402 - DNA, 751 bp, Cannabis indica
agagactgctggtgttgcaagatgttgagaaaaaaatgagtccagatcgtgagtagcagatcccttgagagggaaaacattctcataaaaaatcacatctctagaatggaaaatggtgttggtggctatatcaagaagagtgtaagctttcattccattgggatagccaatgaaaatggaagcatgtgctctaggagagaatttatgtctcttacttggtaaggatgatgcataagccaagcatccaaaggttcggagatggtcataagcaggaggtgttttatagagcaattcatgaggtgttttgtgatgtaagtgaggtgtaggtgtcctgtttatcagatacacagcagtttttataaagtatggccaataagcaagtgcaagggaagattgaaaagctagagctcttgcaacatttagtatgtgttggtgctttctctcaacaactgaattttgttgaggtgtttccacacatgaattgtttgtttgtatacctttttgagcataaaaggatgacatgttcaattctttagcattatcacaacgaattgcttttatatttgtggcaaattgtgtgtgaacaaagctataaaattgaggtataagctgttgaacttcagctttagattttaacatataaacccaacaaaaccgactgtaatcatcaactatggttaaaaaataacgaaaaccttctatgctatgtacatgaaaagggccccatatatccatgtgtatgagatcgaaa

SEQ ID NO: 236403 - DNA, 646 bp, Cannabis indica
tttagatttcttaagtggttttcacggtggtttttatataaattactatgcggattttagttacaatttagattgttcttttagttgcaatagagatttctatgtgaaatttcgtaaaaaaaaaactgttttaaagtataaaaataaaaaagtccctatttttttatactaggttattattttttaaaaaaaaaataaaatatgcttagataaaaattagacttcacgatcattacataggatattattcggaatagaagaaatacacaaacaaccatactgattgtggataaaaaaagctcacttagccacattaattacaaaatttgctaacaaaataaaaattacaacaagcaaaacactgagagagtctattacaaaaattagcatagttctcaatctcccaacagagctttagatcattgagcgaattgataaccaccctagaatcgctctctataatgataaacttccaactttcatccttagcaacttccagcgccaagcagcaggctgccgcttcaccacaaagagcatcagagaactctaatctagttgtatgcaccccacacaccactccaaggtttctagccacaactgcaaggcacatgctttccatccccactttaacatcacaatttagctt

SEQ ID NO: 236404 - DNA, 456 bp, Cannabis indica
tcattattgtcaaaaattcaaaagataaaattactaatattctaaaaataattagataatcaagccaccaaatagcactacgatcgtaagatctataataataaataatagaaatttccttaaagcaaaataagctatatagtggtaatgtgattaagtaccaaccctaaagagctatctaaaggaatatggttcttaaatttaagtacaatacacaaacaatcagacataaagcaaatctttttgagaccaaacttgattcattgaaccacaatgctacggagtgccatggcctctgcagccttagcactgaaagagtccaccaacacaacgccccctcactgtccatagtctcgtgaacattaattttaaggaaatcagctatgcttgaaacccacatgggagtcctctgaacaggcagggacttcaccttagcaaacgcttgagagccattac

SEQ ID NO: 236405 - DNA, 1420 bp, Cannabis indica
ggtaaaataaattccaacagtgtcgtcccattgcttaatcacagccccacattaggctagtgattttggcacctcgccctccaggtatctgagccgctctaagagtcgtcgattggaggtaaaagagaggaaagaagcctggagaattacgagcaaatgaatatgagaaaaaataatgataataatacagctaacttaccatgagggtatagtccaagttcctcgaaagcgtctcttcaggactcacaagattgattagatcccaatcggggtgaaggaaagccttgagtttgcgccagcaggcaatcacaaacgtttgggaaaattaagaattaggctccctcgctgtagccaacaaagtttcaatggcctggcttgaggaggcagaagcatgagctgtatcaggaggaggtgcgttggtgttgggagcgaccggaggaagaatctgctcgtaggtctcagtttcagaggcctcgaggtcaatgggctcggacaacatctttttttatgggcaatggttttcttttgccttttggaaggcaccacctcggcatctgtaggaacccctgggttggtttcccttttcttccctttcccgtccataatatcttcaaaacccatgtctgcaagacaaaataaagtgttacagttattaaaaaggcaggttaaaaagaaagggggagtataattttccatctaaggaatttaccaaagccactagaaggcgagttatcactagaagagggggtagaaggaccgtaatacccactaaaatcactacagcatattatcttgaatatatcaaagggctcaattggttctaaatcccagctcgcgtctatatgacttgccctatctatcatggtgcctatatttctcggcgatacaacaaaaagactcgtgaaagttaatctggacgtggattctagggtaccagctatcaatcctatgagtaacccggtctacgagaagggaattccaaatataaaaattaaggcgggtatctcggaaggtgactaatgtgttacagtttggtcctaagtactgtgggagaccaaccacgttgattaccttgggatgctccttcaccggcttcccaaagggcagtgctttgaaggtattgtgcctgagccacgcgatcctaggccttatcctcctttggaacgaaaacttgctgccaagaagaatacttgggaaacttgtaatcgcaagtatactccttgtcagtaagaaggcccaccgatctcagattggcctcgtttagaaggaagtcgcacgacctaaggccgtggggaagagtcagcaagtgtctgtgttgactgaccatctcgagagtagggacaggtcttttcaagagggctgtgaaaaaaaaaccgaacattagctagaaaactcaaaatgaaaacgacaaggattaatt

SEQ ID NO: 236406 - DNA, 704 bp, Cannabis indica
tctattttattatatataaaggttatatgtaattttgtaagaaaaatataattattttatatggttgtatataattttgttgacatggtacatactaatttttttattatattatattattttgttttattttttatcgtagttatatttatatatattttgttgtacgatatatggtttttgttgtgtaaaatatatcatttatttaagatgatatttagtttgtattttattatatgtaatgattatgtataaatttttttggtatgtatacatattttaataaaaatatatatatttggatattaatttagtattgtaattttttgtagtatataattttattctacggtatattaattttcagtaatacaatatatcaaatacttatatatatatatttaatgatctaatataattatttgttattgttacaatctataatctataatatagaataataaaaaaattatataacttaatttaataataatatattttttagaaaaaatattgatacataataaatatactcttataattttttattagcccaatttattatatatgattattttgttaattttttctttataatttttattagtccaatttattatatatgattattttgttaatttttagttgatttttggcatctggtggttgaggttgtgcagcagattgtttgttttttttaatca

SEQ ID NO: 236407 - DNA, 534 bp, Cannabis indica
gctttcctaacttatctaacactccgcttgcaggagaccatgagatttgtgtctaaaatgattggacaagtatctgaagaccgtatatgtcgattctcagagttaacatcgggttaatcgttgactaatctcgaaggttagctttgctaatttttagagttaacacttcccctaatctataagaattcttttttaagtgttattgtagactaagtttgttaagcctcatacctcctgcctggtccttaggctatctccctgggcgcttacaccttgaggtgtttagtgattctttacgggagagtattggctctattcattttcatggtgggcagccctgggtaatagcctgtgcaacatgggcagttgcacaggttcccaaaataataggggctcatttatttattttttttttgagtaatataaaaggatgttaattaatattgagaataagaaaagttgtttttttcggtagttgcccttaacgttaatgttatgtacaattattatgcacattattatataaatacacaa

SEQ ID NO: 236408 - DNA, 809 bp, Cannabis indica
ggataaaactgcccccgaaaatatagacaataaagctataacgtcttcaaacagcaaacaccttctcacaattaaaagttgtcgctagagctagcaaatctgaaaaaacattgcaacaccaaacaaaacaagtaatatacttagataagtgaaattgctaccacgaggactgtaactaagtactaaataattgaattattatttctatttgacaatcaaataatgaattttgaaattaataatctaagaaaaaattaaatgacaaaacaataaacaagatttaatcaagtaatgaaatatagggaattaacatcaattgtatccacttcctatttcaataatgcaaatcaattttcttctatatatgatagcggattattttcaccaaaattcttttgaaacattaaagtactaaattgtaataataattactacatctctcaaaatattacacaagtaatcggcattaagaatagcccaaaagctacacacgcaacacatacttttgttttgtgtcaaaaactatgtttattcaaagcattattaatactcacttttcagtattttatattgagatcataaatcatgcataagatggtcaatcaaacacacgtaataaacacaaatacgaataaatcacacaatcaataaaaaagaaaatcaaaataacattaactcattaaaatttcaacatatctccattacaattcctaaattggagtttagttgggggttgcacataggatggattggctgggttagaggtgttttaataggccaacccaattattgcgatttgaataaactat

SEQ ID NO: 236409 - DNA, 901 bp, Cannabis indica
ttttaattgttaaacttttttcatcgatgtttgctaaaagagtgacattcaataaatatgataattctaatagagctcaactagctcgaccgaacatggcaagatagtgttaatactcaattgttgttaaactctttgatggacacattgataacacttaattaaatttagttgaaaattaagcttgttaattataattttaacatcaacatattttaactattttttaatgtcaaccatctatttttttatacaggagtgactcgaatagtaatctatgttcagtacgatggggagtgaaatgatgaacatgggtcatataagcggtcgccaaataaaataaggaaaatctataattgtcgatgatttgagcactacatttgagatgttattggataaattgtataagaagattggagttaatcaaatttttaaaaaatggctcaactgagagtagttgagcttgactatatgtggttgagattagtaaaaattataattatacgactgagctgtaattagtagagttcgaccattcatggttgagattcataattattaatcaaattaattttatattgatcgaattttataaaggttcgaagtgacaatagatattataccattttgtaaatagatcaaaattgaaaaattgagttttagctaatgtcaataattattatagaaaaacattaaaaatgtaatagtaacagtctgtagcagtagaatgtaattctgttactgcagaaacaaaccaaaactagaacaataaagttagcaaaaataaaaataacagcagaaaataagatcatttgacacaagagatttgtacatggtatcagtgttctttcgaacactcctagtccacggggccacggccagagaaagaaatcaattagta

SEQ ID NO: 236410 - DNA, 544 bp, Cannabis indica
ttgtgactcgattataatcgagataatgatgagaaatgattattattgtttgtgactggattatgattgggggaaagacacggttattactgttatcatgaataataaagatacggtcattaccgctacgagtaattactcttgaaatcgtggataggtttcttattgtttacttcatcgggcaatgatagtgacatattcagcttgtggttaacgagtggtaaatgggtactttataaagtaccatgattatgtgattatagtaatgtgtgattagagtgcttcatgaaacactgagatcagtgtatggtaatgcgactaagattatgtgtttatggtgatgtatgattgaaagcgctttatgaagcactaagattgtgtgactatgtattgagtaaatatttacttattgtaattatgaaatggttgcctatgatattcctataatgcatgtaatatatgtttgtattgatgtaaaattatcaatgcatgccgaatcatgagtatgtttattttaatacattgtggtaatttgtattttaca

SEQ ID NO: 236411 - DNA, 2268 bp, Cannabis indica
tatgtggtcatgtgggattctaacattgcaccaaaagtagtaaaaattattgaaaagaacaaagaggaagttggatcccatttgcccaccaaataagaagaattgatttaccaaatcgataacatgtatagaaatatttactctgttgattcaaggtcatggctttgttcatgtaggcgatgggaccttaccgggatcccatgtagccatgttatggctacaatttggcacaataaacaggatctagagctatatgtgagtaagtggtacacaaaagaatattatatgaaagcttactctcaccaaattttcccattcaaaatcaagatgagtggcctcaaagtggcaagattggaatgaaaaatccaatcaataaaaagcagctaggaaggccaaagaaaaacaaaaaacttgaacttcaggaacttgtttcgggcaagaaattgaagagaaaatatgtgataattaaatattcgagttgtggtggcaagggacacaatttaaggacatgtagcagaaacaacacaacttctgtgagttattctatactattctctaactactgttactattatttggttataaagcatgttatatttgaaaaatattattaaccttattacaaagatccaatgtttatggactgtagattaagacatgttgaatgatgacgatgtcttattctattttaaataattagttatatctttgaaattagctatcattctgttttaaacgttgttggttataatttgttgacaccgaaggcatcataaatgataagttcaaattgtcatgttcgtttctcctcttacatttttctacagtcgctggttttctgtttaggtacatttttttcaacttcctatatagaagattgcaatatataataaattttaattttaatttagttttctgcccaaaggaattcaattttaatattcatttggtcgagtatataaatatatatgggtattgtttatttaataaatttggatatttttagctttataagtcttggtattgtttgtttgaatttggcttcaagcttgcagctagagaaaatgtgtttgaatttggcttaatgataatgatgtcttattatattttaaaatattagttgtctttgaaattagctatcattttgcatgtattgtatttacattaatttgagacatcattaattattgactgttattgtccagattttatgccatgttttctttcttttttttttttttttgtgtcaaattctcctacagattttatgctatctatagttagtttagtttagttgttgaacatgataattgcaaaagtgttacatgttttaaaggaattttgtctttatgattatgtgtaggcaaagaaaactcaacaaaaggatcctggtacttatgggagaaacaacaatcctctatctcaagcttcagttagttcttcaacccaacgaaaaaattgtactagatacaaatgaacaattataggtaccttatattaaaaattaatccaactataaatatgtagaaattttgagatgcttttaattatattatatgttttttcagagtagagtaggtatgaatgggtactcaagaatgaacactaagatagagcaaagtgggtgctcaagaattatgcataattttgtatacagggattatgcattattttgaatctcttttgatgaatttgtacaaattcatataactagcaaacaatgaacactaagataaagtagttaaagccaagtgaatactcaagaattatgcataattttgaatatgagcagggctgatgcagattttgatctcttttgatgaatttgtataaattcacatatgtagcaacaataacagtttatatatgaatctcttttgatgaataattttcttatccaacagtaacagggcttatgcataaatttcttcatatggatctcttttgatgaattagtaacagtaacagtttatatatggatctcttttgatgaatttgtacaaattcacaatgtgaatttatgttcaatattttgacaattttcttcataactttccaatgccttgactaaatgaattgaaaaaggaaattttttgagaactctaagatcaatttttctatttcaagtcttcttcatccagcttaacttgataaacaaacaaagattgtaacacacttaataactaaactagacatataatccctttataattagaaggttacacttgactagatggaacaatattctctgattgttactaaaactga

SEQ ID NO: 236412 - DNA, 1080 bp, Cannabis indica
gcttattggctagctaagcaagacttagaatagatatatgttcaaacaaaaaaaaaaaggaaattagaacttgaaggagataaaggagttacctttgggaagaatacatgcaattgattggagatgggtggcatttttgagttgacaagtcttcccttttgtttcacaatgacgacaatttggtttaagccattccaaacgtagtctgttcttccatgtccttacatttggaagagatgaagtattattcaacatggtacaatgtatgggcaagtatttaattgcaatgcgtgagtcaataaatttgataaccagggccaccaaggcaagggatgaatatccataaagaatatatatgtctttctccatcgtttgaacaattgaacaaggtatatttgaagaggacatctgccacaaattgaaatggagaaagtgatggcaagtcctggatattcatgacatgtctctcaaggcagttatgagggtcgtaaagttcaattacttgagctttgtaatcaatatgttttacaaagagcttcaaagatgattttgggaactcaagaagtgtgtttatgccactgcatgatagctggaagccaggataaggtggttgattttggtcatctttgagcccaaatgggaatctgatatttgggcctttctttccacacttagcttcaaccacctccaacaacaacactaccaccaacaacatcatgcttgaccaatacatgattttggtcatctataattacaatataattgctccctctctctctctctctctctctctaagttttttcttttttttttcttcacccagtttgttcttattaaataggaatggaccaagtttttcttggttaattgcaacttaattgtgataagatccagtaggatagataacacaaaacttttgttgaagaccttccaggaaggacttattttgcggtggccgggtgggacttatatttcagtcttctatcagacttttcctttgaagtttcaaaacaaacttttagaatatctttttcaatagtcaattatttcacctcatatatatagaaaacttttatcatc

SEQ ID NO: 236413 - DNA, 880 bp, Cannabis indica
aaagaatgaaatgttttctggatttatcaagcttatagtgtttctagcaatatgatctcttgatagaaacttgttctctcccaaagtgaactcaagacctctatttatagtgttttgaggatcacatttgaaaatcaaatcctttcatcacatggctattaccaacactttaattggtttttaatgggataaaaacgttggacaagagagctggaaacatgctcaattaatttatgtacgtttatgaatgttttcaaaaactggttccaggtgttcgtaaaacaaccataaaataacataaaaaacaaccattaaacagctgtttccaaaaaacttaaaatttagtttttgtaactcctcttcaatttaaatcttcctctaacgtcccaatactcatttaaatgatttaattgagtattgtaacaatttctaacaacaagaaacttatcccattgattccataactttcatatgtaagaacacacttaattacatgtgatccttaagttacaatctattttagatttgtaactcctcatatgttacaacttttatgtgtattattatactatatatgatataatacaacatccaacacataatatatattaatctcatattaatatataatatgtcacatttaaatattttaatctatattatattataacaaataatataacataatttacatacatacacatatacatatacttatcttatgctagtcttacctcgtttcttgattcaagtatgccggtcaacctgaatggaaattcacgcattgaatggaggccctatgtcacaattacataaataggataaacaactttctaaaacttttttggggacctaaactcaaaactaaaagtttctctat

SEQ ID NO: 236414 - DNA, 1212 bp, Cannabis indica
aaaagtactttttaaatgcttacagagggaacattcatcataatcctttttttcaagaccacgcatgccctcaattttaacggctccacggtttcgagggtcattattagtgttcatgaaccgccttttcatcttctacctcattcccaaccgttagattttccaacctttggccttaccgttactgggatctaagtataaaatgacagttcaggcttgccattatccataaactcttggtttttggtgagtttcatcgagaaattggattgtcattctcttgctaagatgtcccatccaagctcagtaacttatccttcaaaactcgcaacactagaatataccaactgcttttcctctctatatgttgccaaaaacttaaaacctcagtttaaattggaaacgaaggattctaagactgaagatctttcgataaatccaaactaaggagatacaatcgatcgttacaggcgatccccacaagggatttctgagaataagcatcatcctctgcgaatggtggtctctgaattcgtcatttaccattgttgtttcactgatcttttatctttgtctctacaggaatggacgtagattttgagagcaagttcagaggtccccctcaggctgacaaggaatccaggaagaaggcaatcccagttggcgaggtcatggattctactaaagaacccaaatggctcaagacccaagcttgaacaagaaaatctctgaaccagccaattgttggcgtttataaatttctcgagaatgggaatgaggtctcggccgcaggaaatgggatcttctgatgcatcgaatgaggtctatgcaaaggtcgagtccttattcgtgtagacggtctttctcgtgctatgtgtagacggtctttctcgagctacgtgtagacggtctttctcgagttcaccatccccccatgaataaccttgtatcctttgttttagaaaatggcttaatggtttgcccctagtggcattttggtaaagacaagtttgtaaaccaacttgggttttcccttatcttaaatgccttgtactttttcattcgaacttaatatatttgtgtttgcttgcattttcattcacaatgtaaacaactatattttgattaaatgcaaagtacttttgggtctttccattgctcgtaattttcctatttaagtagttagtaagctactagacttttgattaacga

SEQ ID NO: 236415 - DNA, 767 bp, Cannabis indica
agtggcatatcgtttagcttttcctccagctctatctgcaattcacaatgtgtttcatgattccatgttatgaaaagtacgtttcagattctgctcatgtaataagttatgagaatcttgagctataatcagacctatcatacgaagaacaaccaattcaaatcttagacagaaaagataaggttctttggaataagaccacagctttggtcaaagtgctttggagaaacagcaaggtggaggaagtcacctgggagttagagtctgacataagggctcagtatccagatttattcaagttagatttcgatgacgaaatccttttaacggggggggggggggtaattgttaagactgcttaactttaatttggaaattagcagataattaaggtttatttatggaactagaataataattatgaattgtcattttatggagattttgaattcagaatgaattttatatgccatgtatggaattttatatttttgcatgttttgtgcccagcaacatcggaacgcggcgtttggccattagaatcacattttagtatttttagtatagcggggcagtatagttagacattgggaatatcaagaatagtcaagattttagaattgaacaaattacccctaggtggttgagtgactttttggttaagtggagggcaaaatggtcttttgccctaattagagttttgtcctttagtgaattttataaacataataatctgattatttttcaattatttagaagctttatga

SEQ ID NO: 236416 - DNA, 2248 bp, Cannabis indica
gggtaaaagcatcactgggagtgaaacagacttgaagcggtccttccattctaggaaggagggttgaagatgtattgcacccctagtgacctttcctgcacgaaaaataacgtgcatgcgagagtcatgttgaatttttgtgaggtagactttggcttccgcgagggaaggctagagtttcctaaaaactcaagcgatgacttcgcttaaacagatcaaatggtgaaagcatcactgggagtgagataaacttcaagcagtccttccattttgggaaagaggattgaagatgtgtcgtacccctagtgatctaactggagcctaagtcaactgctcctttaattctggaagacttcttcacactcctcaacccattcaattttcttatttcctcgcaacacattgaagaatggaatgcatttatccgtgggctttgaaatgaacttatatggggttgtgatccttccagtaacactctacacgtccttgtgcttcttggggaaaggcatgttgatgaatgccttgatcttctctgggttcatctcaattcccctaagagttgacattaaagcctaagaacttgccaaaggaaactccaaacgtacacttttttggattaagtttcatcccatatttccagaggactaaaaaggcctccttgagatctgtattgtgttctctgaaagttttagactttaccagcatatcattcacatatatttccatattcctctccaattagtttttgaacattttattaacaagttgctgatacgcggctctggcattcttcaatccaaatgatatcactttgtaacaatacacccctttatctatctaaaagttggtgtgttcttagtccgtgccatgcattttaatttggttgtaactgaagtatgcatccatgaagctcagcaactcatatttggtactggcatccaccatctggtttattcgcagaagggggaagcaatccttggggcaagctttgttaaggtccttaaaataaatgcacattctccatgtgtcattggtgttaggggccaaaactaggtttccaaccatactggatacaatgaatcctataggaagtcattcgtagttaattatccacctctgccttcactacctctgcccttaccgaatctaagagccttcacttttagcgaattggtgttgcatcttccttgatgttcaagtcaagggaaatggtattggggttgatccccatcatgtcagaatggatccatgccaacacatcttaattttctttgacggtgtccacaatcttcttcttcacaactggatgtaagtttttccccactttaatggtcttagtgggatctatgtcgcagatgttgacctcttctacatcctccagcagctcaattactctttctatccccactataggatccaactcatctttaaaatcctcccagatggcttcagtttctacttgagtatccattctgagagtaataattgcctcttccgggaccatgaacatggtctaaacagaaacattgtagcgactccttgcacttttctgatcacctctgactactccaatgtacccattgtcgcaggaaaacttcatccacaagtctcttatagaagttactaccccaaagtccactaagaacggtcgtcctagtatgttgttgtaatccgtgggacaatccaccactacaaaggtgtagtgtttgaaggcacaaacattattttcttctttgagcgtgattcagagatctatttttctcataggaattagagcatccccactaagccttgtaattgaatgggacaaggtgataggttagcctctatgagtccaaactcttagaatgcaaacttgaataagatgttcactgagctcccattatctaccaagactctggaaaccctcttattggttatttgggcttcaatgactaaatggccattatggggaaaatgtacatatctaacatcatcctttgtgaacctgatgggcaagtttacagtttgaggacgttgggctggtgattataccactacacatgtttcccctgctccatctaattccctcaaatatcttttttgggaaattttggtagttcctgcaatatacggtcctcctaagatcgtggccacatgtctatctaccgatggtagagttaaacctggagggtataagttccctaatcttggagctagtactgctactgcagcctgagctggcagagctagcagagcaggtagggct

SEQ ID NO: 236417 - DNA, 894 bp, Cannabis indica
acattgcttcatccaaacatagtattatttattacttaatacaatacgactttatacggcgtaccaaacgagccctaaaagatgtaatcttcttgttggtttaaagtatcctttaaagtgaactttagaaatcaaataagcatggcttaagagaattaattaaaaattaacaaaacactaataacatgtacattaattagcaaccattttagtcttgatattgattaagggtgctaaaaacaaaaccccttcagctggggtaaattgatatataattacaagagtttattgttgagtcatactacttgcattttgtctaaatatggtaactttaatcttaggttgattcttgttgatcagctcaaagatacatacatcagatttctgaagagagttgtctcttgcaaatgcagcccatccagaagaaaacctatgctctaatccagaagatgatgatcccttattaatagttaaattcacatgccaatattcctcaccaacccaaagactcacaatttgtgcctttttctcaaaccaagagtttgcaatagccactagaatatactgcacaaacaagaattaatataatgaattatctaaaaaaaaaaacaatttcgatactgtcaatgaatgagagcaacaacttgtacataccaaatttccatttccacgcaattgatgtgctctcaatttcacttggaagtaaggattgtctgtgaagaatttggtggctgcttcagatgaaggcctcttattattattattattagtgcctatgccttgattttcatgatcagtatttgtttcagatactgattttgtctcatttgcagctaaaaacaacaattgcataattaagttaactctatagccatatttgcattcaattataat

SEQ ID NO: 236418 - DNA, 3088 bp, Cannabis indica
aaaaaactgtattttctgtaaataaaataaaaaaaatcgtaaaaatatttaaaattccatgaaaccgtatttttgtaattttttttatttttgtatatttgtaaaataatccttttttttttaatgtatttgagttataagtttttgattctctttacattttttataaattttttatgtcatatttttttttgtaaaatagtttttcaatatcacattttaactctttttttttttttttttcattccctgccacttttatttacataaagtttaatttatacgaaggtattatattagttgattcattttattttaatttttaaaattacaaatgacaataaatatgagtttaattattaatatatataacataatattatttggtgtaaaaattataaatgtggagattttgtaattaactggaggtggtgacattaatagtgaattggggatattttgtttgttttattattggaaaatattgaaataaatgggcagtaatagctaaagaagtattgagttttttgcttttttagttatataagaagatatcaatttaaattatttttataataaattgaatgactataatatttaggagatttgccaacccatctattttaataattgttgtaaacaaacaacacaaactcaaacctatcaatggttaattaatcaacaagaattaaaccagcaaaaccataaatataaacaagataattaaacaatgaaaacaaagagagaacacaaggatttaacctggttcggatctcaaattttgagtcctactccagctctcctccaaggagatatctccactataaatcagtaattacaagctccaatacattacaatgcactcaagaacaatccctgtcataattgactctacaacactcaatactagagcacacttagtcaactatgaacttgatcttcttgcagcattcgagcttcgattctctctgtttctctctcaatttcttgcctttaattgaatacaaagaagagccattttatagtgttagtagttgacatgtccagcacttaacaacttatgacaagtcggttattaaccaactaactgatttcctaaaacaggaaagatctcaattgaaaataacagctagatcaactaaattggagaaaaaaccggttaagtttagaatggattatcttccacaaattccaccttaatccatctaagctgaaccttgataaacttactacacttggggagtgatcctgttgaattagtcaggacctatgttgagtaaatccaaacaatgttggaatttactcactaggaacaccttggttcctgcataagcaggattttcatcacttggtactttctcgagataaacttcaccatcttctatcttttctcttatccaaaatcttctaatgtcgatgtgtttagatctctcatggtacacaggattcttgcttagatgaattgaagattgagtactgtctgaaaacacaatgacttttccctttatcatttgtagttctcctaagattcctttgatccaaatagcttccttaaatgcctcggttgttgccatgaactctgcttctgtattggagagtgctacaacaagttgcaattgagacttccaacttatgcaacatgagtttagctgaaagcagtaacttgttaaagattttcttgtatctctatttgatgcataatcaacatcaacaaaaccttcaagttccaccttgatccctgccttcttaaacttcaggtcgtagtgagcagttgttttcagatatcttagtaaccatttgactcctttccaatgttctacaccagggttagacgtgtatctactgagtgtaataacaacatatgctatgtcaggtctagtactgatcatagcatacatcacacttcaaattgcttcagcatatggtatttcttccatttgtttcctttctttgtcatccttgggagattgacttctggaaaacacaaaatgtccagcaagtggtacttttgtttctttagaatcattcatcttaaatttccttaaaacagcttcaatatactttccttgagtcaatgtcattttgttgttcttcctgtctctaagtatttcaattcccaaaatcttcttagccactcctaagtctttcatctcgaattcactattgagaacatacttgagcttgttaatctgattttgatcatttcccatgattaacatatcatcaacatacactagtaggaatgtagcagcttgtgtctttaggtttgtgaaatagaggcatgtgtcatattttgaccttgagtaaccaaccttagtcaatactgagtcgaatttcttgtaccattgtcgaggtgactgctttaaaccataaagtgatctcttcagtaagcacacaagttcaccatccttggattccaccttgaatccatcaggctgcttcatgtagatagtttcttcaagccttccatttaggaatgcagtcttcacatccatttgttcgatattccaatcaaactgtactgcaagtgccaacatcattctgatggttttcattttaactactggggaaaatatctctgagtaatcaacaccttcaacttgagtaaaaccttgagccaccaaccttgctttgtataatataggttcatcattagtcaatccttctttatgtctgaaaatccatttacaaccaattaccttttgtcctttggtttaagaactacaacccaggtcttgtttttctttaaggattgcatttcaaaattcatagcagcattccacttcttggcttgcttactgtttatggcttcaagatatgtctttggcactttatcttgagactccattgtcatggaaagagcataggcaataatgtcagcttcagcatacttagcagggggtctgatttctctcctagctcgatctcgagccaattggtaaccatctaaagactcaactccatcatctggatctgcttcagattcttctaaattttctgatgttatttctttgttaggaactgctctttccaattcaatttgagtactgatttgatcacttccctgcttacgtgaaaaatcagaaac

SEQ ID NO: 236419 - DNA, 1471 bp, Cannabis indica
tttttttgaagctttaataagtaaaaaaatagtaaaaaaaagaaaaaaaaaaataagaaatgtataaaagtaaaaattttcttgtcaaattataaatataatgtttggaaaaaaaaaagtagtatttggtgtaaatttcccaaatagaaaggaatcctaaaatataaatgtaaaataaactaaaaaaaaaataaaactaattaagctagaaacaaaaacatgacatgaaatatgggtttagataatagatttacaaaaatatggcatatcaaataccataaaaaaatttaaatgtgaaaaaaaatgtcataggaaagtggcaaacctataaataccatatttttgtaactttttgatgaaatcccatgtatcatgtaattttcacaataattttattacgaggaaattacactctataccctttttatattgtcctcttttatttttacctttttttttaaagttctatcatttttacctcttttttttaacattgtaccaattatgcccctgtcacttcaaaatactcttcatgtgactctcttatgttaggtattttgggtacaatacatataaaaagaagtatgtttcaaataaatataaaattagaggtaaatttgattaattgattaataaaagggatatttttcaacttaccccataatttaccacctctcctactccttttgaatacttgccaaaattgaaacgttctcctatccattttatgctaaaggccacacgagacgagacccacatacatgtgaccgtaaattataataataccattcaaataagacacaaataaataatttctccattaatcatttcactacctaaatctattaaaatattaataataatatttttatgtaatagatgctaataataatgacataaaaaatatatatttaaatttattaccaattcgctcactattttgtagtaaattgtgtttagaaatctataattcgaactcctcaattagtgtaattaaatgattaaacaaatatgtcaaattatataattactttaaattacatacaaatctaattactaaaacgagcccttaatattgtttcaataattttatgcccacaaattactgcaattatcataaacaacacaataatgtaagttttataacacacaacatattaactttttatattataatttagcaaactggcccctgggaaaggcatatatcattagactataatagaagcccaaacattcttacatgctcttcgttggtgtgcagacgagtgtttcaatgtacatattattgaagccaaaactgttgcccattgactctccaaatatgctttaggcttagacatagaagaaatttggattaggccctcaactgattttcttcatattaatggacaggcccttacacagtatacatacatgtgagatacaatttcataatcatctattccgtccagctttaacaacataaaaa

SEQ ID NO: 236420 - DNA, 709 bp, Cannabis indica
atattgaaattttatgtttttcataattttatgctagtaacagtggaatgcgacatttggcctatagagtcacatagacaaggtctaatattttggttttagaggggtaatttagttagacattgggaatgttgtgaataattggggttataattttggactattttacccctaaatagataggttacttctttgagaagtaagggtaaatttgtcctttacctttttgtttgttagtgagaataattaggatttatttttactattatccctaattgtgttagtatgtgctgaagtaatccattgagttaatgattatctaaattaaaagaataagaaaaaactctctctctcggttcggccacaagcaaaacttaaacactccaagtatttatttcaatttcagacctaaatccagaggtttctcactaggaattcaagagtggtgttagttaaagatcaaggtaagcttctacttctatttctctttgtttttcaagtgaaaagttaggttttcttgcatgtaagttaagttttgggttctgtatgttttggggctgtattgaaacattttttgaggttgttttaaggtcattcaagttattttgagctggttttagtgcttattgttgagaaagacctaaacttgagcttctaagctcaaacttaggtcattcatggtgaattttgctatagtttcttgttgatg

SEQ ID NO: 236421 - DNA, 751 bp, Cannabis indica
agaggctaccatgagagggcttcagtttgggaggtatggattgtcagtctcacatttattttttgctgatgatagtttgatttttatggatgctgatatggagagttgccagcggtttaaaggtcttctatatttatactcggctgcctcaggacaattagttaattaccataagtctaaagtgtgttttgggagaaatgtggctcgggaagctagacagcagcttgcttcgtttatgggtgttcgagaggtagaaaaccatgggaagtatttgggattaccatcttttgttggccgaaacaagaaagaatttctggatcaaatcaaaaacaaagtatgggctaagatgaaagggtggaaaagttctatgttctcaatggcgggtaaagaggtgctgatcaaagcggtggttcaagctattccaacttatacaatgtcttgtttctgactatctaagaagactatctcaagtatccatcgaatggctgcgaggttttggtggggctcttcgaataaggagaagaagattcattggtgtaagtgggcacatttatgcaaaccaaaggataagggtggattgggattccgtgatttggagttgttcaatcaagctcttctagccaaacaagtgtggagatgcattaggttcccggataatctttgtagccgagtgcttaaggcatcatactttcccaataggaacattttggaggctaagagtggagcacatgcgtcttttgtatggcgaagt

SEQ ID NO: 236422 - DNA, 928 bp, Cannabis indica
aatatcaagttgatgcaaaggccaatgatgagtagctgccataaaaatgaacagttgaacagatgtgaatttagcaacaggagaaaaagtatcacaatagtccacttcataggtttgagcatagtccttggcaacaagacagacctttaagcgagcaattgttccatctcgattgaatttaaccgtaaacacccatttataccctatggcccattttcctgaaggtaagttaaccaagacccaagtaccatttgcaactaaagcattcatctcttctatcattacaacaagccaaccaggatgtaacaccttgactctcaggaatgccatgtgtgtgcttttacaaactcattattactagtttattagttaggaaaaagtgtggtttaattaaattctttaactaaatttaaaataaaaactttcatttcaaacattgtcgtaatatggggatcccctgctaataaaattcctttacaactaatttacaaaacaactattacgaaatcaaggttacattttcaaatatagagaaaagaagttgatcttgcttcccagaagccaagacactacggcggatatgtacattgctgggaaaacctccaactcatggtcgaacacaacttctaacttctttacctacaccatgaagcatgagtcacagtgactcaacaagaaaatctactagataaagaaaaatcatgaaaagttatagcagatttcattacaccagaatatacatacaaataggtcatactctttcaacgtacatatacaattcagcgtctatacgagcaaacttattacaagattatacataaccaacaccctcagtgtttcataaaatattctaatcatacattatcataaacacttactttcaatgcttcataaagcattctggttcacacgttagcatattcacaca

SEQ ID NO: 236423 - DNA, 857 bp, Cannabis indica
ttagtataaattaaaatttaaaatagcattatatgaaatataatatatattatcaaatttaatataatacaatataatataatatcaatacgacataccaaacaagcttttggagtttattttttatgaagaaaggctaaaatagacatatatgcaccatactttcaattagcactctcttaaaatgctcttatatatgtacgcacatgttatattgttttattggtataaacattgaaattttgtattgaattacttatgatataaactcatagttgtctcatagtgttgtacggtgatagttactagaacaaacgacaactatttttaatgataatttttagtcataatataaactttttgtaactaaatatgatattagtcacgaaaaaaattacttgtgacaaaaatataacatttagatataattatcactagtttagttttagtcacaactaaaaatatatttattcacaataaattgtgatttttgtgactaatacttttagtcacaaattttttagttacaacatgcataagaataataatttataagtagttttaattttttttattttttagtcacaaatttttttgcgattacgagtaaaaaaaaaaaaattatttagggaatctaatattaaaaataatttatttatttatattaattatatatctaatgacttttgtttaattaggtcggctttcaatacctctatctattttgttggtatatacgaagtattattctaaaatcgaactttagtaattatatttttctctgaatcttttatcatgattcatagagtgagtgaggttagctaggaatttcaatacatgaaacaaacaaatttttt

SEQ ID NO: 236424 - DNA, 994 bp, Cannabis indica
catctttttggggactaaaggggtaaataatttaactgttcaggtctttgcttctcgaaaacttctcatgtggaaatggtttttctccccaatccataagaaaatgattggaggagtaaattttaattttcaacttacattcaacagacattgagatgatagctttaaacaacatatgagagttcagattcgctgactggatggagcaattttattcaatatttggggtagtgattgttgagctattcatcatcaatagacatttctgatgatggcttaaaaacactatgaaaccattctttttctttttttttttttttaaattgtaactaattttgatcgactgtgtatgtcttattatttatgttagcaaatgattcttcattcttgataagtcaatgaatttaaagatgcattgaataaaggattgtttgtcctatcttttggcaggagagttcacagataggctcacgttttgagaacaataaagaagacagtaatttggacgattctctcacccttgctttagttgattccaaggagtcccagatatttgcttatgtagaccagacaccatcttcaaagtcccaagatgtggcttatacttatgattacagttcaggttttaccttaggtgacagctctcataggggattggggtactctgatgaacttgagggaaccccaagtgatgatgaagcttcctagcacaaaatgaagagaaggaaacccactttcaactccttgcctcccgagcaggatgtggatgcaaaagagagaaacaatgatgaaatagttgttgcgaatgctgaagaaccaccagcagtgatgtcaactcctaagaaaaattctgggtttttgtctattggaggtgtgaaactgtacactcaagatatatctgatgaggaaagtgatgaagatgaaggtggggaatcagctgatgaaggatgttcagggtcttccgagacggtgtcatctgaaagtgatgactctg

SEQ ID NO: 236425 - DNA, 1292 bp, Cannabis indica
tgactggaagagcctcattcagtacacgccaaagaaaagttgataaccttgggtgaagatctgaatgcccaatccaagtccagattcctttttttttgatcaaaacgagcttcttgatcaatcctgtaggcacttttgacagaaaaaatgccattttgttttcctgtccaaattatcttatccttgtgatttaaagaaagtctaggaatttccattatcctatcacccaaatcaccaaagatttgttgcaccacctccttgttccattcattccctatcgatagatctgctaaggttctaacagtgtatcccttcggtttaatggattccattagactgttgaagccattaaaatcaagccatggaatccatggttgatgccatacatctatttcttcaccacttgccgccatggaaaaagaacctttggctaaaatatcacgaacatcaagcgaacacttccataggaaggaatctcagtttctcttttttaccttccaaaaattttcatacttccaatacttgctaataaaacaacttacccaaggcttcctctggccgtgacccacgctccatgcaagtttagcaagcagtgctctgttaaggtattcaaatcttcttatcccaagccctcccgaatcttttggctagcaagtcttgtcccacgatctcagggccatgaacctatccttgtctgaattgcctatccaccagtatctcctaactaacgcatccagctctctacaggtagatagtgggattttgtttgtcgacatcatgtaaactggcattgcagctgctaccgtcttgattaaagttagtctctctacatatgaaagcagtctcattctccatccctctaatttctgcagcattctgttcttcaaattcatgtagttttccttctttctgcatttaaaaacaaatgtgtttcccaggtgtttttcttctccttgagattgttttatgtctatcaactccaaaatttcttttcttctggctgctgatagattattcgagaacaaaacactggattatactttattgcactcttgaccagaccaatcctcatatctcttaatgcattccatcatctcctttgcttccatactatttgcttgagtgaagagaattgtgtcatccgcaaacattaaatgagatattggaatcgcatttcttgcaatttggataccatggatcttcccttcatattctcgtttttgaattaactttgaaagcacttcctagcagaggagaaaaatgaagggagatataggtgttgggttttatgc

SEQ ID NO: 236426 - DNA, 879 bp, Cannabis indica
gtcaaatctaaaactaccaatatccccaacattctcaatgtctatctaagttacccaactattattaagatactaaaccatatgaagatgtgactctaacggccaaatgtcgcgttccacttttaccggacataaaatatgaaaaacataaaatttcatctataacataaataacacacttaaaattcaaatatatcactataaattcacaaatcatagttaaaagtctaatttcaaattaaatcctaattatctactaattcttatattaaaataaagtggtctttacatactctttcactgttggctcgaaaaattatgaagaacaagagaggtgaattcaaaaaatagtaaaggaagaagctctcaaagtttctggctagttatctcacagataaactaggttaaatacattggatgagaatgtaaggtttcttatactttatatgtgtttatttcatatcgttttagaagttcatatttaggatgttagataacatacttgttagtaaatctaagatcctggtacaataattccaatacaattagaaatgttcaacatacttgtaattttaattgtgtaacaatgtattattcactgttttgcaacttctttattatccttattaatcatgttttatgaattcatatctgactttttaaaaatttaaagaaggaaattcttttcgtagttaaacttaaacaagtgtcaaaactgtcataaaacgattttgcaactattagcaaactatttaaaatttgtgaaataatatcagtctatcaaatataacatatcagtctatgtgaattctcatagagaattaaacaattcaaataattaaactatatctattttattgcttgattgttgcatgtctt

SEQ ID NO: 236427 - DNA, 1260 bp, Cannabis indica
ataaatcattttgttattaattatcattaaatgaaaattaaaattaattactgaaattttccaaacaccaatcccgcgcatgaaactcggctcagtcaatcctcaacgctccacctttcctcgtcaaattcccctgtcggccttactcaggcgacaccacccagcctattctacaaaaccttaggagaaccaagcttcgatagccaacaacatacaagagatgaattatagaagcatacaaatcataaaattattcaacaaaagagcaaacatattccagtaagaacaagaatacatggattgatcactatctgataactcaagaattatacggtgaattaataatctaaaaaaactacaaaaatcaaggaaaaacgagaattgaaacaatcaaaaccaaaaaatgatgaaatcaaagaaaacatacagaagaaaaaagaataatggctgtaaataatataatttagactaccactcacatctgtttttctcctattgttatagcaataaacttctgatagagattgcttattgtatattttattttatatatattaaacaaacatggccgagaaggatctcattggtgaatggtccgtaaatgttggaggtatctagaaaggtaataccagagttgatggcgtggtggagaagagcgatccactgattttcgcatagctactgatcttcaaaactccattgttcaaatcactgttcagattattcgcaccttccggaagcctactcgatcgaatatccatcgttaatctcaccctcgtcctttctctcgttttcgtacgacttttctcgaactgccgttcgccgattttctgaccgcatcctggctgagcttccgtcgaagctgtaaggtccgaagttaggattctcaatcgaaatctccgccaccagagtagcgttaactgacggaaacgacgaggttgtttagtggagagttttaacggtaacgaatctgattttaacgtcgggagatttaggtcggagaacgattagggagaaaattagtgagaataaactgagttaaagtatattatttggtacatattaaagtttaagaaacataatttgctagacattaaaattaataactgaattaataaaattaaatgaaattagataaaaaattttaaattaaataatcttaataatttaaaaaaatttaacgcaaaaaaaattcaaaaaatataattaagtacatgggagagttgaaacacaacaaatcttaatatgacattgcaaaaa

SEQ ID NO: 236428 - DNA, 730 bp, Cannabis indica
tctatatataaaagataaattaacatcatatataaattcatataacaacatatacattattaattgaaagttcactattaaaaaataataagataaaattaagattaataaaagataaattcaaattaagacaattacatgaataatattacataaagtgtctatataacaaatatttataacaatacttttaatatacaagcccaaccttcataacttattaaaaagatgcacttacaatacacaagcctatcctccataagtgtgattaagaaaggttctcctactcttaactatcataactcttgatattatctggagtactttcttgcttatccaatcttcgatttaaattgtatctctaagtagcgccataagctttataatgaaagattgaacaatattctgcaacaatcaaaaaaatttatataagccaatacacaatttaaattttaaatataaaatcacctcatttatataaggagagaaaattttttccactaactctttaactttgtatgaggttataaaatgaaattctattatctacaaatataacaattaaaattcaacttagttagatatagttataaaggaaattagctgagttttgttttattctagacatttattttcttcttcgcaaagaataaataaagttatagtaatacatgagttaccataaccttaaatatgtataagctctattttatcatcaataagaagctag

SEQ ID NO: 236429 - DNA, 1594 bp, Cannabis indica
ttatttaataaataataaataatctttattaacttgtattattttagacctaagttggagttgaggtcagagtacgagtttggggttaggttcggatagggattgggtttggattgacgaggtaggctgaagtttgagtccagaattaaggttggattaagattgggtcagggtagggttggatcgaggttagagttaggacaaaaagtattattagaaaatgatatgcaatatgtcatgtaaaataatatgcattattaatatatccatatttatatatattggcaaaatagcctacttttaggggtggcaatttgtgttggcatgtcatgttcggatcgtgttgaggtcttaaatttattgaaaaaaaattgttgaatcgaacacgaactctgatatcaaaattttataaaacactaacaggacttgaataaattatgtgtagtgtcaatctcgtagagtctcttgtcatgctaatttaaattgttattttagtattattatgttgtgaggagttattaaatttattttaaattgactaacacaaacacaactcgtgacacgaaaaatttataaaacatgaacttgaggacgatgcgcataattttcatattatgtcgaacccgtaaaatctcaagctgcgtttgtgtcaaactcgcttgttataatagaattgccactcctaattttattaggtcaatttgtattgtggcgtactctcaaaactattcagctaaatggcctctttcattaatgaatttttgctattgccctttctacccttaaatgaacataacataataaattctaattttttttcctcatttacttcaacaaagtaactctcacccacactcaaactgccaacgacttcctcccgtcaaccactttagtgatgaccatcggcgacgaccaccaccaaccttgtcgtcaatcactgtcaacctcacaatctcacatgcatatttaaaagtaggtttatgtaaatttcaattttaaatgaaatttaatcattcttttagtaaattaatagtattagaatgtaattaaactcatttctagagttatttagagcttccaatttcaaaatcttaaaaaaaaattgttggatttgtaatttttagagaaaattaaaactcaaaaatttagacaccgtatcaaattttttgacaagacgtctacattttagacactcagtacaaaatttagacaacttttcgtatttgttcgaccaacagtcaaattataagacaaagtatctattttttaggcaacatgttgatttcatagagtttcagatttgtattaattttttatttaattaatatcaataatttatatttattttgtatttttatttttgaatgccatcgataaatattgtatattgtgtgacgaactactccttataatttgagtctattctactaattatttatataaattaaagaagccatggggattaaagaagctctcagttgggtaaagaccaataattggcaacatgttcaaattgagacggacagtcttgtttcaggacaagctatgcgaagcaaccaagcaatgaggttcactttcggccttttaatcaaag

SEQ ID NO: 236430 - DNA, 643 bp, Cannabis indica
tcatgtaatagctttttataatttaataaatgtatattaccacggtaacaacacatatcaataattaatagataaataaagatataaattatcattcaaattgtgttaatttaattacctaatatgtgtacaaagggtttgcctaaaatcaaaaagtcggaaagacaaaattaaacttatgaaatgcaagtgacaaagagtcaaaagtctactcggccacttgggggtacctatacccgtacaaccattggtaaaaaataagctaaagcaaaaacaaattcaatttgaagttaaagaaaaatatttttattgagataataaagcaggataagtctgagattaaaagctggccgaccagctagtcgtcttaaaaaaaataaaaaatatttctcaaaaattaaaagccgcttggccagccatattatactaaagaaaaggcctgtaggtcgaacagacaaaaagaatttgaaaaatttactccataggattccctggatcttcaagctgagcggatgaatcctgagcagcaacggttgagtcctgagagacattgttctcttgctcctggacggtagaagaatcatcattagttttgttcgcttcttcctcaagttttctgttggaatttattttaccaggatct

SEQ ID NO: 236431 - DNA, 1665 bp, Cannabis indica
acgtaagttgatccctgagttatagggattcagctgatgactcatgatgcgaaagctgaattcactaagtgttgattgatttgcacgggtcgctgaatatcttattgaggatgtgccaacgaggcatcctgctcggtctatcttcccgagcagacgctccaagctgactctacgtgtcaccattctcgtaatgccacgtcagagtgcaagatttgggataacatttgcccccaagtctgtacgggacctctgaggttgcgtgtagacttcttctgagttggttctacctttggatggggacacgtgtcgagcgtgaccgttcaagactcgatgtgaagctgactgtcgtctcttcagtttttggctaataaatgctctgacaattaatatttcgaaatctgattttctctctccacggcggacggttgcactcaattacttttgatttcccatattcatttttgaggcgggaaggtgaggcctctgaggttcctttgagacagttacctcttttcgtgacttgcctataaatgcccacagcattggcacataaactcatttcatcacccttctttggtaagtaagctccagagcgaaaagaaggttttgtggcttcaaagtcccctaagtgccttcatacaactactggttggcttgacgttgttcgaacccagatactcggatcttgagtaagtttctgatttcctttatgcttatctttgcatgtttacatttcgaatgcaacttaactgtgctgtagaaaaattcttaggaaaccctagggttagaaacttctccgatttttctttatcatgtcttcatgtgggtttacagccatagagcttgtcgctgaaccgcattgtgtccacctttcatcttgcttattctaagcttcatgaactttttttccctaactcaagaaatttttttgacttcttgagttttgacctttctttagacatagccgttctttaatctgttgagtactcctagtcgacatatttgcttgtttatcgtttgatattccgtccaacactcgtctcgtgtgttgtcttttgtagatgaactcaggtgagtcttgggaacttggacatcagatcaaccaggatttgcttcaacttctgcacgaggatcaccctcgtctttgttttagccctccttctagtgaaggacattcttctgaccttgtacccaaccataggatgatggctcgtacaaataaaaccactcgtctggctgacgctagtgatcctcaagtggctcatcttgccactctgcccatcgccgaacaagattcgaccgtcctgatggaggaggatcacgagggggacgctgaggtctaggaggttgaggaactagacgatgcgtgtcagggcagtccttctgaggcggagggagaggaagaggttgaacccccaaattacggggagtgcaatgaggctgggcagccagtcgatgctgacgaagatgtcctggtcgagggtgttaactacgtcagtgaggagcttgttgcggtggttcctcagaggaggcagggtgccttgggcgctaggtgggtaagtcctccgtccaaaattacggaggcgcgccttcgaactcttgactaggacgggtacctgggcgagctggactgctacattctggccaacactaatcgtgccacaa

SEQ ID NO: 236432 - DNA, 3219 bp, Cannabis indica
aacgagttgtgagggaaatattttcctcttgagaagtgtactaaggagtgaatttggggactcaatgatcctccaagcttgcttagcgagaagggcttggttaaattgaataaaagaccgaaaacccattccaccttcacccttagttttacaaagcaagttccatgagcgccaatgaatcttagagccattttcattcaatccccaccaaaaattcgccatcatactttcaagttgattacaaaagtatactggtaatcggaaacaactcatagcatatgtagggatagattgaacaactgctttaagtaggacctcccgacccccagcgagaatagtttttcactccaagattgcatgagtttccaaattcgctctttgatatggctaaaaagttccttcttatcccgaccggaataggatgcaaggccaaggtatctctcatgacattcactgatcggcattgagaggtgtcaatgaaaggaaatctgggcagccaatgttgtgtttggagagaaagacataacagacttgtcccgattgatgaattggccagaagctttatggtaagtatctaacaccctcttgattgctaggcatgaactttcatcagcttgacaaaacaggaggctatcatcagcaaagagtaagtgtgagatcatgggagcccttcgtgtaagtctgaaaccatgaagattgccttggtcttgctcatgttgcaataatctagataagccttcagcacatattaataacagataaggagataatgggcagccttgccttaacccccttgtagggaccaaagagccagtcacttcaccattgataaggaaagaaaacttgttagtggtaagacaattcatgataagtgtaatccaaccactagcaaaccccattttcttcataacttctttaatgaaaatccattcaactctatcaaatgccttactcatatcaagcttgagagaggcaataccatggcgcccagatgtcttattcttaatagcatggactaactcaaaagcaaccaagacgttgtctgtaatcaaacaatttgctagaaaagcactctgagtttcagagataaccaggggaagcacctccttgaatcttgcaactatcattttcgtaaccagttttgagatgacgttgcaaaggctaatcggccgaaagtccttaacatgatgcggcttctttattttcgggatgagagtgattaaagtgtggttgaagcttgaagggtcagcaccattgttaagaatattcaaaacggcacgagatacaagatcaccaacaatggaccaatgttgttgataaaacatggccgacattccgtcaattcccgggctcttgtccgcactcatatctttaagagcattttcaacatctagcgtagtgaatggagcaagcaaggagtcattgtgagtagcagttaccaaggtgggaatacagccgagagtgtgctcaagagcattatcatcaataggaccagcagtgaaaatgtcagcataatagctatggacaatggaagaaatctcagcattagaagtagccttaccgcccatatcattgtagagaaacttaatgcggttgttggtcttccttgcatttgcttttgcatgaaaaaacttagtatttttatcaccacaagcaagccaatcgacacgagaacgctgctgccaatacacttcctcttgctctaacaactcatccaaaatagattcaacatgctttagatcatcaaagtgagtgccggtttgggaggaagagttattgagctgctcaactttgatttgacaagccttgatgtttctcttcattttcccatacttatgagtgtgccactgttggagcttttcagcacacagatttagattagacataacagcagagatcgggtcatgggaatcaaaattagaccaagttgcagcaatgatatctttactttcggggtcggagagccacattttttcaaatctgaaacggcttttacgcttactgttgctgggctgagaagaaagcagttggaaggaggcaccaatggcgcgatgatccgattaaaagtaatcaagatgacaaacatgaggactatcaaaaaaggaatcccagtggctgtttacgaagcaccaatcgagacgttcttttaaggtgttgggagcagttcggtttttagcccaagtgtaaggatcaccatcaaccaatgtttcacgaagacaacccttgtcaagagcatttcgaaaggcatccatttgagattcactacgaagagcccctccggatttattattgttggaaagaatttcattgaagtcgccaataacaaaccaagggagttgaggagcaacatccgcaagtcgttccaacaaagtccatgacgcttgtctattagaaacttcgggtgcaccgtagaagcaagtaaggtgtatagttggcccattgtgaatcgccatgtagcaatcaaaataagttggacccatatttaggagagagatgttcacctcatctttccaaagaagtaagaaacttataatttagtgaatacactcattagattattataaatagaaactcatacaaaatggaatcaataaattcaaatggttacagaaaaaaacattataattattttttattttatatactaattaatactaactaattaaaagaaataaaagattaatgcctatagtattttaaaaaacgatttatatgataattaattataaaaacataacattcacattaatactcaattaattataaaaaatataacatacacataatttaacatttgtattaattctcttcaatataaatatgtgggaaaatatttttgtcgacgtgttatgtggaagtgtactattagtaaaattttgtaagaaaaatttctttacaatttaaaaaaaaaaaatcaaaaaactttaaaattatttttgaagtgtggaaaagaagttgatcaatcatatccatggggaagttgaatacttcttattcaaagtaagtttattctattttgacaactaaaaggtaaattacttttaatatactattttatatgtttaataaatttttggttttgtaggaacaaagttcttttgtagcttcttttttggttcaaggatggaaaataacaaacacaaatatgataccagaaaatgagcattcctcgcattgaaaaggaggttagcggtggggtagaaatattaataaatacta

SEQ ID NO: 236433 - DNA, 1391 bp, Cannabis indica
gcctggaccggacggcctacctgttgctttttatcgatcgaactgggatactattaaagaggattttatggctatggtgcgccatttcttcttgacttctaaattaccggcgttcataaatgacactaatcttgttctcatcccgaagaaagagaacccggttctagtgaatgattttcgtcctatagctttgtgcaatgtagtgtacaaatgcatctctaaaatccttgctctgagactgaggcctatttttccaactttgatctcccctgcaaagactgctttcattaaagggagatcgatttcggagaatattgcgatggcccatgaagttgtacattccatggccaaaaggaaaggatctagaggatttatgatgattaaacttcatatggagaaagcctacgataagatggattgggattttgtgcttgaggctcttcaatttcatggattaaaagaacctcttctgggttggattagaagctgtattcacttggagagactaaatttgttgataaatggggccaagcaaggagtgattaagccttcctgtgggcttagacagggggatcccctctccccagccttattcatccttgcggctgatttgttatcaaggttaatcatggaattcaatgattcggggaagattcgtggtctcaaagttgcaagaaatgctaccccaattacgcaccttatgtttgcagatgatgtagtgctttttggccaagcttctatcaaggaagcggatgcctttctccaatgtatgcaaatctattgtgcatggtctggacaagcagtcaactttcaaaatccaacaatattcttttctaaaggtgttcctaataatcgagctagcgtcattgctgagaagttaggaatgcaaaagatgaagtcagatgctacttaccttggtttccactttttcggtcatctagaagatctcgagatatgcattttttggtaaggaaagttcttaatcgagttcagggatggaaatctagattgctttccaaagccgcgagagcgtgtttgattcaatcagtgggaaactcgcttgccttgcactcggctgcagcagacgtaattccctctggtatagctgattctattgatcgcagtctccgaggtttttggtggggtgatcttgagaccaagagaactctccatactgtggactggggttctctttgtaattcgaaactccaagggggtctcggtttcaggcagaccaaggatatcaacaaagctttcgttttaaaatggggttggaagatggtgtcggatccctctagcttgtggtgtacagttatgaaggagaaatatctcaaaggggaaaacttttggaatgtacaatgtaaagcgtatgattccaggttgtggaaagc

SEQ ID NO: 236434 - DNA, 1599 bp, Cannabis indica
aaaataatttccaacaacatggtcggaattgatccttctgtaattttgcacgtcttaaatattgacccaaactttcgaccagttcaacaaaagcgaagactgttggataaggaacgagccctagccctgaaggaagaagtagataagctacgcaacaataatttcataattaaagctttctactcggcttgggttgcaaatcccgtacttgtacccaagccgaacaagaaatggtgagtttgtattgatttcaccgacctcaataaggcgtgtcccaaagactattttccacttccaagaatcgatcagcttgtgtacgcaacagcaaggtacgaaatattaagcttcatggacgcctattcggggtacaatcaaatcaaaatgcatccaccagaccaagaacatacaagttttcgaacagatatgggtctgtattgctagaacgtcatgtcgtttagtctcaaaaatgctggaaccacataccaaagattggtaaataaaatgtttaaagacgagatcggacgaaacatggaagtgtacgtggatgacatgctcgtcaaattcaggaacgctggggggcacatagatgacctggacgaatgcttcaaagtcctcaagaaatataacatgaaactcaatcccttaaagtgctcctttggagttagctcaggtaagtttctaggctttattgtcaacgattgaggaattgaagccaatccaaagaaggttcaagccctcctagatatgaaatcgccaacaagaaccaaggaagtttaagtttggctggtcggattgccgcactcagcagatttgtttcaaaatcaacaaacaagtgtgttccgttcttcaacatcctgcaaggaaataaacaattttagtggacggaggaatgtgaaaaaccttttcaagagctaaaaatacaactcgcaaaacctcccgtaatatcgaaacctctggacggagaggaacttgggatatacttggctatcacggagcacgttgtaagtgtcgtactgatcagagaggaaaacagcatacaacatccgatctattacattcgtaaaagactcattgaggccgaaggccgatacccattgatagagaaactcacttactgcctgattctagcaacaagaaagctaaggccttattttcaagttcaccctgttcaggtataaactgaccaaccgttacgccaaatattgcaaaaaccaaatgcttctggacagttgctcaaatgggcagtgaagttgggccaatatgagattaccttccaaccctgaacaacaattaagggtcaagccttagcagactttgtagtagaatattgcacaggcaaggaagaaagcatatcagaaagcaaccccgagccaatgtaaatatcttagccaagtaacagtgaagacaagccgacttagaaactacatgtgcacgggtcggctacagatcaactatccggtgcaggaattgcccttgtcacacctgggggcaacacctgcacgttgcagtcaagtttggatttaaagcatccaataatgaggtcgaatatgaatctttgatcgctggtttaaaactagctcgggagatgaaggccgaaca

SEQ ID NO: 236435 - DNA, 790 bp, Cannabis indica
aataaagtttgaaaaatatatatttttttgaataatttaagatttttttaaataaagttaatatatatattttttattaatttaatactttagtcaagttttttaataatatattcagagttaatagaaaattataatttttaaaattaacctattataataaaagaggacaaaattatgtaattggtaaaaattcaaggggtaaaaatacttatttgtaactgtaaaagaaacggaacctaacaaaagggatatggttatgtaactggtatattttaggaggaattttaaacaaaccgtatattttagggggcaggatcaggtagtgttaaaagtttaaggggtaaaaatattacttattctttaaattaataactttatcaaatattgttaaccaatcggaaagagccacctcaaggtgatgttattaaatattgctaaccaattgcaaggcaccgcctctaggtggtgttagacaccaatagtgccttatgacattgctcttctactagtgttgtaagtaatccatcatcttcaattaggtgtgctaaggacactctattatgcatttctattatagtctatccctaattttaatttgataacacgtgtcatcatttaaataatgtttaattttacttactaattagttattacaattagcttttttttttcgagactattaatttgttagtgaattataaaataacttctaaaaagaaatacggtaatgcacacttaacatatatatatagaacacttcttcatgagtattatccattgatggata

SEQ ID NO: 236436 - DNA, 1077 bp, Cannabis indica
tagtaatctactatgtgcgcgagcagttattatctactatgctttcgatttgcgagcaattgcaaattctgcttcacataaacagttataatctgttttaagaaaaattaaatatacttttaatgattcatcactttgaatatttttgattgcttatatgaataattaggccttctattcatattttaggtttaagtatcttttcaaggcatcttggtgtctcgcttaatactttcctgcaaaatgcgagtcgttagtattcagctttgcatgtagcttaatgttgtttttatgagttatatctcatttacaactgctacctttgaatttcttttcttacagaaaggttctttaatgaaaaattttaaaaatttaaaaattttaaagcagtgtagttggtttgcaatatgtcatgtatttctagatgaatttcagttaatcatacacacacatatatatgaaccacaccaatagttgcgaagaaacccgacaccaattatggtagcatccaagaattctcgaattttgggatgtgaaattgcaacacgatgcttagttaagcatgaaccttagtatgaaggaagacgccacatacggtgatggaaattcatttgataagtcaggttgaacaccagaaggaatactccttgatgagtttgaatagttctttcaagaactcaagaagaaaacccctcaattaattttcataacaatttgattttccaaagtgtttacaaaactttatatagccaacttacaactaggaaaaagggaaaccaaaataaagacaatttccaaataaaacaaagatagaataaaggtaaaaaattaaaaaggaaaagttgccaatagctatcaaaaacgtgatcagccttagatcactcctaagttgagtctaaattgagtctacttttacatgtttcacattgttcgtgtgaaagttaaaaagacggtcctaaaaaatgtctcttgagcctcaaacactatggtttaagcctgataatggaacggcctgcctggtcactatgaatgaagagaagcacaaatttatgttctctttcagtgttgccacggtct

SEQ ID NO: 236437 - DNA, 1095 bp, Cannabis indica
cgcctaagatagttagggtgttacaactaagtttctcgcaaagaatcaaggtatttcttactcttttgttcatattttatatagaatgatcattttttctaaatctactaaacatgtatgtattcttatttacaactacggatggttaagacttgggattttgctcccagcgggtcaaagttgaaagtttgacacaaagttaaaatcatttaacttgaaaataaagtttgccaaattcaattttagaataattgtttaatattttaagacaatatttattgtatttaattggttagatatttattatttatgttattatgcaaacaatcattatgacaatttggagtattaatttaataaaattttaatgttcttttaatggatatcattgtgattgcaaaaatgaaataaacattatattttgatgaccaattactcatgacaataacatttactttaaattatttttattcaatctactttattataattattgttatctatggtatttgaatcttgttaattttttattaacaagttcaattctctacaaagagaatactactacataaacacttggatgctatgtatgcttaaggaaatattattccagaagtagttatgagtaattagttatttcttagactactacttagatattgtttaaattagaatttgaattaattcaagataattctagttcaacaaagttaaagtcattcaaaggtcttttaaactgatatgggtggagaaaacttttgcctttaatttgttatgcagttcaaacattctttattatcaataatcacattataaatgtatcacttaaacatatcagtacaaaatcataataagtaagataaatgaaatttcaaaatttgaagtatatgcctcaccaatatccttaggaaaactaaagataccaattctctagttattctaaagtgatcaggggtgaaggatatcaattttctttaatcattataagtagaattattttatggatgtttagccattatttacaatcgaatatgatatttaagttatctcatgtttgttgaaaacaactaagagatctccttcaaagtcatagta

SEQ ID NO: 236438 - DNA, 986 bp, Cannabis indica
acactacaaaatagatatgaaagctgttagaacagacaatggcaaggaattaactctcaccaatttctatgccagcaaaggagtcataaaccaccattcttgtgttggaagaccccaatagaatgctgttatggaaagaaaacaccagcacatcttgactgttgctcgagccttagcattccaatcaaaccttcccctatcatattggggatacatggtcaaaactgcaacatatctcatcaataaaacaccctctgtcctattgaatgacaaaacatcttatgtactgttgcacaacaaaatcccccagtatagccacttaaaaaactttggatgtttagcatatacttcccatgttcacactccaaaaaagttttcagcaagggctcgagcatgcattttcataaggtaccccgatagcatgagagcatatatattccttgatatttaaacaaataacaactttcactcaagggatgtcatattctatgaatctattttccctcttctccagggtactcacaacaatcacagtcatatagactatttttttttctccacatctatatcaataacaccatacaaatgtcacaaataaatcagcagctactgatgaactacaacctgccccttcagcagaccacactcctgttgtttctcctccaacaacacctactacaaatgactcaacaacacctgctaaatcaacatctgttccacaaacaagaactggtagaatattaacaaaacctgcatatttgtaggattatactattcatatccaaactcaggaaccaagtacctcttaccccattgccaattacttatcttactataaattttctccaaaattttgagcagccattcttgcagctcatctaatagaaccaaaatcctatgctcaagcttgtaaagaacaaatatggaacaaggcaatggacattgaaatagaaggactagaagctaatgaaacctggattgttgtt

SEQ ID NO: 236439 - DNA, 553 bp, Cannabis indica
tctaaaatatgatcagaacatagctaaattgaggcttaaaatttagctttatttcttgcaaaattttctctattttataaatcaccgtttttcaaaatttgaccaatttatacatttcaagtgtcgaaacctaaaatcaaagaaaagaagcgtaattatattttaaaaataataacaaagaagaaaaacaactataataagtgacctgaaacttaggctaaaaataacctaagacgtgacgtccagacagagggtacattggaaccactgcctccgaccttgggaccacctaacacccaatagtaactacttgacacaagaccacaacctctaacacttgtagtagtactacgtaacttgttcccttgggatatataatagaagttcggaattcttcttctccacttacttacttttgcaactcactcaacatttttaagttcactcatacttgcttttatcttgccttaaattcttgattttctagccataactttgttggacaaacactacaaaaaaaatcttactagattagttaaaacaaaattcatga

SEQ ID NO: 236440 - DNA, 870 bp, Cannabis indica
ttcgagttgagataattacgagtcgagattaggatacgcaaaaaattgtgcacacactcgcaagtgaaatcttgttaactataccgttaaattttgtaaggtgacaaaactgcgatatcattgtgtgtaaaaagtgtgtatgctacgttgagatagttattactctattttagacatttatgtaagttggttaatttgatgtaaaaacacaatatattataatataattacattgtcttcaaaaggcaaattgaattgatttttttacacttttttttaaaaattaataacaaataatgtatttatttgtttaaaaagggattgatgatccataaaaatacaattaaaaaattaattttgctttttctttctaaaatttagtaacctagtgataagtctcacccaagattcttctgaattttttgctagttaaaattctcccaaaaactattcctaatattgtgtacaaatacaattaaaaataaatttttacattataaattcaatcattaaaattggattagttttttttagaatgaatgaaatttcttgctaggcctaagccaaaataagtttgtaaacttacataaattcaagtcatcttagtcattaaactcttcggagcgattacaaaataaaaacttaaaattattataaatcaaatgaatatcttgtaaaactaaaccataaactatcaaacatgactcgttcttattacacaatttagaaacaacttgggaatctatttcaattttaacattgacatagtctagccaatgtcaatgttgaattctacagatgtgtcataccacatcaatgtcaacaaatgccacaacaataatttgtcacaaatacaacttattaattaaa

SEQ ID NO: 236441 - DNA, 697 bp, Cannabis indica
cacattcacatttaacattttttagttgcaattaagttgcacgttagttgaataataattttgctactacaatatcatagtattataaaaacagggcttgaaattatcaaatatgcgacttgaacagataaaatatgattgttgtactattcatttatattaaatatgtggaattattaattgtttggtggttttatgttagttggctcacaactaatataactattgcattacagttgtcttgaagttgacttcttcttttcctactcgctgtcgaggttgaaattatttttcaggcaaagacgccttcaacttcttcttcactagacgacgaccacctttagcaacgggaggagcgaaatcgacgtcatcatctcgatgactgggcgtttccctttagccttgttaacaactgatttatgatctattttttaagctttttttgacaaaagagatggagaagcagaagatgatatataaaaaaaattgataaaggaggtagttggaagaagaacatggcgaaggttatggctaagaggtagtttttgtaggttaagaacgtgggttttaaaaaggtaatgactgatggtttggacaaataggaatggatatgtgtaagtggtattttggtaaataaaaacttattaaaaataaaattgttgtctacaccttctgaaggtatttttgtaaataaaat

SEQ ID NO: 236442 - DNA, 1139 bp, Cannabis indica
ccacgtaaaaattacttatttgttatttttccatatatttttgcgttactttcttaagctctaaaaatatttagttgccgaaaaactcggtaaacactaaggatgatcgagcaatagagaaagcccatatattccctagcaaatctacaaacatcatgttaaccaatctttagtacattgcagttgcattttttaacctaaaagacattactttataacaatacaaacctcgattagtgatgaaggaggtatgctcctggtctggctcatacatcaggatttgattatatcccaagtacgcatccataaagccaaggaattcatgacctgcggtggcatcaacaagttggtcaatgctaggtaaaggagagttgtccttgggacaagctttatttaaatctgtaaagtcaacacatgtgcgccatgagccattgggctttggtataagaacaggattagctaaccagtttgagtaaaacgactcccttatgaagccgcgtgctaacaaacaatccacttcctctttaagcgcttggtacctcacgaggtccattttgcggcgcttctgtcgtactcctcacactttggggtcaatgttcaaacagtgacacatgacctcaggcgatatttcgggcatgtttgaatgtttccacgcaaagacatccaaattttgtttgagaaaagtgacaaacttttctcgctactgaaaagttagtttagaaccaatttttagcactttagaattattaaaagaatcaataggtacctcgattgtctcttctgcggcttgcccagtgttggtgtagttgaggatctggggatccaaattggatttctctatatgcggtatttcctcaattttgaaaaattcatgtcgaggggaaggagcctctagcaaatagatgacatttaccaatttcttcttttctacaattttcaacgcagtattatagcattcccttgagtctgactagactcttcgcactgatcccacacccaagggggtggggaatttcatgctaagatgatagattgacgtgactatcttcatttcctttagaataggataacctatcaccgcattataagtagaatgttgatcaattattgcgaaatgccatttacttggcagtgacggg

SEQ ID NO: 236443 - DNA, 1082 bp, Cannabis indica
gccacttcctccatttcaccttcagtgccctctgccgaagatccccaatagccagctgctgaatgttgaagccccagccccgacgtcgaccatgctatgatttcaagcagctttagcaaactcacactccaccaacgcatgttgaacggtttctgcatgagcgttacacagcggacagtcaacattgacgagaacatgacatttttggagctgaaaacaagttgggagcacacccgaagcagccctccataagaagttactgatcttcggaggtatttgtaacgaccaaaggcgcttccaaaaatcagtttggcatcacggcaccaagcacctttagattcttggaaaaatttataggcacttttaaccgaataattcccacaagtctcaagtctccagttccaaccatcatttacgtccgaatcactaagttgaatgaaaaaaataaggtcctgatcacgtgaaacaaacaagtctctcacaacattctcatcccaagcgcgagtgtcaacttgaaagaggcagctgaccgatttgttcacaagagcagggtgccttgtaacgacatagctgttagaactatgtggaagccaaggatcttcaagaatagatacattctccccattagcgattgttctttaagcacatgaatgtactagatccttagctttaagaatacttcgacagatgaaactagaattatctcccaattcagcagagaacaagttaccatgagcataatattttgccttatagagcctactaaccaaagagtcatcattaaccaacaatcgccaatattgtttccccagaagagccaaattaaacaactatgagtatatatctattcttacatatataacataattctttgtgcacaatatattatataatacaaatctcatatactgatttaaaaaactttttttttatttgtaagagtgttggatatttttagcttattatttatgttatttttagagttaattttctttttcatcatcactttttcgaataaaattatggttgtttttttttttaattttaggtttcgacacttgaaatgtataaattggtcaaat

SEQ ID NO: 236444 - DNA, 859 bp, Cannabis indica
tttttttatcaattttttttaatgcattttaaattttattccattctattcttatttttattctcaatttcattcttatttctatatttttattcattccaaccaaatactatattaaattattaattaaaacacgatggtacttataatttttgaactatttgcacgttataaggaaaaaaaattggacaccaccatataaaaaggggaataaatttgtgtatatagtggaaaattattgcataaggattaaggacatcatttccgaatatcaccaaaattctgtcatttttagttttagtgcttataaaattataattaaaattttcttatctattctatataaagtgtgtctatataacttaatttttggtttatgagaaattaataaataatttttttatttatatataataaaataataaaatattatttatataaaataaaataaaaatcatatagattcaaaaaatttaaaacttcatatacgattttatcatatagattttaaaattttatatacgattcaacaaaaaaaaaaaaagtgcataaataatcacactaaccctaacctaatatataaatgcataaataatcatctccctcccccaatctctttctagccaaaattctctcaacttattaaaaaacgtataatactataacacatcccttgatcgtaatccttgatctttcttctttctttttttcttataaagttcacattcctcatcttctataaacattattattattcttcacttaaagttttcatattattttggatatcttacagtatgtgcactaattattaagtatatttttattttgattattttgatgataggtattcgcactc

SEQ ID NO: 236445 - DNA, 1191 bp, Cannabis indica
tttttatagttgtattatagtttaatggatgttgtttatctaattcttatttattgttttataatttatttatattgatttatagttattgtgaagttaattttttgttatttttttgcatttttataccaaaaatacaaaacgcaatctttattacatcaatacattcacaggttaaagcaacatttatatacttttgtttaagtttattgcattttcaccacatacacacacaattcatactttttgacacgttagtgattgattgattgatgtacatcaatcactctatacatcattttcctcatttttctctttttttcctattattttctattttttcattttttttaaaaaaatattaacctccatggctgaacatttccccctccacgatcccaactccattacccctcttctttttgttcttcaaatttttttcaactcccattaaccgaatctcataaccgttttccctctttttatttttctcttaatccatatataaatatggttgtaactcgttcttcatcaactcctttccctgttcaaaagaaaagttctaaaatggggttgaaatcgttagctaatagaaataagggtaaacgacctattgttgaggaggatgactctgattttgctcctccattgtcgaaacgtgggcgagctcttccaaagaagaaatcaaaggtggcagcccagaaaaaaattcctcaagatgatgctcaaaaaaatgatcaagatggtagtggtcttcgatttcaggtttgttttcggtttctttttggttttccccctttttgaaatttttttcgtatttgatatttatgtgttttgtgtttttcgattttactattctaggttttttattttagcatttcgtttggttttgtttcgttttttagggcttctatttttttagtttaatttatttgttctttttatgggtttttcattttcgtttgtttagtcttaatttctgtttcattttgttgtcttttttttttttgtttttgtttttccagatgttttattgtttttcatttcagtttcttcctttgatcttctcctcattttgtattagttttttgatacttttttaatagtgtaaacacgttttgtatgtattttttgggaatatgtttttgtctagttgtttccagtctatttttatatcatcaatgggtaaca

SEQ ID NO: 236446 - DNA, 904 bp, Cannabis indica
aatttatttgttatcaatagaagattagaagtcattaaagtttacatgtcgttttcatgattatggtttcaatatacaacttttacttaaatccaaagcataagttattcacaataatagtgataacatcacaatagaaagtaattgtgattatatgcttcaaagtactttagtcccatgatttatgagtgcactggatttatactaacgtgataatcagctataaagtttacttatacttgtataattggaatattctttctaaggtattaacaaagtataccagtatcagatgtattgtgtatacatccgattggaccgttattgacaattaaatagatatcataaacttactgttatatcttttctaagtcaatgtcacttagttaatcttagatcaaaagatcttaatcatgctatggttagattctggcttaactgtattatttgtgttctttgacttgttcgttaaaaaggacaaattgaattgtctcaatacatactgttaatgcagattttcattaaccaaaaaaaataagctcttacgtaataaatataacacaggaataataagaaataaataatgtataagcaacacgagattttttttacgtttttttgcagttaaatctgcatactccacgtgcttatcttatttaggatattttctgaatcttagatacaatatacaattgatcgtacatattttctctctaaaattctctgtccctttttttgtgtggaatctgtcccatttacaggaatataggttggcagtaatttacattcaattcaaaatataaccgttaattaaacgtgatcaattcccacgtttcatttaaatcatatgttggataatactagataaccacttaactgcctgttattcttatccttatagatg

SEQ ID NO: 236447 - DNA, 702 bp, Cannabis indica
agaaatgaaggtaaaagttaaaaaatagtaaaagtaaagtgggtatacaataaaattttctctattttgactataataaaggcttcgataggcattaggaaaatatatattttgagccttgaattgggtgggttgtaaggcgaaacccgttttagcttaggccctacatctttgttttaaaaaaatagtatcacatcgtattgtggatattgttccatataaaataaatggtagagtattaagctacatataagaacaagaacatggattactccatttatattaccaattacacatcgctgtttgtaatttttgaatgtatattttgagtgaaatatcattactatttataaaatggtatattttttagttagcttacctctgtggtggagaaaatacaaggttgaacaagctttatatcataagctggtacaacaatagtggttagggtttggctgagagtgagatcaccaagtagactgtttagaagggaatgaagatactttccatcatacttaggacgcattaaccacctcatccaacttgctctccatccaaacaaagaaataccactgtcacaaaaaagttatattttccttttaaaattatgcatgtttttttagtaaattttaaaaataccacatatactataaaaattaggtacctttgggggaagatcttaggcgtatgttgtaagtaaaa

SEQ ID NO: 236448 - DNA, 1977 bp, Cannabis indica
aactccgatgaattttccagcacaagtgacaacttcggcaatcactatagtattatttgttttatttttttaaaaaaataaatatgaagagaattttaatattttttatggtaatttaattaagtttttattttttatgaattttaaattcagatttctttttaatgtcttatatggttttttttagaaaaaaacccatatttttagtttgattggttagataatgccatatttagtggcatttactttttatgccatatttatcataaccttaataatttttcccatatttttgaaaatagctcttttaattaaggtgatgcccaattctcttaactaaagcaatctaatttagtgattcagttccttttcagtagctgggctttcttcagttcaagcataaggaagcccaatttctcataacaacttatccaaaggctgaattggcctagctgtgcaagtctattttggggtaagttgaaaaataccacttttatttattaattaattaaatttatttttaattttatatttaattgaagcataattctttttatatatattgtacccaaaatactctgccataagagagtcacatggagagtatcttgaagtgacagtggaaaaattggtataatattgaaaaaaaaagataaaaataatagactttaaaaaagagagtaaaaataaaaaaagacaatataaaaatagtatagaatgtaatttctcatatattttcacaacctactcaacaaatttagcacgtccatgcataaatgtaatttccaagtctccaattatgccactcttccccacactcaatcattcctatcgattcaacttaattaaagccattaattgtaactagcataagatttttagactactcttttactgctattttatttttatttattttagtgacaaaaataagtgaattagagtaatagggataattacaccatatactaaaatttctaacttttttacttttatacagttggaaggaatttttttttttttcaaaagtactgtataagttttatgctgtgtactgtgttaaattttcactgttgttctactgttatttttacttgttctgttttgtgttccactattgtttaataaaaaacacaatatttttgaaaagatttccgtgtgacggtatttttgtaaaaattaatctaaattttagtatttttgtaagtttcactagtagtattaataaagttagagtgtagatattatactttatattctcgatattgatattgatttttttgtgcttcatctttatattttatttattatattattttttatcttttgtttttttttttcaaatttaataatatcttacatgttgagtaatatttttcttatgtaagtaagattattaattatttttgtatttttattatattatatgtcttttagtgcttctactaatagtaatattttgtcaatttatggtatataatatgatatactgtgaagttagaagtaaagttcaatttatttaagattaataatttgtgcttttaacatatatattttcccgttataattaatagtgtaaaattgcatgtgtttcaaatttatattggcattaacatagaatttgaataattaaatttctactttaccgagctcgttaagtgatcattctcctcgttctctttctctctctcattattttattatttttaatttatttcaatttttactatctactctatttatatattaatcttcgtaattttcttcttcaaaaatcgtttattactgcgatcgttgtataatttttttctaattgtaatgttaattctcactgtctttgctctatttccttaatacatattgtaacgtccccgcttcaagtcttcattgggcccttacacccacggactactggctcttatacacgagtatgtcactctggctgcttcatggactgatgactgaccctacagacca

SEQ ID NO: 236449 - DNA, 2374 bp, Cannabis indica
tttttcgagccttcagaattcccttccaaacaaagaatcactattatgttttcaacctcccgaagtttagactgtggcaatacttagcattaagaattcgaacccaaggtttctcactttggcacagcatatgccaagccaattttgcaagcagagccatattcatatcatgaagtcttcttatccctaaacctccatttcgttttggttgacagagttcagaccaacattttagagccaaataccgtctgttgagattatcatcattttgtcccttccaccaaaactgcaccaggatgctatcaatctctgtacatatagacttgggaatcatacaaatggccattgtatagcaagggatgctacttaaaaccgattttataagagttagccttccagcttgagacaattgcttagccctccatccctcaagcctattgagaattttattcttgagaaaggagaagtcatgtcgctttcttgccgatacaaagaaggggttaccaaagtacttttcctgcttacccaaaaggggcattcctaagatgttcatgaccctctccttctcctcagtcttggtctttggagaaaagactacaccactttttttcctactaatgcattggccagaccggctttcatacttttcaaagcaagcaagcaaatttacagtttctcgattgtttgctttgcagtagaaaattgcatcgtcagcataaaataagtgagtgatgggcatcgcattccttcccacttttatccctgtcaattctccttttgcctccgcattgcaaaccaactttgataacacctcactacacattataaaaaggtatggtgatagagggtccccctgcctcaacccccgttccggatagaaagcttttcaaggagctccatttagtaaaattgagaatctgaccgacgtaacacactgcataataaggctacaagcctgttcgttgaatccgttcgcttccagaaccttcttgaggaacccctactcaattcggtcataagctttgtgcatatccgtcttcacagccacaaaccccgcttttccttaaccttcttcaaagcatgttgagcttcagaggccaacactcagcattcagctatccatcttcctttaagaaagcagattgaaaaggagatatgagtttatccagaattggttttagcctatccgttagaatgcgagcaataatcttgtatccaaaattgcatagacttatgggcctaaatgttcaaaatttgaaggactctcacactttgggatcaagcaaataaaggtgtgatttagattctttgccaaaagacccgagctgaagaaatcctgcaccatgtttaccacatcctcttctacagtgcctcaatattttcgaaagaaaattcccggataaccatcaggtccaggagcctttaaaggatgaagcttccaaacagcctccttcatttcttgagaagttgggattctgcacagctcctggttttctcgatccagaaatctttcctcaaagagcatatcaaactcaacatcaatactcggtgtggaacttttatacaggttcttgaaattatctatgaagtagcagccaatttcgttccttgtccttttccagtcgccattctccttatgtatcgcctagatgtgattccttcttcttcgaataatagtagacgcattaaagaattttgagttgcagtctccttgggaaatccacagctcccgggatttctgtttccaaattcactccattttcaattccaaatcagtgatttgaatctgtaccagttgctcttcttcagcaaaagctcccagggaagcttgaataaccgccagtctgtcatacaaggcctttagttttttgtcacagaatccgaaactgttccagttccactccttctgcgcctttgttgttttgctcatctttcgaatcaccttgaacctgtgatgagtgtcgcacggctcctgctagactttgtcaatgagatcaccacatgattgctctgatgtccaaacttccagaaatctgaacaggtacttgagtttctattgtgtcatacatgtatcaaaaagcaaaggcgagtgatccgaacccaagatagaagagtgtctaactcctgccattggatactgcagacaccattctgaacttccaatagctcgagcgagtcgcttccacactctatcatgactatctcgtgcatttgtccaagtgaacactgacccaatgtaacccaagtcgatacttcccatttcaaataaaaaattctgcaagtaagcttcttcattcttcctcaccttcctaccaccatgtttttccttctcatgaagaatagcattcaaatcttcaatcatggtccataactt

SEQ ID NO: 236450 - DNA, 5884 bp, Cannabis indica
gtttattcggtttagtttgggcgatttattcgagttgggtggtttgtaaattttattgaacacccctaacagcagtagagaactcacaactaaaaataagtgttcatgactctccaattcagcgcaacaaactgggcaatttatgttctctaaagcaatgtgaaacttgtaaaacatgtctcttgtgagcaaattactatgcacaacctgccacattataaacctatgctttgtaagcaacattttgctccaaatagcttgcttgtaagggaacaccacctgctgaagttgatcattatagagtatagaagtagagaatttacctttcctcgcagcagccaacaatttatccttgctaaacttcatcctcaaatggcaaagctttctccaataccaactagtatccatcttgagctcatagtcccaaaaatcttctcccttaaggtaaattgtattcacccatttcgctcaaagaatatcatgcttttccataagagcccaaatgaattttcctagaatggctttattccaattagacccattcttaaagccgagcccaccataagccttagcaagacaaacggtgtcccaagaggcaagatgaatcttacttctatctcctttaaatccccacaagaaacccctacacaacttctcaacctccttaataatactttgaggaatgatgaaaatgctcatccaataattccttagccccaagagaacagattgaatcagttgagtccgcctcgcaaaagaaaggttttgagctgtccaagttagcaaacgagctttaatatttttaaggatgacatcacaatcctctcttttccatttggttggcctcaaaggaaccccaaggcatcttagaggaaatgagccttcagagaattgaagaatgtccaacattttggctttctctgttgtttgacacccccaaaaaacacctgagacttggcttcattagaggttagccttgtaacctccgcaaatttagtgagagcctctttaagatgtgtaaccgcagctggagtatacttgcaaaaaaggatacgatcgtccgaaaaacaaaggctaatcaagtttagagttttacacattggatgatacctgaaagtcttcttggaagcctctaaataaagccttcgggtaagataatccatgattagcacaaacagtaaaggtgacatcgaatccccctttctgagccccttccttcctttaaaatgtccttgcactcttccattcatcatcaatgaatacgatgtaccctttaagcaagtcattatccatagaacgaatctagaaggaaaatttaaagctacaagcaactcctcaatgaagccccaatcaatagtatcataagctttactcaaatctatcttgattgcacatctaagagacacccccttcttgccatagctcttgattaaatcctggaagatcaaaatattgtgagctatcgatctattcttgatgaaagccccttgattttgcgggaccgaatcaggaagcacctcagctaatcttttacatattaacttggttatgcatttatagatcgttgagcagcaggcaataggtctatagtcaatttctttttgaggaatttccaccttaggcaccaaggaaatcatagtctcattaaattgaactggtatagctctcgtactaaagaaactcttgactgctaggcaaacttcagtacctatttcagaccaaagaactttaaaaatttctgaattaaatccatctgggccaggactcttattgctcgggatactgaataaagcagccttgatttctttgttgctgaacggtttaatcaacattagttgttgttcattgttcagcctattccccattcttacacaatcaagatcaagcctcttagtgacactgctatcactccccatataacctttaaaatgattaataaaatgatcaaccaccaaaggatagctttcaaccaaattaccttggttatccacaaagctggctattcaattctcctccctccttttcttgaggcacacatagaaataagagttattatcatctccctttttaatccaagtgaccttgctcctttgaaccaaaaaacttcacagcagtttctcttgggcatgaaatctagttgatgccatttttttcgcctctaaaaactcagcagaaccagaatgttcttgagttttatgcttagccttttgaagctcatctttagcaacttgatactccacctccatgctgcccatctggtgtttattaaatactttcaaaacatgtttaactcggcaaagcttcaaataaagccccaataaaccaaaataaattcactggttttttccaactctccataaccagatttttaaaatctttgtgttcagcctagtaattgtagaacttgaaagttttaattcctatgtccaccatgatagccaaagaaactaaaatcagacaatggtctgaaatcgtctcccattgaaaattagcttgagaagttgggaacaagtcaagccaatcctcattcttgaacacatgatctattttagaatagattctatctcctccgtcttgattgttagtccatgtgtacactgaccccactcttttcaacatgtctgcttttcctgtcatcaaccaagcattagagtcttcaagctctatactagcaaccggcttccccccaaccctatcttcaaaatgaaaaagaacattgaagtcccctaggataatctaaggtttaactgggaactttaaattacctaggtctcttcaaagctcctttcgatcttcaagcttattcattctataaacaaaggtagcacaaaaagcttccgtttggtttgctagtttaatatagcaatgaactagttgagaagtttcagctataacaacgaccctagcaaacactttcttccaaataactaataatctccctcctattgtagggctggtataggcatcccaacccctaaagctatctccaccatctcttgaactttattccctttcatttttgtttccaaaagagcaccaattcccacttccttaattcgacaaacctccatcaccgcctcttgtttatgacttttattgaggcccctcacattccaacacaatatgttattgcaactcatgcaagcaatcgggttgattaccatcatttgggaccccctccttaccttgcaacacttcaaacaagttatgttcttgaactactaccttttccccctatcctgctgagtagcttttaaggatttcttcggagtatgccaatcaccaatgtcttttcttccagctgcactatttactccatgcccccttgtttttcctttaaaacactctttttagatccatctgaccctttccttccattatcctcctcaactacaacccatgtagctgtagttttagattcagctactatatccctttcaatatctcctttcttcttaacatacttcttccccatgtccttattgtctttccctacttctcctttgtctttttcaacccactgccctttttcattcttcctacactcactcatattatgcccaaatcccccacaatttttacacttcactgggagccattcatagtccactccttgtaccacaagtctcccatgttcattgaaataatggataatgttagggggtgagtctgtaatttccatttcaactagaacccttgcaaatttcaccatagacctctcttttgtcaccttatcaaccatgaagggcttccctatagtgctaactaaagcacttaggctcttgttcccccaataatgaaggcctaaatcatgtaatctaatccataatgggatagatttgaaaagtttaataacatctaaatctgtagtccaaggtcgagtaattactggttttcgatcaaattgaatgactccatgctcaagaacatgatcccgcattgcctcattattgaatttgaaaatagtgaagcctccattcatacgaacaatctatgctattcccaaattcctccaaactcttcttatgaacccctcaaaaacagcaaaagggggattttccctaagcaccaaacaaatcactgtcgtgctctaattagcagcctgaagttgaacttcttcaatatccacctgagcaatcttcaatccttccttaatcataggctcttcataggttaattttgaatcattatcaaaggacttaccacttgtgaagcttttccattgcccctgcgattgagcttgataatcctcaatctcaaccttatcagcccaagacaaattggcttctaactgttcgggttcctcctccaatctctcgctgatgttcgacataggctccaaatcagccggctcttccccaatatgcgcctcattttctcctggttccttcacctcttcaagccttacatccttctcattaatcacatctgaaatcagtttctgtactatcacgcttccttcatcattgccggcaactgactcaacactccccgatctgatagttggcttttggttcaccttcctcttctttgctatggaagagagagactgagaactcgcacgcatctgatagctggttttcttcaataattgttaaaatatttttttaaatgatttataaatagttagatattctaatcaattataagaatattatggaacgagtaaatattaaaaaattaaagaccaatctatgaatttatatagagcaaaaacttatattagaaattaaaaataaaaaagtaaactttaagcgatagtctataggattgagtatgagtatgatgaatgatttttgaatttttttggtattaatggttactagtggtttagcgagagaattcgtagacattgtatcaatgacacgtaaacttggtgtagtgttggaggaggaatgggaggataatgatgaagctgtatcgtcatttaaggagaagtctctagtagggatactaatttcgtgtaaagagaccaatgagaagttttttatgacaatttttggaaagatctagaaaagtattaccaattggaatgttagtatttttaaggtacatggggacaactcttatgtttgtatcaccttcaagtctcgtcaagatgcaagaatagtgcttgggaaacaactgagttattcaaggaaagaattttgatgttggagaggatgctaaattagataaaatgtattgttgggtcaaacttaaaggacttcctctaaaggcttttacactcaataatatcaaatgattgggtgaaatagatggcaatatactgaggttcgatggggacagaagcaacgaatgtttttgaatagatatgtacatttgagaattggattttcatgcataatagtatattcatagggaggcatattccaagtggtggtaaaaagcactagatcaaatgaaattacatatatgttacctcataaagtaaccatctttattacatcacgttgcctaatcatgcaagtcgatactttaatctgataatccagtattacatggcctaatcaggcaagctcgtgccatagcctagcacccatatattgcataattacatcccctaatcaggtgacctcgtgcctaaaacctgcacccatataccacaacttggcaccaatatatcgcatcacctaattagaaaagccagtacttacgcccggtacataattgcaacctaaccaggtgagcccgtgccacaacctggcaccaatatatcacatcgtctaatcagacgagctcgtacatatgcccggtacataattgcatcacctaatcaagtgagcctgcaccacaacctagcaccaatatattgcttcgtctaattagacgagcccgtacctacgttcggtacataattgcatcacctaatgaggtgagccca

SEQ ID NO: 236451 - DNA, 1470 bp, Cannabis indica
caaaataattattttagtataaattaattgtgggtctaaattttttgatatgagatatttttttaagcatacaaattaaatttccctattatatattaatattaggggaggagagattcgaactcgggactttctctttgtgagaagaagtgtgaaactattaggctatgtctatgaccactaataaaaaacattaacacagtgtaatacatttaattttcatgacgctataaaaattaaagagcgtaattagagccccacaattaccttcatttacataattaccatacaactacaaaaacgaacacaattataaatccaattatataatatagtagctttcttctaagcacaagcttaatttgtaaagcaagatgtatttttttaacatagcaatttttgttttactatttagattttttgacccataaattatgatctatgcattattatatcacacatgacaaataaaatgataattgtttagactattgtcacattagactattataattttttaaagatatatttttattttaaattaatgtcacaacagtctaaacaaccacattatttaaagaactaatttacaacactgtaaaaaaaatagttcaaaaaggccaattttaataggttgaaaaattgggaggaccacaataatacatagatcttgggtgacaaaatcctaaatagtgttttttttttctttacattttagtactaagcccacaaccagctaccaattttcctcgtttgtcattgtatttcttcaagattttgatgtatactggttcatcatagctccatttacaaaggtatcgaaaagagtggcaactcttgcaactcttgcaacattctcaaatgaatatggagacttcaccaagctcattgttgatttatttattcaaatgctcacaaccaattttttttttgaatgaaaataaattttattagataaaaatatccgctaaaacaatggattaaagagcaaggggaacatcgctctcagtaaaacgacgacctgaccaataacaagtaccacgtgtcatacaatgcgcggcttgttagcagaccgtttaacatgaccaatagaaacactacttaaagtagataaaatagacttgacaatcttgaacaaatagaccaaaaatagaaggcatagatacctaactaagaatagcttgaacaactaaatagagttacactaaaaaaataataaaatatcaaaaaatataaagtagcaataataacactaaaccatcatcaatataatatcataatagaataattttagagtaaatatattttttatacatctattataatttaaaataaaattattagttttacgtaaataaatttacaaaatatgtgcatatattttattatgatgtaattattcttatataaaagtatactttgttaatacagaatttacaaaatgtataactaattacaatttaaaagtta

SEQ ID NO: 236452 - DNA, 1388 bp, Cannabis indica
aggaatttctattttttccaatgtgttttttttcttatcagcagaagaaccccaccaaaattgtgccatcatcctgtcaagttgattacagaaactctttgaaagcttaaagcaactcatagcatatgtgggaatggatttcccaccaattgaaaataacttgtcattccaagcatgcaataaattccagattttatccttaatatccgcaaacaaatgttttttatcttgctcggagtaggttgggaggcctaaatatttttcatgacattcactaattggcataccaagaatgttactcaaagagtgttgaacatgctcaagagtattatgagagaaggacataaccgatttgtcttcgttaagcaactgtcctgaggcacgatgatagatgtctaatgctcttttaattgcaacacaagacctgtcattggcttgacaaaaaagcaagctatcatctggaaataaaaggtgtgaaactgatggtgcacttcgggcaacaactaagcctttgaggcgtccaatggattcctcatattgtaagagacgtgagagaccttcagagcatattaagaataagtacggagataatggatcaccttgacggagcctcctctagggaataaccgagccagttacttctccatttatgagaaatgaaaaagaagtagagtgtaaacacgtcatgataatagaaatccatctaatattgaagcccattttccccataaccgcagcaatgtatgaccattcaacacgatcgaaggctttactcatgtccaattttaaagctgcatatcccttagagcctctccttctgtgctttaagctatgaatcatttcaaaagctactaagacattatctgtaatcagtctatgtggaaggaaagcactttgagtctctgagatgacatggtgaagcacattcttaagcagaacaacaatgcacttggaaaccaacttgtaaacaacattgcacaaactaataggcctaaaatccttcatagtctttggctttttgatctttggaattaaggtaattagggtcttattaaaggcagcagggttagcaccattatttaagacttccaaaacaacttctataaccaaagagccaacaatatcccagttatgttggtagaacatggcaaacataccatctaatcccagaattttatcccctcccattgatttcaaagccataagaacatcatccttagaaaaatcttggagcaagtaggcattatggtcatctgttattgtagtaggaattgttgacaaaatatgtgatagtgcccaatggtcatccgcagcaacagtgaaaagttgtgtgaaatactaagtaacaacaccagcaatttcttcacgagaatgaacatatactccac

SEQ ID NO: 236453 - DNA, 1256 bp, Cannabis indica
tgattttgtgcatatattaaacaaattaaaccataagcatgaaaaattcatgcaaacagaaatcacttcaaatttcttagattgacatgggttttatttaggacacaaaacccaacacatgatagacccctctgtgatgacccatgccctcaacaatgattcaaacttctgacctgtacaatagagaaggtggttgttggaaaaatagcatgcccaagtgctcaaagatgaggtcgaaaggctacgagcccatgacttcatcaccgaggcattctatccactttggttatcctaccctgtactggtgcccaaaccaaacaaaaagttgagagtgtgcataaatttcaccaatctgaacaaagcatgtcccaatgactgcttttcgctccaaggatcaactagctgatggatgccacaacttgccatgaaatcctaagtttcatggatacgtactcgggctacaactagatcaagatgcatttgccaaattaagagcacacaagcttaatgatagacttaggcttatactgctacaaagtcatgccctttgggctgaaaaatgcaggggctacgtaccaaaggaatgtaaaaaaatgctcaaagatctcattggctgcaacatggtggtatatgtggatgacatgttggtcaagtccaaaaaagctgggggaatgttaaagatctagacgaatgctttaagatcttctgtaagtacaacatgaatctcaaccccctcaactttcagagtaggcttaggaaaattccttggcttcatagtcaacgctagaggaatagaagcaaacccagacaagattcaagcccttttggacatgaagttgcccacaatcattaaggaagtataaagcttgatgggacgtattgctacactaagtagatttatgtccaaatctacgaaaaaatgtgtacccttcttcatcattctcagagggaacaaaaaatttgagtgaaaaaaggagtctgaaaaagtattccaaaagccgaaaaataaatggatcagccacctgtcttgtcaaagcatctggataatgaagagctaggcgtgtatttagctatcacaagacatgttatgagtgcaaacttaacaagagaagaagatggtatacaacaccaagtatactacatcaccatgagactgatcgatgccaaaagtcgatacccactcatggagaagctggcctatagcttactcctagcatccagaaagctgaggccatacttccaagcacaccccataa

SEQ ID NO: 236454 - DNA, 1611 bp, Cannabis indica
ctgcaaatttttgaaaaattctgaatagtttactgtaccgaaaataaagttcctagtaatccagtttactatgcgcgttcaagaaacttcaaacgtattttcgtcactgtaaactattcgaaattttttaaaaatttacaggataatgttgtaagcataacgaacacccccgtgaaaaaaaaaaaattgaaaaaaaatatactggcatgtgtttttagacatagaggttgactaaaaggttgtaacaagaggttgacggtagaactcctctataaggtatagtatttctagggttgttttggtaaattatttatctattttgatatggaagaactttttagtttattttttattataattattgtgtatgttatatagttatttaataatatttataaatttttaaaaaattttgaatagtttataacgctaattttttttttacaatattttattgatacacaccactgtttttcatatatgcatatatatagtaataaataactgcataagtctttttcagcattataaactattcaataataattaaaacgtatgagattatgaaaaaaataaactaaaaataattttttagatgctgaaacatataaaaaaatctaactaaaacaatacctttaaaaaatctactattataattattttaaactttgttttcgtaaattatatatatataaaaaaaataaaatatctattataattataatataaattatcatattataaataaaaattaggttataatctctcaaaaaatatcgaaaaaaaacataattctctaataataaagataaagttatattgttggtctctataatatataaatcatatatatacacataaatatttatatatagagttagagagagtttggtttggtttggagctactagtgtaagtaaaaaccaaagttttggtctcctcaagggttaaaaacatcaagtggttcatgcatatatacaacaaaattttgtagcaattaattggtcagctatcacctagctcaacttatataaaagaaattaaagtgaatctagacaaaggaatattatgtgggacattatagaaaacaaatacatatatatttatatgatagtgacattgatttattatttgtaaaaaaaaaacaaaatatataaaaaaaaatgaagaaaaaaaaaaccattagtacattatggcatgtgtattaaacaaatttggtcactttcatgttccctgtagttttaccttatttcccatctcatctatataatgagcattaattttgattgaattttttagaaaaaatttattataaaatgatgaaattattaaataattttttaattttaatattaatttttagaatattctaattaaaatttgcttttaaggcaaaaaaagttatttgaggtactctatataaaaaggtagagttttacaattgagatgcttagtatcaaaatgaataaaaattttgtaaatctaccattacaatgctttggcgggcctattcaacatagtcacgggcatagaacaatcttgtagagctttgaaatggcagcaagaactggtacataccagatggtacaaaccagtagaaaaacagagaaa

SEQ ID NO: 236455 - DNA, 756 bp, Cannabis indica
aaatatattaattattataaatatatgtttcttaagaaactcttacttaattaattaccattaccaaaaataaaagggaaagaactatacattaatcttttgtcatttgtaagaaaatcgatgaaaaaattcgattttcttacctaatttttcttacaaaaataacgagaaagatcttattttattttgttgagataaaaaagataagaaaggtatcaaattctcttgttgcttttttaataaattattttaggtcatttgttttgttatttaattataaaataatatttatataataattattttaaaaaaattattttatatattattttctaatttttttttaaatttacagtttagattgttcttgtagttttaatatgagttgctatacagattttagttgcgatttaaattgttccgttagttgttatatgaatttctatgtgaaattccataaaaaatattaaaaaaaaaactcttttaacatgtaaaaaaaaaaattgttttaattaagttttagtttgacaaaaatataattattggattaaattacattacattttgttatggacaacaaaaatatgatcactataggataattaggcatgaggaacacgtgcatattaatatgtagtagtaattaattaattaaacaattaaacatacacaagattaattaacccaattagatataattaatggattaaaaggtaaataattaaccactttttacttttactaaagaggctatat

SEQ ID NO: 236456 - DNA, 2867 bp, Cannabis indica
cataccatgaaatgaacccgaatctggattcgggtatggttccgggtctaggatccgagtatgtgagaaaaaatataaaatataatatgttagacaaaaaaataatttttgaaaattgaaaacaacattgtgatgtaatctgttttttaattttttaaatttttgttaaacaacctcaattagtttttaaaaaactagttttcaattttaaaaaacagaaaataatttttaaattatgaagccaaacaccatttaaatatgagagtttttttttttttttgggtatcttacactatgttcggtagagaggagagatggatggattaagaggggtggaggtatagaataaaagggggaggtggaatcaattgttaggtagaagaaaaaaaaaaaaagaaagacttctccctttaaatcctaaaaaagatccacctttgaaatgatttaagagaaagaaaataaatatatcacatactacaattttattaattaacttcctcttcctctttctaattttattttaataaaacaaaacacaaaatgaaagttattatcctctttacttgttgacgctaaaaagtgatcaacactcgcacactagattgacgagatgaaataaaagatgagtagagtatacaaaattagttcacttcccatatcgcgatagtaatagaacaacgtctacttcgagaatttatttctcacaaaaattacaagagaattgactaagtgagaaagctctaatttctagagagagatattctaaaatctgaatgtgaaaaatgagctaggtgagctctcattttataggcaaggaagtttcattaaaataataaaaaaaatattgaagaaaatgtgaatacattcaacagtttttgaccgttgatgatgatttaatggtgaaattgacttcgaggttggttgtcaattatcgaagcttgaatcgcgcccgtgagacctttttcgagtaaattgtagttgaaattcgtaacttttttaggataaaatttgaactagatatcttcaaaattacgattgagatgtaagacatgacttgatagagcattaaaatagtttcaaaacacaagttgaatcgcgtcaattagatcattattaactgagttatggtcattttactgaaggctactcttataccagcccctggttgacatccagcgcccatgttgacatttgatgccaacctgaacaatgagtgaatgggaaaacgtgctggagatgtattttttgatgcctaagtgatattttgatatcgtttagtcaatttttttattttggtgaagtcgtcactaattctcagagatgttgttatttcacggaattaggagactcaaaactgctcagtttgcgactaagtcactttgtcaaaaaaagtgaaattatgaaattttgaatttgacttgtctgagttcatatctctcgttttctgtaaaaaactagacaaacgctcgagagggaatcagaatcaaataagcagaatccagcggcaccaggtcatacgttaatctgggcgttgggtgctcttttaagagctttcaggatgtcattttaatgcttccaaggtctttaaaatcaaggacaaagtctcctaccctattttagaccatgtcggagagaatttttggagcgaaatttgtatctgagtgacagaaaccaatgcactaggttgattttcaacttgggcgttgggcccaacaccatgtcaaccttggcgatgggctcaatttttggcccctcgggattcttgttttctccttgagtttacttgtgtattcgttattcctaatgacggaaaaaatgcttggaacactttttcgaaaaaatatctgaaaatagcccaggttaataaaatgtcaacttgggtgctgactcgagtgccaggtgtcaacttgggcgctagttccaatttttggccaccagatgactccatttgattccctaatatcttaatccttgacgaaaacggagaatatggctggaagtcttctaaaaaaactcattggaaatggcccaggttgacaaaatgttaacctgggcgctgggtcgagcaccaggtgtaaacctgggcattgggtccccattttggcctctatgtgactatgtttctccatcaaaagcacttatttcctcattttggttgaggacgaagaaaatgctcaggatagctcttcaagtatggtggttggaaaggcctcaggttgatagtatgtcaacctgggcgctaggtgcctagaacacctagtgctacgagtgctcaaaactaaaagtgctacgaatctgattctgatgcatcaaatatgttcgtgacatgtctaattcatgcttaagcacaaactttgatccatttgcaataagacggacccgaaaactaaaaccctaggtcaggatgcatatattttataatgtttatttgtattcaatatgagctaatacatcatgtttatcatggctgaactagttttttaggcaatggcatctctttcaatttcaaagtggtgaatccgtcagcttaaagccacaatttcatgttttgttttctactttaattcacttaattttctgtaaaggtttaagcttctccatatctaaatcatttgcatggcctctaaactacttgacgtattttcgttaattagtaattttagtctttttgttaaatgcaaaaatttaggtgtcgtttggtaacacttttgttttctaatttttaatcacaaaatgaaagtaaaatttttgtttttaaaaattttgcttttgaaaaacaaaaatgcgttctgtaaccacttttgtttttcaattttaaaaacagaaaacaaaagtgtgttctgtaaagttcatattcattttcattt

SEQ ID NO: 236457 - DNA, 1253 bp, Cannabis indica
cttgactaaattaactggcaagattagtggcgtgatgaagtagagggaagaactgagggagtattagattatgggaatggaagagaataattcaatgttggtagtgggtcctcaacgcaatttttttaagtaaccattataaggagaaagaagtagtgtcgatagaaagagcaagggaggtgataagtggtgcaggttcaatccaagttggggagtttgatgatcggcatggggttgaggaaggcagagaccaatcaaaccaatgtaagaaaaagtgaggtggttttcagggtaagggccagacgatggggaagattttgatttaggattctgcaagattctaaaggaatgtgataccaaaggggtcaaaaagaattaccgctagctcaagcaccaattttggttgaagttccaatggcaatcagttgtgatccaagtcggggagaaagaatgaaacaacaaaagtgtgtggttccataacgacacaagcgtaaggggattccttcacatgtagctatgggggaaagtgggaagagatagtttaacctgagatgtggtgtgaggaaggtccaaggagcatttctgtaatgatgaatttgaaccatggtgagaatgaggaagcgacgaacccatagaagttgggtcgcaaagcgcaatgaatgccatgttttggaattttaaagggcttgggaacccgtggacattaactatgtttaggtcccatgtcaaagataatcatcccaagatgattttttgtcagaaatgtatttaactagtgttgcagtggagttagttcaagttcaactaggttatgctggctgttttacagtggatgccaagggtaaaaatagtggtttagctatgctttggagatattctttcgatgtccagattaaatcattcacgacctcacatatagatgctattgtggaaaattatttagggttcacatggcgctttactatggtagtccgaatctgggaggtcgaaaggaatattagaagttgctgaaatagttgaaaccaatgatagatggagcttgggtgtgtggaggggatttacaaaaaatcattaatagaaactgcccaaatgcaaaatatggaatatactgaggattaaggcaaagggaatattcttaccgttgcaaatgattgcaacaatgatttgattctgacagtggtcccatatagatatttttctgttatcctttggccaatgcattaggcctcatgatttaattccttgtgtatata

SEQ ID NO: 236458 - DNA, 966 bp, Cannabis indica
ggagggtcccacgcgtgctgctgggactggcaggcggtagaggaagaaggtcctcacacgcctctgtctggtggtgacagaaacacgcccttctgggccctttgatcaaggaacggacgactcggatggggaatgtggggcttgcgcgattgggcttcttcaaggcctaaaatctgattccttttttttttttttttgtaaaaaatattcttttttcttcaattcttcctttcttttcaaaactcccaataattttaattcttacaatcaaaaagaagattaattaaatctaaattaaatatttttaacataaaaatatatcttattattttcaagaaaatattaatttatctttaatttatcttatactttgagcttactaaacgtatatttttcaccattaatcacaatcccaactagcttactgctagttcctagcaatttaagcggagagaataataatcgagttgattaaacaagtcaaaccaagcaaaaccatccaagcattttcaaaatgttggtagagagtcaaaaatttctatcaatgttatttcagttgtaatttttagagttgtgtgtgtgcaccaaacttttattcattttttttaagcattaacacaaatagtatcgaaaaatctgaaaagtgtaaaagtctcaactctaatttcctcacgggtattgaaagtatttgtattgggagggtgacactcttttggagttggaaatatagcaataaacgcacaaatgagagaggataattattttttaggacgaataatttgaacaagaattaatcacaagatagacacatcaaactaatagaattcaaatgacaaataacctttgggatttatgtgaaacacttacacaataagagccaaagaactaactactaaaataaaaaaatacaacgataaacatatgtatatatattacttttttttttatatatatatatatagagag

SEQ ID NO: 236459 - DNA, 971 bp, Cannabis indica
ctaaaccaactgccttatcctcagacaacaaaaaaatagcctgcctaacctcattagcagtaaaagcctgggcaaggaggttgatatacaggttctcaagaccaggacccaaagaagaaaaaatcgaagcaaaagcatcaacatcacaatcctaagaggaaaaaaaattagagaaataagtagtaataaaattaaaaataccatcatgatgatcaacaatattataatatctttgaaatacttaatagtattagttttattcctataagtaaaatacttatgaaaatatttagtatttttattctcaactttaagccattttattctaccatgctgcccccaatagacttcttctttatataagagagtatgtaacgtggacaggagcttagtaagtttattattatcttctttattaagaggcaccctaatctataaattaccaatttcctaagtgaggtaattaattcgagttttaaagaggtaatcattactagcattccaagttttaagggtaaaaatacaaaaccttggctaagaaatatactttagaaatttattattcacattatcacaatcaaaagtactagactaagcatccttaaatacattaaagaaattagaatcttcaagctaaatattcaaaccgaaatcttttatcaacaaaattggtaggattattgttattattattaaggaccagcttaataaccctataatctgagtcatagaactctaagtgatacaaagtattatttaggaaaagatcataccaagaatctgagaaaatagcccagtcaagcctctcacttatagatttattagtctaagtaaacttattaccaacataaagcaaaggaaacaactcaaatttattcgaaaaattagagaagaaagacatattagaagaattagaaacacaaccaccacttttatcactatttaacatgtaattattaaaatcttccata

SEQ ID NO: 236460 - DNA, 822 bp, Cannabis indica
atggtcggtcggttttaaattataaccatgaaaattaaattttggtatttttttgcgtaaaaagtcgaccaaaccgaccgttgctcacccctagtataaagaaggcaaggagctgaaggcagcattggatgactcctaacagtgttctatctcttcatctctatcatttatgtttttaattgaatttctattattttagaatgacttctagtagctaattttattaaggattgttatgtgaaccacttgaatttattttatggactaatgtagttatttaatttctacttcgtctttttaattcaattccatacaatctgttttaatttttgcaattatttactgaccatctataattgttatctatgaatttgaattaaaattctaaaaggtaaaatttgaatatgctctgattattatggatgcaaaataaaagatagttggagatcataagaatctatatctttattattgttatttctttaaatttaaatcattgtcttcattcatttactttttctccaacaatttttattaatcaaatggaactaaagaattaattgattggtaattgataatcaatcctcgtgggaacgatattctattttattattatattacttgattcgattgtgtatacttgcgtactgaatttatcgagcaatcagctccaactatatgtgttacccaactgttaaggaactccggaacaatgtaaatcagctgtattctcgcttagagaatcaatctcaaattttgagtttgttagaattttggctcttttgctctactttttggattttttggtgactcttttttttt

SEQ ID NO: 236461 - DNA, 3086 bp, Cannabis indica
tcaattccctttctttctctttccaatagcagaagccagtagttgtttggtcttttgatagcatttctacctccttctttagctcttttatctttgcttgattttcctttctctgatttttattccactgttccaaccgtttgccacacatcgaaattcttttctcaaattctgttgccgaacccatagcagtttcttgtttccaactgtcctgtataatttggtggcattcttctttatccgcccaagccttttcgtagtggaatctatagccccatctttggttagtttcagccttactcggaatagagttgaatgttattagaagaggacaatgatccgaacaccacctgctcaagtgtttcactttggcaactacataaatattccaccagctattatttgccattacccgatcgagcctttcgtataccatattttttgtccttccattacaccatgtgaatttgcttccttctatttccacttctctgagtccacacttgtcaatagctttattaaagttcttcattagataccccggtttccctcctccacctagtttctcatgaatgcctcggatttcattgaaatcgcccccacaaagccacggcccattgttgttttcagcaattctttttaatagtgtccaagagttatgtctttgagaaggatccggatccccatagaagcccgtaaagcgccaattaagatcatcctccgtattgatccaagcatcaatatggtgatcgttaaaagacgttagattaaccgaaaaaggagccttccaaaggagcgccagccctccgcttttccctttagcctccacacaaaaacaaccttcgaaacccaaacgaatacggatcgactccatgtactgacttttcgaacgagtttcagacaggaacacaataccaggattgaaatctttcacatgattggcaagagcagtcacagtccacgggttgccaagcccttggacgttccagaatagggaattcattgcgctcggcgaccctgctgtgcagagttcgccgcttcatcattctgagcagaagttgaatcctttgacattgaaacttcctctgctataacatcaaatctgttacccacactttggttctcactagcatgattctttggtttgttcccagcttttgatacaaatttccttctcttgtccctctgccttttctgttgcacattagttccagcttcaaaagttattggtacatcgaaaagaattccattcgatcccgtatcctccatttccatctcacataatcgagctttgcagtctctttctccgtttggattctgttgtgactcttttatcatttcatctcccattctttttcggatactcaatctgttctgctctttcttgttgggccaagcctcttgtataagttcctcagttcgatgcacacaagatggaagaaaattattgtttagtatggtttctggtgtatttttcatagtctgcggataatttataatagtaggtgtttgaatggtgttacctgatattgttttgatgttctggtttgtttcctctcctcctttgaatgtgtgtgtatttaattgagatggactgatgtttagagtgccctggctgtcttgttgattggggatatgtgtctctcgattgttaggagtctccgtctttcccgtcatatccaccttcagccatgtaccataagcctgggccacttccccattttctttcattacatttgcccgatcttcagaacattggcgtgtttcatgcccaatttttccacaattgaaacacatatatggtaatctgtcatattggaattgaagccatctacgtcttccttcatgaggaaacaaatatcctagaaaatttttggattgaatggagttcttgactttgaatttaaagaatccatttattgttattcgatttgtatctggttcttggatttctatcacctcccctgccatgcttgctaatcgtagcatatttgtctttgtgattgctttgattggtaaattcaacactcgcccggagattatgaatgttgtcaatgtcgtttcccaatccgttggaattcccttcattctttcaagaataaggaacccagtattcaacacccatggtgttcttcccaagattctttcaagatgattgttctgtttgaatgaaagggttaggaataaagctttatcagttaccttcttaattttcaagtcccagtcgaattcccccaagttccataatctgcaaagtatgttcttcagtaaagaacgactaaatggtttcatagtgcagagtcttccaataagacatgatttgccaatgtcttcagccccttcttcattgatttcccatccctcatcatcggtgactttgagtttacttattcgggatagcagttcctccatttgatccatgcttcccgagcacatcttatgattaggctcttccgaagagagcatggttgaatcgttattcgccatcgccagagagagtaaggaaattatttttaaaaaacacaatacttctaaatattataatattttgcatatatatatatatataatattttataagcgaagatcaaatttaaaaatgtgcattgtatactgcactaaaatcaagcacaatttttaagatcattaaaacaatatggaaataaaagctcttgtaacatgcttcaaagctccttgaagtacaagtacttttaatgctaatatcataccaagttatcaaagcatgtcattttaatgaaaatattggttaagtttttctgcactatatatgtaacaacacatacaagatagtattttattattttacaaaaatataatagatgggtctgatattataatctattatatatatgggtgactattcaatggttacatttttattgtaaccatatggttacatttttttttaacctgtaatagcaggttaccaataggtaaactttcttttttagatttaattaattataattaactattttcttaaaataattaattaaatagacattccttttttagaattatttaattataattaactattttcttaaaataattaattaaatatt

SEQ ID NO: 236462 - DNA, 754 bp, Cannabis indica
tatttgacttgtttgttcttttttaggtcgtcgattcaatggagggtttgtcgcaactgatttttatgctattttattagcttattcaaatttttagttaataatacaatgaattttttgtgtaaaaaaatgaagtaaaaaattaaaagaaataaaaagttgatgaaaaattaaaaacatgaagaagaataaaataaaaatgaaaatgatgaagagtataagagtatacggtaatataaaaaaagaataagagtatatcgtaaattttccttaccaatccctccatccctctccctccctccttctctccactctaacaaacatagtgttaatctctctaaatttaggaggattgtagaaaaagacaaaatataatttgcaaaatacaataattactcttaaaaaaataataattttttatattcaaaaagacaattttataattttacattatcatttccaccttttacttaatactaaataacataaaggagattaacaatcctctccatctctcatattctttattctctctaacctctccattcatcatactcttcctcccttccgccaaacatagcctaatccttttgtttggcaagagggagagaagaagggagaggagagatggaagaagaatgtctccttccaaacacattatttttaaggaaaattttatttacaccccaaaaatttctaaagacaccccattttaataatttttatttatttaaaattaatatctttaattata

SEQ ID NO: 236463 - DNA, 1762 bp, Cannabis indica
gtctcagacgaccgaagctcctcctcctccactttgttatcctctgcggcaaccggaagctcctcattcagggtttcgggcggtataacaagaatgacggggttttcgggaggtttttgaggacgagaaggacggtgagtaggtggtgagtaaggttgagactgaggtgggattttgaggattttgggtcgtaatgagtttcttcgccttgtatactttacgtgttttgatggggtcgttgttgtataagctaagagcagcaatttgcgtggtctgatatttgaggtgatattaggagttacgaaggagaaggcagctgaataattggtgcccgccattggtaatcctggttcggaaaaggatcaagctttgaaatttatgcttaatatataagtggggtgacgaaagctatacaataatatatatattctgagcagttgaagttgtcaacaataatataattaacaaaaacgagtacgaattggtatatttgtataattaaaatttcgactatggtggaagcaatactacttgaaaagattgatgcgaatgatcgaaaaaatcaacggttgaagttagtgtttttaaccactgtgttattgttgcttttgtatagtaaaggtgtttgattaaatgtctttgagaaaaaatgatatttctctttaaaaaaaagcagcagtagttttagctttgttgttagtaataatgtataatagatctacaacctgaaacggatcaataacagctactgacttcttgcttacattttgtttgtttttctaatgtatgcactctttgttattggcccaattggaaggttcttaacatttatagcacctgaaaagctgaaatgttggcaaattttgtagtcatttttccccttaatttgttataaatcttaactataatttgcttgggtggctggtagggatatggattatggagggtagtattcaagttgagggctttgagatagattttgaggtgagaataaatttgagaaatagattaagtcggttgaatatatattcttctagttctaaaacaaaatgggttctgaatctgatgtgttaatccgaagctcagtggtctatatttctgcaatgtttcaaacatttgaacttgaaacttgttgactcaaccattgtcccatttgcataacatatatctccaattaggaagacaaaaatcgaagctctccataatccatatcttgaataagctgtttatgtagtgtttagaggaagaagaaatgtattggaaaatacttctgagaaaatgcatgtaattaattgggcagtataagtagaggatctgaaatggtattcatgactccatatataattaatagtttatgatggtacaaatgcccaacaaagaagagggaaaaacttaaaaacatattaacaaaagccaatcttctgtaaactagggactggtgcacttctgcacatacagtagagcagaagaaaatgttatcatagtaaagtagcatttggaaagcttttcaagttaactacattgagaacagtattcatagaaacttgtatttcaaattcttcttgcctatttggaaaaagaagaaaaaaaagactcaatgtgttcaatgtagtccattttaggatcagtgactttgttccatgcacattcagctctaactcacacatgtacatacgtatatatataggccaatatcccagcaaaagatctcacatggtctcctttttcacctagttcaatgaaataaagcatcccataacag

SEQ ID NO: 236464 - DNA, 1049 bp, Cannabis indica
gagtaggatttgattgatgatggatgaaatgatgactaagtggtatttgtgtaataaaactaactttgtaagtaaaaatgtagacataggcgtgtatgagtaattgtgtaataaattgtgtaaaatagatttttcatgtaaaaatttctttactttttgcccccctctcaccaaaaaaaaatatttatgctcctaaccaaaataataataataaaaaaaatcattctattaaaataatattgtaatattttaaaacataactaaataaaaataaaaaaaaaaaattatttcatttccattacttccaactaaacattgtgtgataattaatatgtgtaccttttcgaatcattgaatggtttatgcatttttttaagaaatgagaaatataaagcattttcccttttctcttattaatatataccaaattattcagtttgagacataataatgatattaataaataaataaaaatagggttactttcacatttggttttaataggatttgaaatgaacgaaaagatataaattaagtaggaaaaaaacaagataagaaatagaaaaataatgcctccccttaaagaaagcaaagcattattattattattatttttctttttgtcttggagagttgtacaaaaaaatatatagtagaaaaataatagatgtatatgttataatcataaaaataatgtaactaaatatttgtaattttcatttttcaatgaaattttttagacaaagagttgtgtctttgtccccactttatcaaagatagtgatattcttgtacccttgttttaattggttcgatcaccatatgcgcgtgttggggaaatacattaggggaacgtgcaggcgctataagagaagctaaccaaggttttttggccactgctagcatcccacgcacggatgcctgcagttggacaagaaatttcggctacaagtctctttgtggttatgggtatctaataaaggaatttcgcttataactaatttaatatttcaaagttaacaaagaataccatgcagccataaatcatta

SEQ ID NO: 236465 - DNA, 690 bp, Cannabis indica
tatatatattaattattaattatcaaaatatataatttataacaattataaactaacaatacattttaatatattgtatatacattataaggagagaaaataaccatacattataattatctaagtatatgactcataatttttcaaaaaatcatatatattcacctagtcaaaaaaaaatattttaattttcacacaatacatttttcttgtccttatctcatgtaatcataacatcaaaaaaaaaaaataaataataatatcaaatgtagaaaaaaactaaaaaactaagaagaaattgaaaaataccaataattaaaatagctagttttgagctaaacttatataaatatatatatatataatgtagggtttaaagtaattaattcttattttaaaggtatgtatatatagttaatgatattttatttttttatttgtgaaaaataattaaaaattaaaaaaatgactaaaatattataattctttttttaattaataaataggtttaatggggagaattaaagagagaaaaaaaatttaaattcattttagaacaccatatcaccgtttcatactttagctttataaatatatatagatatttaaataaattttaatgatattaatttttttttaataagattatttgaaaaatattattcaaactttatataaatataattaaaa

SEQ ID NO: 236466 - DNA, 862 bp, Cannabis indica
aataataattataaatagataattaacttaaaatatttacaataataaacgaattatattaaggtaaagttttattataatataaaatatatatatatatatagagagagagagagagagggacaatctgatgcaattgagagcctcacgaaattgtgcctttttttttaatgatcttagtaaacggttctgtatttttccttcctttaatgaataaaagcttttggtttgggtcaaataattacaaaatgggtagctacattataaacatatggtgagtaagctttcaattattcctatcccaaagtagtgtctttgattctaaattgggagtgtacgcgtctatgtgagtgagtatatgtatattaaatatccatgtgttgtgttgtgtgattctaattttatgggccattgtgatcgatccaagtcatgatcactattcactattaacactactaaccggccggcgccttttgcctaacgcgcctacctacctaggcctaggcataaaattccatttggagcatatgagtatccatttcatcacagttataatatattactcattactaaattaatgaaaatgataatgccaatttggtagataaatgaaaaggaaaaatacacctagttactactccattgcttcttattgaaaaatagctatagatgcataacaataaaagtaaaaaatcctaacacaacaaaaattatattttcttcttttttttttttgaatgaaaaatatcacactactagaaaaaacacaattaggaacactttttttaactaaaaatccaaaagcaataagacaacacttataaaagtactattgctacatgttgttaattaaaaaatacat

SEQ ID NO: 236467 - DNA, 671 bp, Cannabis indica
atctgccggtaataacctcattattaggggcggaccttccccaccggtaataggtccgcccctaacaagaacaattgttgtagtgtataatgacttcaagtgttattatgcataatatgataatagaagatgaacatgatctaaatacactacttgaagagctagtagaagtgtcaagtgtagaagttgagatggtagaatatgataatgctcagtttcaagaatatctagccagacataaaataattaaggataagaaatctcacattgagcttcgaaatacattaatcgaacacttgtggtgggacaaatatagtaactcacaaaattaatataatttaattactttcaagtatgtattttaggtttaatttaatgtaatttctttcgttatgaatgtaatgtttgctctttagtaatgtaatatttatgttattgcaatatgatattttaatttatcgagttttgctgattttatagtattattatttttaatttaattagtaagtttatttaaattattagttaaatataataattgtggtaatttttgttaattaatatgatagtttttttattttattaaaaaattaatataataataataaatattttttaatgtaatttttcgtgttgtaattacaataaaaatactttttgatgctaaattt

SEQ ID NO: 236468 - DNA, 634 bp, Cannabis indica
taaatagtattttaaaaaattatcaaatcacttttatttgccctagtccgtctatgcctagagccgacctggttgtgtcattagttttttctcctgtgttttaatgggaaaattagattctatgtgttgtgttaatgatgatatggtgttgcccccaagcaaaagttttcttcaagcgaaagtttaggccatttgaccaccattttaactacactaaataatgggggagtttatacgaataatatcatcacttggtaccaagtggtccccaaccagtatcattgagatctatctgtatatatttataaattttggatagtaatttaataacaaaattgcattaacgatactatatattattgtagtatgcactagaactagtttgagaacaaaactacctttgttcttgaagggatgaagctaaaaataaaatttaagcagacgattattactgttttcaccctttagtgctcgataaaaattttatcactacaccaaactactacattaattagtattaggggtgggcatccgatccaatccaatctttttttcctcatccgatccaatccaattagtaattggatttggaaaatcatcatccgatccaatccaattagacctcaaaatccaa

SEQ ID NO: 236469 - DNA, 843 bp, Cannabis indica
aattcattgcatatgcacttatgattgtagaggaggttgatagttcagaacgcattagctttcacatgagaagtaaagatgttgcagcatggctgcatgccattcaagaagagatgtggtctcttaggaagaatagaacctggattgttgtgaagaaacaagagttctacaagctggtaggatgtaaatggcttttcaagcatatagaaggttcagggaatgaacctaccaaattcaaagcaaggttagttgtcaagggttcactcaaaaagaaggcatcgattacaatgagattttcttttcagtggtcaagcaagcttcaatcagagccatgatggcaaaggcagcaagcacggacctaaaaattgaacaaatggatgtaagaacagctttcttacatggtgaattagaagaggaaatctatacgcaacagcctgagagctttgacaatgggaatcaaaatgaggtatgtctactcaagaagtctctttatggcatcaagtaggcacctaggaaatggaacttaaggtttaatacttatatgctgacactactacaaaagtcagaatctgcgacggtcctaaaaatgctatttttaggggaccagcactaaaaaaaattcagtaactgtttaaaaccgtcgggaaaaattcatattcttgacggtttataatagtaattacaggaatatgcaacgtttttaattggaatttgtgaatttattgggtccttatacccgacaattttgcccttataaaccgtcacctatactataggcgacagttttaaattgttgggtataagggcccaataaaaaatcgttacctacttctcaccacattt

SEQ ID NO: 236470 - DNA, 940 bp, Cannabis indica
ggagatgcatcggaagggaccgatttgaactttgacttagtgaacgaccagcttaatcaattcgaggtggaagacgaggaccctgcgctcctccagcaaggcatcgagtcttttcctcttctcccagaagcagacaaggacctcttcaggcttgggatagaggtcaagcttaagattctggtcgttggtctgccaagccatgaagacgccatcatcaaaatgcttattgcagtgctcgaaggtaactagggccagaagggcatctctttttgccttagccgcctccttttgagcctgctccctgaaatcacgaagttccttcacctcaacggttaggttggctgtcgttttcaaattagcttggtagtcaattcttcaactgcctccttggcctcccgaagctcacgccacgccttggtcacagcctcatccctggtcttcagagcatcgtcctttgctcttagctcctcggccttggcctttagtgcctcctgatgactccactccattcaagcctccctctactgggcctcctcccagataactttcctctgtgccgccaagtcccttagactctccatggcctcatccatgcccgcaaactcgaacataatgtacccatggtcaattagagtcttcgagaggcaaccagtctctgcagcaatctggcaaaacaagaaaaatgtgtaagtacgggaggtcaggcgtcaaaagacaaggtctgagaacactaacagatagacttacctcggtcatggccgcactaatgtcttggatctggtagactgagttcatggaggcagaggccgcatatctcttttccgggagttgggtcagattggagacgaagtggcttgtcaactcagatgcaaaaggagcaaggggtaggccgatgaagcaattgagccagtttgtcagggggtccatgtttaaatcccag

SEQ ID NO: 236471 - DNA, 1157 bp, Cannabis indica
taattttcaatcgcagttttctttttatttctcgtttttcagggttcaacggacgaaattactctcgcttgtacgggctctcgccacggccatggcttcctctgccgcgtcgactgatgacgtggccacggcggtgaaagctctcgccgcggcttctgaagcccccaaaaatgatctctctgttctcgagttatggccgcggccatggtcaggctcgtcgcggccaaaagtgtccgagcatcaaatttgcgtttttcttggctccacttgtcttttattgcacttttgtagcccggggcctccataatttcgagacacctgaaaacatagaaaacaaacgtaattctgtcctaaaatatcgaaaagcgaacataatagtaatccagaacataggctagagatagcctaacacaatgcgctcctgaagttttggctctaatactaattatttgggacttattcatccaacttgttgggttaataaactcacctaaactaccacatacatacattgtcagctggcccatttatttttgtaagcactattccaaaagacttcatatatactaatggaacaggtgaatacttatacttaaaacaattcttatatatataattttttaatgtgaaacttgagttaatacctcaacaactaatataataaaataagtaaatagtttacataattttctttcgtttcaattcttttttagccttaatattttttttaaaactactttgactaaaattatatgtaagattacatatgattaaaatatatgtaaggttatcaattttatctatattacactgttagaaatatttttatttattataattatttatttcttgtattttcttaggacttctaataatacgagtcacattttagttaaattagcattttctttgaatgattattatgtttggtgattcgattacgtactaagattgtattgctactgctttatagataaactcttatgattaatgttattgttcgatactctttttctttttatagtttattaagtttattactcttgaagttttaatgaggcttttttatttcttaaaaaaaaaatcatatgtacttaaaatgtatgttttactcaaacttaacctaaacaaattcgattttatccctttcaaaaaag

SEQ ID NO: 236472 - DNA, 705 bp, Cannabis indica
caaggtagcactattttaaggtgatttatgctgtctttgctacagtgcactgcatatatgcagtagcactgtagcaactgcatttttttattattattattaataatatttaatagctaatttttatttatatatattgtttaatattatcatatcttatattttattaatataataattaaatatacttttttggtgtaaattttagtgttgtggttggagtggaaatattttttgacaccaaatttagtgatagtgtaataccaaatttaatgtctccttggagatactctaacaaaatattgatacgattgtatgtgtctttattacattaacgctatatattcaaaatttcaaaattttgtttttagtttattattaattatatattgataatgagaaatatttcttaaaattcaaattaattttaatttaaattacaaaaattaacataagtactatatttcagaaggtaaaaaaattcataaggtgcagtttggccatttatctcaatttagacaataaatctttttaaattgcctaagaaatttgtgaatgatgttcatagaatgtcttagaattggtttagttagttaaggtagtttggtttgtttaacgttactgttgaccgaggttttcggcaaccaataaaataataatagtttagagagctataagaaactaagagagagatttttacgtggt

SEQ ID NO: 236473 - DNA, 1678 bp, Cannabis indica
tttttgacaccaaatttaatgatagtgtaataccaaatttaatgtttccttggagatgctctaacccatttgattttagtttaggtaactttagtagctagttaaactatattttattattattttaatcattaatcaaattatttaattaaataattgtatcttaactttgcaaatattatataataaataattgtatcttaactttgaaaatattatataataaataagtgtatcttaactttgaaaatattataataatcatattaattaaaataacaatttttttacaaagatgatacaaaaaatactagttatataacattttagttttcttggttacatttgatctaaaacatagaaaacacttttgaaaatactcaagttttgcccacaaaacataaacgggcaattattaaaaccattttttgttctcttatattttttccaaaaaaaaataaataaaaaaatcttttatatttaaaaatatatatattctgggaaagaaaaagagaaaaagaaaaaacaagtcatagctttagccttgttgcaataatttacctcaaaaattggccattcatgcactagtggccttctacatcatcacccacatgtctctattaatagagaaaacaataacaacttacataggatttttttcatctaaaacatgaaatatgtctctctctctttgtcagaatgcatcaataaatactgtaacagaatattataaatataataaattattatattaaccacaggtgtggctgagggcctgaggcatgaaaacaccatggatcatattaaaatatatttattttgttagtgggtggccattattatagtaatgaacaattaacaagtataattcggtcacaaaagtcttattaaaagagttaatccaaatatttattatatttgttacatagttccattcaaaattgaccaaaaaaataaaaataaaaagagttatctaaaagtgtgactgtgttagtttcaatagaaagttttattctttttcaaaaataaataaataaacaatagaaagttttattctttattataaaattctctattttgaacataatctaacagaaacttgggaatcataatcttgagaagcctcattaaaaattggatatttcgattatgagactggctgccctgatcgaaagtttccatagagttgggagtaaacagcctttgttctatgcacaagaatcatgcttaagacaaatccaagcacagagaagcaacacaatatgaccaaagtcaggaagaagcatatggagcctacacatgcttgtgcctcatccacaccaagaaagctcgagaggattgagcctgcaatgtgttgctgcaagtgttgtccacgagcttgcttctctgcctcgcgatcgtataaagggccagcaataaggccagagaagactaaacaaccagcagggtttgccattgtgagaaagttgtacaaagcaccaaagttcttcaggccaaacaattcagaggcagtagctggtacaattgcccagtgaaaaccataaccagtgccaatcaacactgttccaacatatagtgcaccaggtaatgcaaaagcaacataaagataaccaattgacatgcaagttgagctatagccattaccactggccttggataagcataatccctgagagat

SEQ ID NO: 236474 - DNA, 1741 bp, Cannabis indica
ttctttatcagtcagattgagatttaaagtttatacccaaatgctaagagtctgtaatgaacatgtgtaatagatttgagggttcctgaaatagcatctccctctgattgaattttcatacaataacagttatcagagtactgttgatgtggcactgtatattatgctttatggaaggaaatgtcgttaacccattcattggaatgaagtcaatgaacggaggaaccttgacctgatgcggtctaaggaacaagtgagaccatagaaaagattcgagttcatattttcactttataaagtggatgtaagagctatgttgattcaaagtgtagaaatgttaaattccaagttgggaattttatctttcttcaagtgcttccaatgaagggaatttagaaatttaggaaagaaaggaaagttaagtcccaagagtatcagtccgtttgagtttctaggaagagaagagaagattaagtagcttatgagctagccatactccctaccttacctagagttcatagcttgtaattgttctgaagtatgaggcaaatgcgattcatataccgagtaacaaaaatatggaactttgaataaacttgtcatatgaggaatagtcgattcaggtgtataagcaagcaaagaggaagtactggaaaacaaagactgtatcattagctaaagcgttgtagatgaacagtaagattaaagccgacttggaaattaaagtcacagttgtgggaacgatatcccgagttatttagataaattttgaggatgaaatttctataaggagggaatagttataatatctcagaaaattatcatgataattaattcggtatattttattaaacatgtgattaagtgggtatttgagtatgattataatcctacttaagctaattacgagttaattagtgaaatgtgattaaaggaacaaataaagcgtaatttattaattatggagattttgttagactacgggggtaacgtggatatcatttccaaataaagtattttgggttcggcagccgtggaaacttgacaaagtgatcaaagatttcacgacaatatgagacggattattttatattagaattataccagactagcttagaatttttaagttgtcagtttagtgggttagttagaaattaccaaagtacccctaggccttattttataagtgtttatttgaaagggcaatttagtcttttactaagttaaatattgacttttatggatttacattatggctgagtattatctaagataagttatatttgtttaaaaaaatatatttcttttatgttaggaaattaataagataaaaccaaaattaagaagtttatcaagctctttctctctcacctcttttcggcctagaaggaaaccatggaggacaagttgttcatctcaattcagatcagattttactggaattctactctagttgctgtccagattattgaggtaagttattgatactcttctccttgaatttcttgagttttaggttagtttaggttagcttttactaggaattttaggactatggtgttaaattgaacttagattatgtttataggatttaattagggaatccctgtgcataggttaagtgattgttgtggatgttagaattagagttgaaattttggtttaagaacttaattttttgttctaacatggtgttttgcataatttgatgaaaaatggtgaattgatgttttggatatgt

SEQ ID NO: 236475 - DNA, 2789 bp, Cannabis indica
ggaaacactcgtgttggtttgtacggtcagtcattaatcaaggaagcagccagggtggcgtactcgtgtgtaagacccatttattctgtgggtgtaagggcccaatggaggcttgaagcgggaacgttacaaagtagaaaatctaggtttaaaactttgtgattttctttgtaatgatttgtgaagcttcgtgattgatgacgttcaaccttttatcgcacattgtctgcctttcaccttgcttattcaaagcttcaagaaacttggccctaaacccaaaaacttcaaacttctcggtttgtacttgtttttgaacactttcattcttttaatctgatgagtacttctggtcggcatatttgcctttttattgtgcgatatcccgaccaagcactcatcttgcatgttgtcttttgtagatgaaccctggtaagttttggggaagcgaacaccaattgaccaagatttgcttcaactcctgtacgaggattatcctcgtcttcgtccaagtccgtcctcttcaagtgacgggttgtccacttcaaattttccatctagccataggatgatggctcgaacaaagcaaacgatgcgtaaggtgaacgcgtccaaccctcatgtggcccagcacaccactttacccagcgccgaacaagatccacccatccaggaggagggggatcatgaaggggacgctgaagtcaaggagatagaggaatatgacgatgtccgtcctggcagcccttccgaggcggaggaagaggaggaggctacacctcaaaattttggggcatacaacgaggttagggagccagtagatgtggacggcgatgtcttggttgaaggagtggactacgtcaccgaggagcttactgcttcagttcctcacaggaggcacggtgccttaggtgctaggtgggttcaattcctctggcgatttgggcgaattggaatattatgttcctgcctcaaacaaccgagccacaaacacgaagaaggggatgtgtgcctggtcgggtgctcattccaaacaaggggcatgctgcctttgtacccgtactttaggaaggtggcagacttcttccgtctctgtctgacccagtttattccaaaggccatcatgtatctgcctgccctgttcgtcctctacgcaacccagaaatggggtatgccttctccgcacgaggttagctggtttttttacttgaagtctactcccaagcaaggcaggtcaggatacttctatttttctcggccagacttcaagtggttaacgggcaccggggacaaggccgtgagcaaaattaggaattttgttgacgagtattacatggtggaaggaatgggcaccacctatacttggttccaggagatccctatatattactgtccacccttcatgcttgctcttagggatagatctcaaaggatcgctcagttgccggatgatgctcgaaatatcactttgttgacctcggaggccaactttgtggagtacgggctttatccaaaggatttcattctccaaccagttaaggagaagaagaggaaatccagtgctggtcgggttgagggagctcatcaggagaatgaacccattcaactgaagcatgagactaagttgaagggaggtgcgagaggcaagcagtatgctcaagagcattttgagcaggaagatgaggttgaggaagagcaggagactccactcaaaaggaagaagaaacttccggtcgcgcataggcttatcgaacataacgattcagatcagggagcccagtttacctgttcggccatccactcctgtagtaggaaaggggaaagctgtagcaagaggattcgtcaaatgacgatgtcccttcagtatttgttcgggcagatgcccctgccaaagtgcagggtactccatcttgttttcaaccttcttaattatcatgccttcatatttttcatgcttttttctaaccatgttactttcatttcgtgtagacatgtctaagaaaatggttgaagctctgaaaaagagagtgggaggaagttcgggcttatctcctccggccaagtggtccaaaggcggtgagagaaccctgtccagggagaagacaccagctgaagcggtcattgatctctccgacgaacaaactgttgtggaccctcctttctcggaaatgactaagtccaaggattctcggggaggtatcttggataggccagagcaatcgaagggcagatccgagctgatcaaggcacctgccccacatcgagtgctgcacccggagaccaaagaggcaaagacatgctcattcactctgtgactcgatcggtcctgaggcaaacgagcagttggctgggcagacaatgacctttcctaaagttgatgagatgatgggaggagctctgaaggagtttgcaagggtaagtctttcttgacagtttactttatccttcttcacatagttcagattttaacactctttctctatacagactggtctaaacatagcttacgcttattccagggccaaatcggctgcctcaaagaatgccgccatatccaacactatgctggccgaagtggatctggctaggaaggatcctgatgaagccagggttcagcttggggcagtccggatggaactgggagaggtcaacaagaaacttcttgctgttgagaagaagatggttgagctgactaaagatctacaggcttttgatcaacttgaaaatgccattgcctccttgttaaaagaagtgaccagccttgaggaagaaagggaggttcttcgagctgt

SEQ ID NO: 236476 - DNA, 752 bp, Cannabis indica
tttttttaacatttattacattaagaatattttatcctataaaagtcaaattcttaaactgatatcgcatctaaaagtaaaagttagattctcacggtgacttttagggacgaattttatcgcacctaaaaatattattaagggcgattattttattgcccctaataatatttttaagcgctaagtattaatagctattaggtgcaatcagaggtgaatattatcacccctaatgtccaattttattgtagtgtttgtcgtgtcatgtcatgcttaagcttatatttttcgtgttgtgtcgtgcttaaacttatattttttatattgtgtctaagtacatattttttcgtatcagatcataatcataccaatttcgaatcgtgttaaaaaaatattttttaaaatgtgcaattaattttaactacaaaattaaaaaataatatagttttattactttaaaaacataaattatgactatatattaagtgtatatatattatattctaccactaaatataaatagaacgtaatcaattaattaggatgtaatttctggttattttgattataaaactatatgaaaataaacagctaatattattgtgggaaatttaagttttaaaaacgacagaatatactaagattgaaacgacaataagtacaataaaaatatctgtcgagaaaacgacaagatttatgaacaacgacaaaaaatacggagtattcataaaaaacgacaatttttatgaaaa

SEQ ID NO: 236477 - DNA, 514 bp, Cannabis indica
ggagaccaacagtctgcccgtcactattacagcttggccctatccaaggcaaaaaggagaagatgcccaccaaaagtccaaaggatgagccaaaggggaaatatattctagcccaaggcggggacacaaacatagatcctaagtttggggatcctgtgggacgcttcaaaattgtagaagagtttgaagaagtggaggttgatcccacttttccgacaagaagattgaagattggaaaaggcttggctctagaaattaaatcaattatggtagaagttctaaggacaaacctagacctttttgcatggtcacatggagacatggtcggaatcgacccttccgtgctgacccatgcactcaacatttatccaagcatcctacatattcagttacaaaaatgtttgcttgacaaggagcatgcccaagcactcaaagaagaggtccaaaggctgagagccaatgacttcataacagaggcattctaacctcagtggatatccaacccagtacttgt

SEQ ID NO: 236478 - DNA, 1223 bp, Cannabis indica
ttggggattcaaatcaaccaatcgaccgaggatgattattggtactggtttggtgaaaaagatgggacttattctgtcagtagtgcttataaaatgatccaagacaaaaaagctcctcccctgaacttaaccgaaagcaccttttggaagaaattgtggtctctcaaggtgcctcccaaggccaaagatttgatgtggagggcggtctctaattgtctagctacaagggtcaatctttgcatcaagaaggtgttgacagatagtgcttgccccttgtgtggtatttatgctgaaactgaaatacacctatttgtgacatgccaattcgcaagctcttgctgggaagaagctgctgttgcagatgccagccgaaacaataacacccttctgcaatggatgtccttcaatgctcacagtaaagacaatgaaaagctcagccgaatagtcatgctttgttgggcactatggtcggctagaaatgatctaatttggaaggaccgtgttcgaaatgttagtgatgtagttgcttttgctttctcaagtcttgatcaatatgttaaagctcaaggtaaaggaaacattccttcacagtcacccctcaaagatggtgatggttcggagctttggaaaaaaccgttatcaggcatcaagcttaacgtagatgcagctatattcgatcgtgattcaaaacatggatttggttgtgtggtgagggactcgggtggagatctgctctcggcttttgctggtgtgaactcggcaaagtctcccctgagttggctgaaatcattggtataagagaggtccttagctggctcaaggaccacgggtacacgaacgctgtagtagagacggatagcttggtctgcgttgaggccattcgtcatactgcaagcttcaattctggtttcggtttggttgtggaggactgtaaaactttgctaaaaagtttgtcaaatgtttctttgtttttcgttaagcgttctgcgaaccgtgccgcgcactttgttgcccgccactctattactttcgctgaatgtatgttctcaattaatagtgttcccctagagttgttatccattctcatgagcgatagctcctcttaataaagaacacttttcttcaaaaaaaaaaactagtcattaatttactaattaattaatcattagtaactagttactcataaatgatataactagtaagtagttaaataattaaaattt

SEQ ID NO: 236479 - DNA, 1024 bp, Cannabis indica
agaattaatattttaggtctaaatttttttttcattaatttcatatgttaaatgtatattaaatcaattaatatatatttttaaatatatatataaatataattggatgaccattcgatgataattggatcttggtcaattatccatccccatccaacaaccgatttgattagattaaattttcaaaatttacatctgatccaatctaattatgattgaatatctaattttattgtatcatttaagattaaattggatgactttctgcacacccctaaattatgggtgtctagtactctcctcctcgttggtattatttgtgtaattaaataacttttatagtttatcgctaattaattataaggttccacctataaaaggtattgtcactaccactgacagacgcaaaataatttttactttgtgagaatttatttatcattaaaaaaaatatttatacctacattataattatttttactaaattttatttttgttagtatgagacagcccccacatgaatacaagtaggtttgtccttggtcactactagtgtccaataacaatgctcttattctttagtttaaaactaagtttttaattgagagtttataactaaatagagttacactaaaaaataattcaaaataccaaaaaatataatgtaataacaacaataaacaatctttaatactatattataaaataattatttttgaataaatataatatttatatatgtattacaatttagaataaaattattaattttatataaataaatttataaaatatatgtatacattttattaagatgtgattattcttttatataaagatacactttgttaatacgagacttaaaaatgtataattaattattcttatttataattaagtcaaattaagacttaatttttttataataaattaaaaattattttcgaatagattattcttaaatagaaatttttttagtacaatgtttgttgagttgccccttaaaaaaaaaaactagtactgt

SEQ ID NO: 236480 - DNA, 1143 bp, Cannabis indica
gactacattgagaagatcatagataaattttctatgagagatgctaaggttgttaagcaaccaattactagtcagtacacactttctaaggagcaaagtcctaaaacagaaaaggagagtgaagctacgaaggatgtgccctattctaatgctgtagggtcagtcatgtatcttatggtaagtacaagacctgatttaggctatgctatgagtgtacttagcaaatacatggcaaatccacgaaaagttcactagttggccatgaaatgggtgttcaaataccaacttgggacaactaaggttggattagtctacaagaaatagaatgctaatactataattgaaggctacaatgattctgattatgctggggatagagataataggagatctacatctgcctatttctttatgatttgagggaattgtgttagctggaaagttcagctccaacctgttgtggcactatcaacaacagaggctgaatatgttgccacaactaaagctataaaggaagctatttggctaaaaggactaatgaatgagctaaaattacttaagggtgtgcctacatggtgtattcagacagtcatagttgcatatttctatgtaaaaatcctatgttccatgacagaacaaagcacatagaaatcaagtatcactttatacgagataaagtgactcaaggtgaaatagatattgaaaaggtgtctactgaagacaacccagcagacatgggtactaaaattgtaactcttaacaagttcacacattgtatgaacttgttaagaatcgactcaggtgactaaaagtaggacctatcaagctaagactctcagagataaacaaacagatatcagaactggttataagaggaattcaggtggaaattgttgagtaaattccacttataaccagtccctttacacagatatctacatcagcaacttaacaatagaaataaacaaattggactcaatcctatgtggcttcgcctttactggatcaagaaataggagttagttacaactgttattgtaactaactcctagatctttgatcaaccaactttgacacaaatataaaagtagtaaatcaaaacaaatacaagtagagaacacagatcaagagagagagagagag

SEQ ID NO: 236481 - DNA, 636 bp, Cannabis indica
atttatgaaaaaagccctttaatttatatgtggtacttctacaaacaattataatttttttttagaataaagtgttttgtaaatagatcaggttggatatgattcagttatgattagattcgattcagatcatgtaatgattcgtcccgtccttttagattagatactcggattaaatcaaatttgatctaacttattatttttcttaaaaattttaattttatatctaaatttataatttttttcttaaatattttttttttcaataactaataatacatcatttttttcctctatatttttcttttatttgccaaaattaatgaaaaggggagaaaatatcaaattcttatcactttgaaattgtaattttactttagaaaaattaaaaaatttaccaaatttttaaaattcaccactaatattattatcaataataatgtactatgatgattacataaaataaatctcctccaaaaaaaagatacatgcaattaactataaattttttatttattatcctagtcttcaagattttactgtgtacaattcatgtataagaataaatgtgttaataataaaagtataatttaattaataaattttaggctaataggatttttgtcccctaaactt

SEQ ID NO: 236482 - DNA, 1079 bp, Cannabis indica
aaaaaattcaaactacaactgcaccacaaaaaatttcaaaccgcaaattagtccccaaactagtcctcaaactttattttttagtaacttagtcccaagcttttattttcttgaaaacataaagtatttactcttaaatgatgatattttatttatttatatatttagttttgtattaatttaaaatatttttatattgatatacgttatcaaattaaaaaaaaaaatacatattatgttatttatatataattttttttttaaatatgtcaaaataaaaggaaaaaaataaaccaatacatatttttttaaatatattaaaataagaagaaaaatagtttttattttatgtcattttttttttaaattcaaacgaacacatattttttaagattacaaagctatatatacatgtgaactagaactaataatgtctttttataacaacacttacgaaaattattccatgcaccaaaaaaaaaataacaactatatataagtcaataaaagtttttggatttacttccaatatctgatttattattgtattttgttaagtaattgttctacttaataaaaatgattgttcgaaaaaaatattataaccattcaaattattaataaaaaataaataattaaaataataagctaataaaactttattagagcatcattttgttttctagggttatttggtttcttgttactcttatttctcgattgtgttaataatgcttttgtctaattgataccaaaaatgcaagagctctacttaaactaacggcaaaagattgattatgttgattatcttaattatcatagccaatgaatatgattattagcaaaaattcaattgtcattatgtggtgagttatgttattataagatttattcctaataagttaagttactataataataatatattctgagtaatttatatagtacgtgaaaaacttaatttgattgtgtgttttattaagttgggactcaagtttttttatattttatcaaatttagctaaattttctaactaaatactattcatgtaaaatattatttgatttttaaattacttc

SEQ ID NO: 236483 - DNA, 1607 bp, Cannabis indica
gtttcagatagagatcctaaatttacctcaaagttttgggtaagtttgtagaaggccatgggaactaacttgaaatttagcacggcctttcatcctcaaatagatgggcaatctgagcaaactattcagatacttgaagacctgttacgagcttttgtcatggattttagagggtcatggagcaagtatttgccactgattgagttatcctacaataatagctaccaaagtactataggaatggctccttatgagctgctctatggtagaaagtgtcgatccccaatccattgggacgaaataggagaacggaaatatctaggccctgatttggtccaaaggacaaatgaggcaatagacaagattaaagctcgaatgcttgcttcacagagcaggcagaaaagttatccagatcccaagcgataggatattacattccaacctagagatcatgtcttcctgcgtgtgtcaccaatgaaaggaatctgacgctttgggaagaaaggcaagctaagtcctagattcataggaccttttgaaatacttgaaaaggttagacaggttgcttaccggttagccttaccgccatcattgtcaactgtgcataatgtattccatgtttccatgttgaggaagtacgtatctgatccaatgcatatcctcagttatgaggcattggagttacaaccggacctatcttatgacgaacaaccagtgcaaattctagataagaaagagaaagtccttcgaaccaaaaccatagcattggttaaagtactctggagaaatagtaaagtggaagaagccacttgggaattagagtctgatatgaggactcaacatccagagctgttcaggttagatttcgaggacgaaatcctattaacagggagataattgtaatgaccacatacaattaatattttggattattaaataattagggtttattcatgaggtttaaatattatttataacctgcatattgtggaaatttatttaagttaatgtatgcttatcatgctatttatgtaaatttcgtaaattctgaggttgtgttcggaagctgtgaaaaatgatgttgggcctttagagagtcgcattttatatgttttagaatattattttcggggtatcattgttgggtattggaggtgttggaatttttggggtttggaaaatgactaatttacccttgggagtttgtaaccactttagttagttagaggggcaaaaaggtctttagacaaagactttatttgtcttatttggtttctattagtgctgaatataagtctaattaattaaagaaattcatttatcttgggtgagaaggaatcaaagaaaaacctagaaaactacttctctctctccctttttctctcgaattggcaagaaccagcaccaagctggaattttcttagcccaattcagtaagttccagttgtgattgaagctccaattcaaggtagaacactctagcttgctttctttgatgttctttggttccattttaagtttgatatgtggttttagaaatttaaggggcagtgagtgtgttattggtttgattttcttttctggggttaggtgttgattattttgag

SEQ ID NO: 236484 - DNA, 1570 bp, Cannabis indica
cttgatatccactatcacaaggttaatttacaaactttggagcttcctgtcacagaaactcgaccaggtaaactcgattcctctctttacagtttatgtttttgttgttttctttagatttgttctcgatgtgactctcttctttgtttttcttgtgcatgtacttcctccttcgagcttctcaccatgagaactggtttctcatgtttggatcttggagcagaagactaaatctagggtttatttcttctctctctctctctctttctttctctgatctgttttctggcttagatctaggtttacttgctttgattcatgtatttatactgttgtagagtcggttgatcaagggcttaggagttagttacaattttagttgtaactaactactaagtcttgatccactagaggcgaagccaccctaggactgtgtctgtttgcttgtttctgtttttactttgctaatgtggatatttgtataagggactggttataagtggaatttactcaatatttacaaatcatattcaatttcccaacaagcataaatgttaagcaaaagaataaattagaccaagcatacagttattagcagtctatagcaaaaaaaacgacgacagataatatttatttattttttaaagcttacttacgacaacaaacacaatactaaaagaaattaacactaaaattaactaaataaacatatgttccccccaaatttatttgacacattttccccaatgtgacacaaatttaaagagaagaaaacttacttgaggtccatgctacattaacaagcgattggcacccataataagtgtcatacaagataattaacttgaaagttatccttgtaaatgccctcaagcttggcatgacatgagtttgttccaaaagtagcaccaacaacacaagactttggatgatatgcttggggagaaatcttcggtagctcatagcgggtataatatggtaaaagtgacattaatggaaaataaggatccattggtggttcataatataataacgttggcgaactcaaatcaacaactacaagtggttcaacctccaatgacacctctttcttgctttgctcatgaccacccacatcgttaattgtgattaataacttattcactgaggatgggtgttgcttcagtcaccaaatcaaaatcatcacttgttgagcaagcatctaatttacccaatttttttagttaaaaccacttcaaaggggtcttactcttcaattataagttcaatctcttctatgtattcaactaatggtgcttctacattattcaaataactctcataactttcgttattttagttattgtccttaaattatcacacagagatcttaccatgtccgccaagtgattaatttcttctgcaagtggtagtttattcctgaaatggttggggtgagtttcggcaataaggagagtattggtgactccaacgctaaagtgagggatcccaatgccatttgtaatcagaaagtgtcatgtcattcaacaaagttattatatcatcagtgtttcttcttaacaaagactct

SEQ ID NO: 236485 - DNA, 1169 bp, Cannabis indica
tcctttatccccataacattgcagatcaaacttctaacagtaggtaacgtattactactgaaaaataatgaggatttgtcaaagttaacagtttgtccagaggcattctcgaaaatactcagcaattggatgacattggaggcttcattctcattagctctacaatagacataactgtcatcagcgaacagcatgtgtgagataaccggagccctgtttgccactttacaacctctaatccttctactaagctcaaattgcttaattgacgaggagaaaccttcagcacaaatcaaaaatagatatgaagacaaggggtcgccttgacggatgcctctctttggaataataggacccatctctctaccactgttgagaatggtatagcgaaccgaactcacacatttcagaatcaaatgaacccaatgagcatcaaatcccattttaagcatcatgtctttaagaaaactccactcaaccctatcatatgctttactgaaatccaagctaacagccatgtaaccttctttaccacgtctcttccgctttaaatagtgcattatttcataagaaatcatgatgttatccgtaataagtcttccgggaacaaatgcactttgattatccgagatcaattgaggcaaaacttctttaaggcgattagatagaaccttagacaatattttatataagacattacacaacgaaattggtctaagatcgctcatggaagtaggatttcgcacctttggaattaaaaccatatgtgtgtcattcaacccctgtggtaactcgccatttgagaaaaaattcctcaccatttgaatggtatcgggtccaacagtgctccagcaacgttgaaagaaacctggtgtcattccgtcggggcctggcgatttgtcagggtgcatttgaaataaggctttacgaacctcctcacttgaaaccggggcaacaaggctttcattttgagtgactgttactgtagcagggatattgtcaataacttcagaagtatcaacaccagatgagcaaaatagatggtcaaaataagaagtgataacctcagtaagaccatcatgccacccaatccaatccccatttgaatttttaagtttggtgatagaattatgctttttccgagaagaagcatgagagtggaaatactt

SEQ ID NO: 236486 - DNA, 567 bp, Cannabis indica
ccagatgccaacatacaactagcaagcctaatcatagagaagggccaaaagttaaatggtgaaacttgatgacatatcaagccaatgggaaaagaagattgtcaagtttttaacctgttccatgaaataacattaacgtctgcatcatgtgccttaaaagaatctacagctttcttccctacacggacgtcccatattgctatagttccatcgacagaacacgatgcaaatatgtcttgttctgttgggctccactgcaattataaatgtaaatggaattgattacaacattgaattaaagtaaggcaacctaaacaaatcataacctggagaccgttataaagtgtaaagaccatataacattgttgcttcacaagttcaaaacttacttgaagatcttctacactggcagtgtgaccaataaaaggagtattatcaactttccatgatgcatcagatgtaggctcccaaaaatgaatgtagttcttgcagtcccctttaataaaagattactacattattatttgtacataaaacaacaaatttaaaaaatataatatataatta

SEQ ID NO: 236487 - DNA, 1707 bp, Cannabis indica
tttaatttgaagcctgcaaaggtcggtggagtccatggaattggtggtttcggttgctgaactgctgcttgcacaggagcagaattattaaaattgttgcagacagtattttgcttttggtttctgagctttgatcgcatataattgtccaaatactgagaagcaaaatcaacaatagcttggctgtttttggggacaccaccatataacccgatttctttcatgctatattgcccacatagtacacacaatagattcaaaatcttgtcgagagtgtatggtggataaatggattatgtaatcaccattatacatattataagcatgtgtatggtcaatggtgtacttggtaagtttctaaacctccttggctgtgttgcaattaaataaggcatgtccaatagattcccaagcattgttacatagtgaacatatagccgaatcaattacttttcttctgcataaaccagtagcaaccggaaaggcattctgcataaccctccatgcaaaaatcttaacctttgaaggtaagttcaaactccaaaaagtcttccaccagttgctatgtgagtttgagccaccagtttctctttcctctaccaaattttcagccaaatggaaaccagaattcaccgtgtagcaacctgttgtagtgtggtgccaaatgagacaatcatttgatggaaaaaaactgagtggaatggtcacaattctatccacatcaataggcaaaaagtattgctccaaaagagaaatattccattctctttgttctgttataaaatgagccacaggtagattagatggacccttataactaatagctttgaaatcattatgaccaggaatccatttatctgaaccagctaggacattgaaaccactcccaatcttaaaacgcagaccttgaatgagcaattcccttccccaatgaatggcctgccaagttagagatggagagtgaccgagccttgcacccaagaagctattatttgagaaatacctatgctttaacaattggcttagcaaagaattgggcatatcaaagattcgccaagcttgctttgctagaagggccttgttggaatgaacaaaggatcgaaaccccatacccccttcaaatttagacttacacaacaatttccaacttctccaatgtatcttggaaccatctttgttagatccccaccaaaaattagccatcatagattctaattggctacagaaagtcgaaggcagacgaaaacaactcattgcatatgtaggaattgattgcacaactgccttcaaaagtacctcttttcccccaacagaaaataatttctcattccatgcatgaagcttttgccatatgcgttctttgacatcactaaacattttctttttatcacgctccgagaaagctggtaacccaagataacattcatgacattcactaataggcatgcctaaggtgttgtggaagaaatcttgagctgcttgagtggtattaggttagaaagacataacagattttgtagtattcaagagttaacctgaagcttggtggtagatatcaagaactctcttaattgcccttgccgaactttgtgtagcttcacagaagagaagactatcatccgcaaataacaggtgagaaatcgatggtgaatgacgtgttaagcgtagacctttgagattctggatgtgctcttcattctgcaatag

SEQ ID NO: 236488 - DNA, 1369 bp, Cannabis indica
acccgaacccaaaattagaactagaactgtgactaggacccagacttgagactagaaaagaacccaaactcagaccagaacttggagcgagacctcgactaggattgggacccgaacgtggaccgggacctagacctgccctggtcctaaaccttcgatgggacccaggccaggatctagaccttaatagggacctgaactcaaacccggaccaagacaaggaccgagacctggactcaaacccagatcgggacctaaacccaaacctggacacaaacttggacctaggaactggacttagatgggagacctagactagggacctaggccatggaaccaagacccagatagaaattcagtagtcaaacccaaaccaagacctaacctggacccaagaatctgaagtcagacccatacccgaactcgaaacctgccacaaacctaaactaggacaggaacctgaacaccgacatccgaccaaacccaaacccaaaccctgaacccaatgtctgacctgaacctgggatccaaactcaaaccccagacctagaataagacccaaacctagacaaggacccggacctaaactcgaacccagactaagattgaaaccaaagacttagacccggaactaaacctggacttagattaggatcaaaacttgggactcaaaccttggcgtagacccagacccaggacccgaacccacacccaaagcctcatgcgaacctagactaaaatccagactcgaacccaaactcgtacaaggactcgaaccccgaccttaactcgaacgctaactcaaacatagaatcgcaactacaactgaaaacaaactaggactaggactaggaccagcataaggacctaaacccgacccagaacccagataaaagctagaccgagacccaaacctaaactgagactaggactcaaactagaacttagactgggacccaaacccaaacaagaacttggaccgtgacccaaaattgggatagggacctgggcaacagaactaggatcgggacatagtacaagacccagactcggacttgaacctaggacctagcttgtgaccgaacacccgaaatggaacgagactaggaccattgggctccagatctggacctggggcttggaccaaacgcgtagtcggtgtctggatctgggacccaaccccagacccgaacccgaacccaaacccggacatgaacacaatcttagacaaaaacatggactcgaacgcgtaccctactgacttgaaatttgaatcgaaacttgaagtagacgggaactcgaaaatgggaccaaaactaggacttggacttggaaccgtaatcgtacatggacatagaccgagaaccgt

SEQ ID NO: 236489 - DNA, 581 bp, Cannabis indica
ggtcattacaaaggatagtatcatgtattgaaaagggctccacaaaacttgagataatctgggcgaacgcctaattaaccacattatgggcagcaaaattacaacaacgagaaataaactaaaaattacaagataaattttttttagagagttgattacataaagagacataattatcaatattccaactagagtggagtcctttaagagttttgataactatttcaaaatcactccccaccaagacatagttgtggttcttgagtctagccgagtccaaagcaagacgatacgtcgccgccttaccaatcagaggatctctgaagtagagcatgttaacagcaacccacacaacagttccagagtgatccctagccagagccgccatacacatggaatctccaccaaccttgacatcacaattgactttgatccaatcttcaggtggaggtgtccaagccggagaagccaccggagctgtcgggggtaataagcaggaaacataatctgtataacaatgagaaatagagtcaatggccattacaatgttactcgggtgagagttatgtaccttgtcatta

SEQ ID NO: 236490 - DNA, 975 bp, Cannabis indica
tgatcaatttaaaataacataatatccttatcagtcctcaatttcactaataccgtgatgattaataaataagctagtgaaattaaccatacactacttaataaataagtctagtagtgttgtttcttccccaaaagcacttatattccccatttttgatgaagacaaagaagatgcaaaagtcgaatcgtcgatctgatacttggaaggcccacagattgacaaattatcaacttggatgttgggtgctcgggtgctaaaaaataaacttgctctgaatctgattttgatgcctcaactatgttcgtggtatgtttatttgatgtcccaatgcaaagtttgactcattttctctaagaaggtcccagaaattgaaatcctagttgggaatgtcaacctagagagtgggtgaaaccttatgtgcccaggttggcttccgggttgaaggtttatctaatttcagttcctgggacttagatttgattgctccatgtcttcatggtacaaaatactgaaagatagtgagttggattcaagtcattaaagtctgaacttccatcctgtagctcccaaaatcaacttgggcttagggctagggtcccatcccaggtcactgctatgactctagtctattcaaccctgtgacaacattattttttccacatgtcaaacattaatatccacgttagcaacaaaaatttttgggttaacaaaaaaaaattaaaaaattacataaatatatatttttcacatatgaaaatgatactattgagctcaaataattagggatgtaatgagttctttaaactattcataaaagaaaggacaaagtttttatctcttaagaataatgaatctggacggtttatatttaaagattaaagaacaaaaaaagaagaaaaaaaaagttggttgtcacttgtagagataaaagagaatgaaatttttgctggagataaaagagaatgaaattga

SEQ ID NO: 236491 - DNA, 925 bp, Cannabis indica
tattaatttttttttaaatagatttcattagaaaacagcttcagctatgataattatttttcaaagcaacaggagcattcacctcattaaataaacaacttgattagcagattgataaataaaagaaattaaaatattctttaaattagatacaatcaagcgacaatcctccaccaacaaaccaaattgagacgtcatgtggacagagctattgattgcttgaaccacaactaacgaatctgtctcaataatcacatcatcccaacctttcttctttatccaactcaacgcttcctttatgccaactacttcaacaatttcaggcaacacagcaccatctctagaatctgaaactgcttcaataagatgatcattttaataacgggccacgcaaccaaaaccaaacttttgctgagcttcaaaaatagcactgttgacattaaccttgatcttattaccaatcggtttgctccaatggttactattagaatacacaccagtagcataaacagatgttggtgatttatttttagcaaccctccattgatcaaggaccgtccttgccgacttaaccacatccaaagcaaaccttattttttgctgtcaaaaaacttcattacgtgtcttctaaatgctccatgataccatggcagcctcaacagcaacatcaccttgattaccattcaaaagctcgaaaaaccagctgctaaaattgtccacaccagaaattatagcagtagccgagaaaaaccagcatgattgggccaacgacacccaagaagcacatgaaatattatctcaaaattgatattacataaagggcagatgagatcaacatttacatgcttaaagctaagctgtacctgttggaatatattttacctaggatctagatttactaacaagtatgttttttacatcctaa

SEQ ID NO: 236492 - DNA, 546 bp, Cannabis indica
ggttattcggtttgggcggtttacaattttttggtacagccctactcgaattaatgatcaatagaataaataaattgttaattctatttttagtatttttaatgtgacaaaaaaaatattttataatatattattaaatttaaattaatttctatattttatgtatttaacttttacattaattaatttatttttgaaaagaaaattgtctagtttttctatttatggaaaataaggtaaaaatagtaagtttggttactcattcattttctatctaactagttgtgtttaatctgatcttgtatgagtttcctattatgtttgatcagattttttgaggaaaaaactgaaatgtgatttagcatattacttatcagttttacgtatattgtgatttagaggcttgtaaaccgttgagtagcagtttccacttagtttgattggcacacttgaattcagaatcagggtaagattaatataatagtctgcatatatgattacatgtttagtgtacatgtttatgaatacctattagataacatatca

SEQ ID NO: 236493 - DNA, 1323 bp, Cannabis indica
cagccaaagtgacgtactcgtgtataaaaattatctttccatgggtgtaaagggcccaatggaggcttgaagcatggacgttacagccttacaggcatgcacacacgaccaaagcacacaggtccgatcctatgcataggcagactaggcctgtgccttgggcccacctagcccaagagctaaaaaaaatttcatttttaaaattacacaatttttttattagtttttaaaaatattatatttttttttaaaaaaaataagggactaaaaataatatttttcctattggttattgatgggttgttattttctattttgttgttgcccactcacccatgtggaccttggactcgggtgatcccaaacttcaatacaattatgtactatttgacatttttactatatctaatttaaaacttttattaaattttttaactctttacataatataaaaatatataattgtcctactttaattttatttctaacttcatcatgttgccactaattaaaacttgtttttgttaaatcattaaataactatattttatatataaaacataatcatttattttatcaataagaagatctattatatatctctaatacataagtgttagagatgcatatgaccccttggttttttttagttaagtaaatgttaatgtattacttgtatgtacttaaagaaattaaataaaaaaaaatctaatttcttttttattaatattttgtattttgaagtacgaatgaaagataaagtactgaaagagtttatatttaaattaattaaagttttttctttacgaattattaaaatagttaaagtttaattaaacaaaaagtctaatgacagaaaaaggttaacttttatttggtgcttcagctttccagctactaaattcttaattttatttcccttttttcgaatcttcaaacaaactttaataaagattctatcacttttttatattttttctataattatttacttttattttaaatatacaaaattagccatctcttttcagtattattaagcttatgtatcatcacagaaaaataataaataaaatgaaatatggtttggtttttattttctttaagaacaatcagtacaaatccaatatgctaatttactaaattaataaagagatacaatgttactaaattatgctattttaagaaatcatatatactcatcgttgtttggttaattattagattacttgttgactacgtacgttatattattacgtacataattatatactaggtgattgttacgtgccaagccaacgtagtgttagttttatttaatat

SEQ ID NO: 236494 - DNA, 699 bp, Cannabis indica
atgttctggacttaacagattttgtgcatatattaaaaatactaaaccataagcataaaaaaattcatgcaaaaatgaatcacttctaatttcttagattgataactaatcagattgtaatggattttatttagggcacaaaacccaacaacatacacattcaaaatgttacatggtgtaatcataatataatattattatatacacaactaaaaatataatatcaactattttttttttaaaaaaatcacaccatcaataaattgtctatcttttgtatcccgatcttttggcttgatgccttttaatggaatttttcagttttaaaaaataaatagaataaatatcacttatgaacttgaataaaatttaatgtttaatataaaattatatatatcaatataaattataaaacacaattaactatttgattcaatatgtacaatattaataacttttcatttctttaaacattctcaacatttgcaaatagagaaatagttaattttaagatggacagctggcttcataaatagttttaataatatttcataatttatgaacaaaattattgttgagaagttttataaaacacaaacgtttgtatctttggtataataaattataatttaattggttgattgattacattaaattaaaataatgtgaaaaagtagaaaaaaactataaagtaaaaaa

SEQ ID NO: 236495 - DNA, 1202 bp, Cannabis indica
gacggagctatgtatatgctcacaggggccacggccccccctacatttttaaaagttaatgcatattgactctcactgaaatgtatatataacatataacctcaaaattaattcatattttcgttggaaagaataactgtggagttgacttattcaacatatatatatatgtatatattaagattaaatttcataaattaaaaaaaattggtaaatgtacaaatataatacattatttttgtattaaatattatagaagttttgacatatcttaatctaaatttaaatgtacataactttaatgcataaagttaaaaaaaaatagaaatatttaaattaatattagtggacaaattaaaagtaaatttttttgactttgggagaagagattttaacttgagatcttttaaggaaaactgtagaattattagattatgtctatgactacataaattaaaagtaaattttagtagtaataaattgagcttaaggtggttatataaacatagcttaatagtttcacacttctcctcacaaagaggtcccaaatttgaataccccgcccataatgtcaaaaaaaaaaaaaattgagcttaagacaccactcaaatttttttagtgtaattttgttatcaacttttgagtgtagtttttggtttatattttttgagtaatgtataaaatatttatgaaaataaaaaattatgattttttttttcaatggacacacaccactaaaaaagttactaaaattcactagtcgtatgtgtcggccgatattggccccccttactatctaattctggctccgcccctgacttagggccttcaaaattatcaactacacacaaatttataacactaataaaatgagaaaaatcctatttattccatcttatatattatccttatattatttttaatttttaattaccccatagaaagagagatcaaaagtgagtaaaagtattatctttaaaaaaagtgactaaaaaaagtaaagatcaaaagtgtcaaaattgaaaagaaaaaggaataaaaagagtcctaatttagtttagtatatatttcatcctcctattttattttttcaaaagtcatttcctttctaaaaaaaactcttttaattttattaatttatttttttatcttctttttttttgtttacgtcgtatttttattcttttaaaaagttaagtaag

SEQ ID NO: 236496 - DNA, 994 bp, Cannabis indica
ataatgtatattaatttaacatataagtatgagaaacaataatagtaatatactttgtttttaaaatttatggaatatttcatatattttagatattaattttacttgtgttatgtgataacacaagtaaaaagtaaattcaaaaaccaacttacctacaaatatcaaataatacaatggtcatttaaatattaccaaaaatctactttcaatacaattaacctacaaaaaaataattaaactcaattaagtatactttcaatattttaataaaatgaaataatacggtgtaaaaactagcatcaatacaaagtaagtattcttaaaaagatattgaaaaaataaacaaataaataaaaacttaattggaaactaaatttatataacttaaatgtaatgacttatgataaaaagttgattcattcaacatcctatctttacaaaatatatccatttaaactatataacattgtatttatctactaaattcaaaatacaactaaaagaaactggtttttcaacaatatagaaacatatatctaatgaaagaaaactaattataaacatttaataattcatcttttctcatttgcctttgccttatcctttgtcttttcctttcttttcaacgtttcatcatctgttatgtaaccaccaacttgtttcttggtagcatgaataaacaaactcacaacaagatcatctcaatatatcttgctaccatatcgactatcttagatggaatctcatcaactttttcaggaataaacaagtcaacaagcttaataacaaacactccacaatcacataaaataaaaaatgaaatacaatatgaagtcaaaaaccagtttcgtttatcacttagttaaaattctaacgtagggaaaccagttagtaaagcaaaaccagttttttaaataatcaaaagaaaaaactgaaacttaaaactcagtaatgaaaaataataaaaaaaactacgttacttaaaaaaaac

SEQ ID NO: 236497 - DNA, 753 bp, Cannabis indica
tgttaatttaagttgggacatgtagaagtcaaaactagaataataactatttctttatttctatcattgtttcctaatttttgaaataaaaataaataatcaaattctaaaatagtgcatttagattaaaaataatacagaatcatttattctttcaaaataattatttaatcatttttaattactaataccaatatcagtgcaacttcaattacaaattctaacaagtagaactcacatttatttatttattattcaattaaagcaaaaaaaaaattatacttagataatttgaaattaattctttagaaaaaattatattcatttgctgaaatactacaccaagcacaaaattaaattaagcttattatgatttaatatataataagggcgtttgccatttttttcaaaaccaaaaaccacaggcattggaatggaagtagtagcaaatttataagtatgagaaagagaaaaggtaaaaagtagttgagtttgatatctgaaattaattaagaagaataataaaataattgaaagagaagattatggaagaaagcttacgagagagttgacagtaacaacacgccagagagtggctttgagcattgaaggaaggagcaagagagtgaggagagctggggccacatggttcacttctaaatgctcttctattccatcatcttttgaaaacctctgtctctctgatttatcatcaaataatatttcaaattaattattatgtatcctactttt

SEQ ID NO: 236498 - DNA, 1801 bp, Cannabis indica
ggcacatattttttttcatactttttttgtttctttttatccttcgacggttccttaattccatccgttctcttcgaactagaagcccccaagttatcaattctcgtggaaactgttcctattgaaatattgctgggtttgcctcccgagcttattttcaacatattgatttcctttcgggcttcttcttccgaacaaacacctgagccctttcattgaactcaatgatgcttctcacccgacgtccttgtaagtcatcccacaactcgccccctgcagttaatggatcagtagagatccccgcctgaagggcaataagttgcgtgctgtcatccaaatttttaaccctagccacccgtgctaaaacgacttaagtacgcctgaagtgttttaccgggctgctactttatattggttagcgaggccgcttcaggtcgcctgtccatagcggcctgaaactgcttcttgaaatccctggacagccgctaccaggaaattattgaatgatgagtaaatatgttaaaccagctactcggtgctccaacaagcgaggtggggaacaaaatacagcataaattgttcgtcacatttctcgctcgtattattgtgttaaagttattcaaatgtgagaccagatctgtgattctgtcataagacgagacatgcgggtttttgaatcctgaaggaaatggggtattcataatatttgggtgataggttcaggctcctcgtcagagccatatccagatagtttccctaattccccaattgatatctcctaaacttatcctctagctcgtttatccgcaatgggattggatcctcttgctttggaccaagctattcgcaaaggtcaggtttcttcccattcaagtgctctcgcagatccggctaggagtaattgttggcagatcttgtcttactcattgattgcgtcttactcattgaccttgtctttgagtggctcgcggatttataggttcccatactttctcgatcattagctcgttgaatactttgtcctctttgagttggctgactatgggttctggatcgcctcgaagtcacacttgcttcttcacgctccgttctttcctcccgagagcgattttttgtatttcccacatcaggatatatacgagtcctcgctctatgggtttgggaagaacgttggtgatttgtagcaggtgatctccgttctcctggttgagtcccaagatcctgctcattttcatgagggatttctcgttcatcagtttctggttgcctcccatctggctgatcgtcctggttttcaggggtttcccattttccctgggttgttcttccaaggccttttcctctctcttggtttgtgagccacgaggttttcctcgtggtcttctcactccaggtttaggttgattttgggcgttcatcccctgtgtttccctagtcgaggctgcctcacgttctaactcagcatttcgacgctgctcctcttccagacagcgtctcaggcggcgacattctatttcataagttctttctcccacaaattgggcacctccccgattgagcccttcatccaccattcccacacagagttctcctcgagcgtattgtccgcgtgctaggaccaacgttgggttgagttctctgggaatgtgtggttcgcgcactgggataccctcaggttgagccttcttggaatgggttgtccttctggctgtggattggtagatcttttggaatccatgggctctttcccagaacgatgcttggtttcctcgcgtggggtgttaacattttctagattttt

SEQ ID NO: 236499 - DNA, 629 bp, Cannabis indica
gggcataaaacccaacacatattccctcaagtccacgtgtcccagtcgcattggtccacgtattttgggaaaaattaagggcaacatttacccccgaagccttgtttggtgggaagtaaacgaggcttgtttaggtgctttcggttgtcttattgattacctggcacgtgttttgggcgcgtggggcgcgtttatgaccatcattattgtagtttttactttttgcaggcaacgattcgtttcctatccattaatgatccgacgcatttaatgggtttcagtcaagtactcaagcgtttccaaccggcttgatgagcgcttgtcccaaccgttagatcagtagaatgcaaatcgattgctattctcaccgtacgatgatgcttgatcacagctgcttcacacccgttctggcctataaaaaccagccttctcatttcatttggttactttcgccagtttgccaaatttcctcaaagtctttccagagaaaaaaaatttcagacaccatagattatctgttactcttccttcgccgttgccagtcttcactgtattgacgatcaacaccaacccccggctttcgaacttcatgtaagttttcagaatactttatactcgtctactgtttg

SEQ ID NO: 236500 - DNA, 1215 bp, Cannabis indica
actttctaccgtcaagatcaccgaccatatcaacatttgcatacccttctaagattggttctcctttcctaaagcttaggcacattttttatgtcccgttgagatgtctaaagatccattttacagcttcccaatgatgcttgcccagatttgcaaggaaacgacttacgtctcccactacatgagcaatatccggtttcgtacaaactattgcatacatcaagcttccaaacgctaaagagtaaagaatagccaacatcttcctcttttcttgatcttccaaagaaggacatgacttcttagtgagtctaaactggccaccaagtggtgaagagaccgactttgcatctttcatgttgaacctctcaagtatttgttcaacatagttctcttgtgacgaccataatcttcgagaaggtggcttccctcaagtctgtcatatcgaagacttcagatagttctttctttagctgatttatcatcttaccatcctgctcgactattaacatgtcatcgacatctagtaataagatgacgaatttctcattagggaatttcttgatgtagacacacgaatctgcagctaatctcttatagctttgatccaccatgaatgaatcaaacttcttctactactgtcgtggagcctattttagaccatacaaactcttacgcagtctatacacaagatgctcttttccttttacctcaaaaccttcaggttgctgcatgtatttttttttctaagtctccatgaagaaatgtagtctttacatccacctgctcaatctcaagatctagactcactgctagtccaaagattattctgattgatgacattttcaccactggagaaaatatttcattgaaagtgatccctttcttttgaccaaaacccttgacgactaaataggctttgtactttactaggtttccatgtccatcatcctttaatctaaagacccatttatttctcaaggccttcctgccttttggaagtttcaccaactcataggtgtttttcttcgtaagggaattcatctcctcatctatggaatctatccacttatctttgtctttatgagccaatgcttcctagtagttctccgactccccctttttcagttaacaggatatactcgatctgacagtgaatatcttttggatagaatttgtaaagcccgcttagttaatttggaaattagcagttgttta

SEQ ID NO: 236501 - DNA, 1179 bp, Cannabis indica
tcggacatttcaccaaacacatggcatgggtgtttttacacacgcacacacacaactatagagcattttcttgtacactctcaatgtgttcaacttacttcattctaccaaaggaatagaaattgtcacaaagcctatcctaatcaacttggaagtacttcaacactaggaactaaagtttttcctttctactgcagtagcaaaacaatacgtataaacaacgcataaataacgcataaacaacactgtatcaaatttattgataaattgactaattcataaaatcaaaaagaacataaataacatcaaaaaaacaatataaaaatcctagtttgaagaggaataaaaattacaatagcttaaagatactctctacttttaggctagtgattaagaataaatatgttaggcatttcgtcaaacacatggaagatatgcccttatatacacattaacaaaaaattcaacttaaagaaaaagaagaaatttacaaaatttgagggtaaatgagtagaatcaataataaacaatcacactacaacaatattcttattaaactttcaaatctaaacttttattaatgtaatttaaaaaggaaaaaaaaaaaaagaaagaacaagaaaagaacaacttacaaatcgaagcttcaaaaaacattaatagcagcaaaaataagtttgaaaaagagggagatggcttgatcaagagggaaataaatctgaagtgtctctctttctccctagaccacaacatagtaggttgagtagatgttttacatgacatcgaggcccgggacaagagagctggagacgagagaggttggatgtgagatggaaatggtggagatggttgtcttttaaagtggatttgtgtgaataggaggaagaaggagaaatagtataaactgtataattgtaaatatcaaactttgtaaatagtattaaagaaaaatttaaaaagtaaaaaaagtaaaaataaagatagggcaagtatatatgtttaatattggtaaaaaaaagccacatagtgtaaatttcctaagaatatataatatgggagccgattttgtctcgttaatgtatttggggttatatattcgggaaatttataagaattgactaaaaaattccctatttacttttttaattatatatgtagtgttttttctttttttttttt

SEQ ID NO: 236502 - DNA, 757 bp, Cannabis indica
ttattattattatttaacaaacaaaatacaaaaaaattcttttattttcaagagtaaaaggatcagtcctcattgaccagttttagagaaatttctgatgaattcatgtccagtggtaatataacaaaatatttaagaaaatcaattagggtttcatttcatttataaaaatccatatcaaaagcacaactcttataagtcgaagagacatgtgtctaacatgaggtctcatatcatattagtaaaactaaatttaaaaagtattattggaaagtgctaatcactaattaggtgtcaccttaataggaaaagagaatccaaactcctgaggccatcgtatggtttcatttattattcatttgatttcaatagctaatggcattggcaggctccagcttttggttcattctttacaagcaccggtggtggagagaagggagaaaaggcagcaaaagaagtagtagaagtgtttaaaatcttggaagaacaattaagccttggaaataacaagttcttgggggaaagactataaacatggtggacatatcacatggatggttacctcattggtttgaatgtatagaacaacttgtaggactcaaactcttagaccccaaaacattgcctcggctctatacttgggctcaagatttcaagcaacttcccatcatcaaggagagccttcctgattacgagagactcttaatccatatgaaataaaaaacacttagcataaaactaagtatacgtgcctcgc

SEQ ID NO: 236503 - DNA, 3918 bp, Cannabis indica
gctctctctctctctctctctctctctcttacccccaaaattctcacttgaaaaatcctccacctaacatcaaaattcctgaccctctctcttctcgcaagcttggaccgccgcccagggtgagaagtaccatggcgacccacaacccacgacgtacgctacaacaactagcattgtgcccccatatcttgtcttcaagaacgtgtcatcaatactaattacaggacgacaaaacttaaatccccttctacaagcattcagtgaccaaaaatagtacttcaacctgttgtcatctatcacaatatctgtaagagcactcggattcttctgttccagcatgtacaagtaaccaggtaacttcgtataagattgtgctggcgtacccctaacatacataagtgccttctccctgcacctccgcgccttctcataacaaattttgattccataatcgtctaacatatccttttgtatgtctattgccttgtacttagttccatctgatgtgtacttgttcttaataaggtggccaacaacccacagtgttgcttgacagttatcagcatgtctagaatctaggttacatgtgtgttcattgtggaacacaatgacctcaaacatgtcacatcgtgccttcttcttcaccctcaatctccatttgtaattttaatcattacaagatgcgtaaaatacattggtgccagacttcctcaccatgaactcaaaattcattttcaaagaaaaccttcccactatatttttttaattcagtcttgtttgtgtacaacttgtcaacgtgtatttctcctgaaggtgtaccactaagagaagttgtataaacactatttttctctatgtctttccttgtccacacaataggtttgaattttgtacgaacttcaaaattagatggtacaatactacgaggaggacctgaccggctgctactagtgtctggtgtttggtgattttcactataacgggttcttctttcttgctctgtcctctagttccttggaggtagtggaggtagttctaacctcaaagtatgtacctctacagcttcatcaacttgcaactctacatcaccatcctagttcaaatctaccataagatcattgttgtaaaagggagcatcaaactcattaatctagtcaaatgcattgtcaatcctatcctcatctatattagtagggggttgctcattcaaacctactgctggatctgtttctagaataaaactcctaacaatacttcttgggggacagttggtggagtaggccgcaaaatcgcatgcctcttaaccttagtcattaacaggggcaaaaggttctcatccacactcatttttgctttcattcttaagaacaatcttacttgactatctttctctaaaactttcgacggtgtcatattgcatttcgtgtacatgtaacacacctctattcaattcatacacaatagggtctatatccaactcttcatataaaatttcatgcatcttttgtaaaatagtgtcaacctcaaatattaacatctttgggttattgaatatccagctgaaactttcaactgctcaagccccagcatatagtacaaccacaaatacagttaaatctgcaaaaaaaaggaaaaacattagttaataaaaactatatcgataaatatcgcaagttatgtcgtaaaccatgtcgataagcaagtcgcataacatcgctacatgttgacaaaattcctgctccccctagtaaaccaacacaatactttaaattatcaacacatgttgcaaacaatgtcaacagaaattgcaaaaatcgtctatggtaagcataaattggcacatgtcataaacttagtcgccacatgtcgcagaatgtcgttaaaaatcatccctgacctttatcatactctaatgtcgctagatattgcaaattatcgctaaaacacaaaaaaaaccaaaaaacgcagaattatggcagctcgagtttcaagaacaagacaactaaaataaaagaatgatatgtgtagatttattcatttcaacctaaatactaaatacaacttattaatctaacaataattattaaataaattacatacccattatttttttaagaatgatgttggatagggagtttgggttgctcctacacacttgattgtcaagctaagactttggcaaagggtgctccaacaagggtgtgtatgtgtggtgattttgtagagagagaatgggatttagttttattattaggtggataaatttaatactaaaaaaaagataacatattttgtttaatatttaattaataaggtagtatataataaaatcatgcaacatatttaaccatgaattgtcaaaattctattagttgatttgtaagcatgagtgggcgccatgatttctataaaaaaataacaaaagaacaaaacaaagattgctttttaattataaaatacattttcattgtttggtaatatacctgagaatacaaagtcataagacttttagaaagggtgcaatattaccatttcaagctacttcatttattcttatttctaccttataatgatttgctttcctagctagctaggaccataacaaaacaaagagctagattagggaacaaagataatcaagagatttaaccttattaaccacaagtcaagttgagaattagtggaaattattttgggaagcttatataagtatcggacatttaatttacatataagattattgaaattgagataaaaatattttaagaaaaaagaatagaaaagacaaaaagtaccttaaaaataaataaataaataataaacaaaaagtaagttgggggacaaaaagaacaacgaattgtgttgatatttacagacgagccgatagcattattattagctatattttgattttgaaacatgaatgatgaaggggacgtgtgtgattgtatatctttttgccacgtggatgatgccaagtatacagagaaacttctaacatctcaacagccgtccgatcagcattagtaccacgttaatttttattttttaatgtaatttattatcgttttatatatttaaagttttgttatataaaaatttatttgttggcggaggagattctcagctttattacaatattacttgcattgtcactggcaggggacggggacaggagacgggcatggaaggaccaccccatttagggataatttctcaataagcactcttattttggacactctagacgtgttgtgttatctttgcaactggttactcatacaatacatacgggtactttttagtatttctctattctgcatattggtgtctagcactacctgttaatagtgtcttgtgattggttaacaatattctctaaaaataattaaattaaattataagtgactcgatagttaaaaaagtaaatactattggtacaaggacctacccattaatattaatgctttataaaaattatatgtaaatttttttaatttaataattatagactaaaatagcataaaagtccccacaaaattaaataatctataagagagattgtaatgtaggtataattttttttttacaagaaataagtccttacaaagtaaaaaatctgggttctaactgggtgcaattatgtatcgagtctcacataatttattattgcaataattttgatggagtatccctaaccaaccacaagatgagaaattacattgtatacccactttactttgtttgttttaaattttacctccatttttatattctttaaaatatacccacttttatagataatgttcacattagatcatcctttagctgatgctagacaccaccaggatcgaccctaagttaaggtgggctaggcccgtacctagagcccacctattttagaggctcaaataaaaa

SEQ ID NO: 236504 - DNA, 603 bp, Cannabis indica
aataggatagggtatttctcctaaccaacaaatgtcttgatccaaatctaaagcatgttttgtcaagccatgtgcatatcatggttagcattcctcctaacatgagattatttgcttcagggaaaaagaataaaagacaacgaacatctaaaatcaaataagagaaactagacaaatctatagatgtagtagttaaagcatgaaagagtctaagtgcatctgtttcaatattgctgaatttttttttattgttggagagcctaatttaagctatgaaaaaaatacttttgcctccatttcatcagaacaaaagcatcgttgtaccgactttgaaagtgcagcaataacttggccttgatggtcccgaacaatagcacccacacccaaaatttttgctgtagaattcacagctggatcaacattcaactttataccaataccaataggaagttaccattgtacctcacggtcacctcttggtaaagctatagtgacctgccaggtcctggcaggagcatggccggccagacctcaacttgcagaccctggtctgccaaaccatatcctgaagtgcatggtcggccagacctcccatgtaggtct

SEQ ID NO: 236505 - DNA, 1191 bp, Cannabis indica
agaactatccaatcaacccaagttttaataaagccaataaaacttaatgtaagcccaaataaaaagtctaacagaatgatcacaaaataggagttgcaaatcctttaatttaataattcctcgaatatgtaactctcatctctttttcacttttaaattagtaaaagatgttacaaactgtttatgaatgtgaataaatgatagctattaaatatatagtttttggaaatttgatttattcatttataaggtgtataaatggttcaatatcaagtagcagtgatttggaatactttagaaaataattagctaaagttgaaaaaatagtaactagaaactgttttttttttcaacatatacaagtgcatacatttttgaaagtttgagaaagtttttctaacagcccaaaactcctccaaatcacctaattaataccataagctcaatttatgattggcggtaacatcaaatgactttatggtggtcattgttatttatataggattgaaaaccttgtgagaatatgctcatccttagaacactagaatgagcatatgaggcttgataaattcttaagagcatttttagaatttctctaagtgtccatacgagggagaaaatgacttttaaaacaattccaagagtgatgccgaaaattgagtaactaatcataatcttaattactatgaccgtgcaatactgacgtttaccgaaggaataatgtatacaattccatgttcagataaacgatctttgaacttaatttttgtattttccacttctacccgttcgcaagatcttaaatttttatcttactggtgtttagccattcgtcagaaattcttgaaacttctcaaacgttccagattttctgaatataaggtaaagaatatctagagcgatcatctgtcatggtgatgaaatactactataaactgcactttgggtgtcagttttaaactgacacttattatacgtataatgtcagttcatagcacctattctacagtgaaaaaaataagagttgaagtgtcgactataaatcgagactaatgagttttagtgtcgttttacaactgatattagtgtacatatactaaaaggggtatttttttaaaaaaaaaaaaaaacttaatttttatattacataatattacataatttgtacattatttatattaaaattataat

SEQ ID NO: 236506 - DNA, 2624 bp, Cannabis indica
tagtggaattacaagtaggactgttttgcatcttagtgcttttattacattgatatatgctagtgctagaattgaaatcatgaatgcaacaacactttggagtggaatcattagtgcagctacattgttgagtatcggcagacttggaaatagtggctagatgacattgaagggtggaggaggaggaagaagattcgccaagaacatagaggccattcttaactgtccctttgagtaatacttttcccgattccttgtccttaacaaaacaaaaatgtttgtgaaattcaagaaatacatcattgtcatgggttagtttagaaacactaataagatttttggtaattgaatgaacatttaaaatagattttagatgaatgggggtaatttgattagatgggatagttgaattgcctatatgagaaataagtaatctcttaccatctcctacagcaagtgttctttaccagtatagggggttacattgtccaagtgttccatgccgaatgccacatgattgtttgctcccgtgttagcataccaatatgaatcttctccaaaatcaggtactgtattggaagagtacacttgaagatccatgtgatctggtgagtcttgttcagcaaagaaggctttaggtggaacaccatttccaagatatccattcccatttccagatgggttctttgtaggtggaacaaaggctttatcgaacctgtaatggcatatggctgctgtatggccaattttgaaatagacttggcagatgggttttgatgtagtaagggatgaatatttgaaagaatttctgttgtaattgcgccagccatcattgaaattacttcttgcaggtgtatgtggagtctttgaatttggattaaatccaaatcttggtcccccaatagtgagattagcagccattctgttcgagatttcagcagcagaatgatgtctctccaatctacattcatgcgccattaacaatgcttgaatttcttcaagactcttggattcaagacttgaagttatacctggtactactgagtcgtattctggccctaagccatttagcaattgcaactccagatcttaatcgctaatggtgcaaccggtgacagcaagactgtcacatatcaatttgattttatccacataatccaagatcgacaggttacctttctgaatattcgcaagctggctctttaattgaagcagtcgggcctttgatcgtcctgcgaatttttgctcaagggcacgccatacttcgaaggaggtagagtaagtaaccaccgatccaagaattccttcagacatagaggaccgaagctaagacaacaagagttgatcttttcttttccattgagagtacgctgggttaggttcaccattgattagaagcttctgtggatgaatattgttgaacataatttcatccaagtcatgtccaatcacggttggaacgacttgcgatttccacgccaagaaatttaaccgttcgagtttaattgtgagagaagatgtgagagaaattgaaaatgggttccatgactggttttgattagttgccggaggtgtaggagctcctaccggagtttcaatctgaggatctgatgatgatgagtccattgacattggtcagtggctctgataccatgaagacttacagagataaaagcagagagttctatgagaacaacactaagaatttgagcaaatgaattcttgaccttacaagagatcaagtcctttatttatataaggaaagtacatgctagaactaaacaatacagagagagaatacaataggatagttacaaaacaaaatattagctaattagtgacagatttaactaactaattttaactgatgttatcataacatcataaattaggtataaaaaactaagataattcttctaattttttgccttaaaattttaattttgaacactaaaaacatgagcatgtatgtatacacatacatagatagagaaacacaatatattattattcttttaaatgaataaaaataatatttggatttgtacaaaacaacaaacataacattaatcacaaggtacaatttgtaaaagttctaaattttgataattaaatctaaatacttcttttcatttgcctatttcattgcatttacttatatatatttgtaattaggtcattaataaagttctataaaattgattttggtccatttattcaaaaagaactaatttaacttttatttagagaaacaataattcactaccctacattgaaagaaataaattcaccacaaaagaaattataaaataataagagtattttcaatggagacaattttcataattgacaaaatacacacatcatcctaaaatatatatattttttttattttctcttccatataagattccacatcttttcttacaaaaattactctaatcgtgagcaacttcaaaaattgctcaacatggtcccacatatcactttttaattaaattttataattatatatattctctcacaatattgattattgattaagtaactttttttcaaaaaatataaaaagaattaaatagtgtcacatggtcattagtcattttggacaataatattcataa

SEQ ID NO: 236507 - DNA, 524 bp, Cannabis indica
ggcatggacttcttatgctggtccctgaaaccttcgaagttctagggggactagttcaggagaaggaggaagcacgacagcggcttgtagatgaagttaataagccgccaagaggaataaggtacgttagaggtgataacaccttttaccttttgactaagccattaagctgaacattttgtattctcatgcagaaccaggaacagagaacttcctcctttgaggactcgagcaactcttgctgcatggtcatcgagcaatgatcatgttcctgggaacaaccataacacaacatctgatttcagaacccccttacaggtgcatcaaggtagtcttcacccgtgcgcatagagcgtactcagctcactgtacttgctcccaatgtttttcattgattgatttttgttttgatatcttgtcattttttcctttctgaaattttaccctgttgaatgtgtgattaatgaaaaggttacatacagaaatattgtttttgaatcatgagtgcaagtgttctctgcaat

SEQ ID NO: 236508 - DNA, 1899 bp, Cannabis indica
ctttagcaaaactttttataacagggattcccagaatacactttttatgccgttataatgtccacttttagtgctttattttagtcaagtttttaatattatcacggtttttaataattaattattctactagtattaaactagtttataaaatcacacatgtggcgaccctatagattatagcgttacaatattggtccataatgggagttccatgaacttgttgttcaaagaagccttcacagccataggcctcacggatagggatttgtcgcccatcggctccctgctcacaggattcaatgggacaacacttatcccaataggaaaagtgaggctaccagtcaccctgtgcccggatacccctcagagtacttttaagtaatgcaccatcgtggtggtagattgcccaactgcatacaatgccatccttggtcgactggccttggtcgatttcggtgcaatcatatccatctggcacttgtgccttaaattccctactcaggaagctggagtgggtacagtgaggggaaattagggagaggccaggtagtgctataatgttgcagcacacttgccagtgttggtggtccgtgagggcattgaacaagcattggtggaagaagatgagttagatccccgcgtgggatccaaaaaaattgtagagcctatggaggacatcgaggaagtacgggtatgcgacctcgaccctaccaagatcctccttctaggaaaaaacctagagccaaaggaaagaaacaaaattattgaagcattaagggcggccatagatgtttttgcgtggtgccaaggagacatgattggcataagccctcacgtgattacccatgtcctgaacgttaacccagacatgccgccagtacagtagaagcggcatccccttgatccagtaaaagcagacgccctggaaaaggaggtagacaagctgctgaccaacgacctgatctgggacatgtactacccgcaatggttggctaatccggtactagtgccaaagccaaatgggacacggcgggtatgtatagattttatgaatctcaataagggctgcccgaaattgcttccctttacctcggattaaccagatggtagacgccagctctgggttcaagctaccgtctttcatggatgcctactccgaatacaaccagattaagatgcacattgcaaatcaggagtacactagcttcatgaccgacaaaggggtatactgctaccagttatgcctttcggattaaaaaacgctgatgcaacttatcagagaatggtgaaccgaatgtttaagggcctcctaggaagaaatatggaggtttacgttagggctgaacatcgggcgggtttaccgggtttcaagttcacgagtttcgggttacaaaaaagaaaaccgaactcggaccccaatagggaacgggttggcgggttggcaggtcacgggttggcgggtttcagttggccaggttgaccgggttggcaggttgaccgggtcaactctttaaaaaaattaatttaattagttgttcaaattttaacataaataaattaagaaaatcgtttaattgagagaatgaaaattacaacagtgttgaccaagttaaatagttacatttctttttcttctatttgcagacattaaattgacttaaaaactaagtctagtatataatatatgccaacaaagaaaataaaaaataaactgagagagatagatcgacttaaaaactaaatagagtatattctgcatgcactgcatatactcttcttgcatttactcatcattattagctagactagaaagaaacacataatggaaattggagaatgcttaaacaaactggtaacaaattcaatctgcaaggtacattcatggactccactttt

SEQ ID NO: 236509 - DNA, 893 bp, Cannabis indica
agattgaacctaatcatatcaggaccataggaccatgttcaggcctaccaggttcttcaggccttgtcctaccaatagtgacctaccaggttcttcaggccttgtcctgctaggcccttgcaggactatggcctgccaggattgaactggcaggaccatggccggccaaacttccctatcggtctatgggcagctaggattaacctggcaggacactgtgtacaaccccaaaacatggacaccaggcatggcctacgatttgggcactaaaagcccaacagaatggctgaagaatatttagattcaagggcactttagtctttcgtatttatctaacaacctatgtaaatatctaggatttaaacttgtaatctaggggttaggcctcctatataaaagccttaaccctagcctagaaaccaaagttgcctctaagtcactcagcctccaaatagctcaaagtctgaaagccatattttatcttctctctctctctctctctctctttctggtacacacccattagggctctctttctctcttctcacttcatctttcacacacctacctaaggctgtacaacaccctaggctatccaacacttgagatctgcctactgattcatactttgtaatcctaagggtgctataccagatcccacctatagtgatttgaatagtatttctctaggtataaatacaaccaaaaggggagtaggtcatcacccggtatcacaagggggccgaacctctataacaaatctatgtgtttatttcttttcattctttgtttgtataacatgtggcaagcattagagccatctgacccaactgtgggttgatcactttttgaggtcaataatttggtgctttcattgagagcgtggatatcgt

SEQ ID NO: 236510 - DNA, 1038 bp, Cannabis indica
tttaaaataagatttaaataatttattgtacgtgagatttttttattttacacgcgtgtgaaatagattgtttacatatatttgtacaaaattatcctaaattatacatttttacacgcattagataaactataacctcaatttgtgtatatgacaatattcattttagtttaattaaacctcccacatgttagaaatttctatataaggtgataaaaatagagtttcaaacttccaaagctaaaaataaggccaagtatcaagttattgaaagtgtaatatatatcccatttttatagtataataaatatttgtggagtaacgatctcgaggagttcggctctgagttgaagaaggagatctctgtcttccgttaagtaatctcatgcgccgtcaaggacctccctaattcacttgaagtaggcacctttgtcgctctggagtcgctcgagtcggttggtcgtataatcaatgacaataagttttctatccttttaatctctctttaattttcaacttttatcccttcactgcaatgttattcgcatggttttgttttcttagtattaatttggtttatatatttatttataattcttatgtgtgaaatgtatccgaagtggttagtgtttctcaattttatatttacttatgtcgaacacttttattcgtgactggaagcaattcaatatattttatctataaaacgaaggtgtaggtggcagcagtagaaaccggctattatccttggtggctcactctaggcggaggggtagagatgacattgctttcaatgatagtaatcggagaagtggaggtggcagagcataggaggacgatggttgtaggcggttgattagccggacgaagtccatacatgtgatagaattaaatggtggagaaaattaagctaagtaattactttctatattttaattcattaaaatttgtattcatttcaaataattttacatccttttttgttatcaattaggttttttatttagtaattgacagattgatttgtgtgtcaattat

SEQ ID NO: 236511 - DNA, 741 bp, Cannabis indica
ttttttgaagaaaagcgtgcatatattgatcaagaggagtttagacctcgcggtcattacaaaataaggagttgggcaaagaggaaatagggacagtgccaaacctctgatgggaaaatgtccacttagccacattatgggccataaagttataaagtctactaacataatgaaaattacaaccaatgaaagaggaggaaagtgatttacaaaatgagacatagttatctagctcccaacgggactccttcccattaatagcgttgatcactaccctcgaatcactctccactattagaaactggacaccacgagctttagcctcctctaaggcaaaacagcaggccgccgcttccccgcagagaacattagaaaagtccaacttcaaagtagacacccagatcaccttgccagcgtgatcccttgcaaccaccgcagcgcacatgcactccaaccccattctgatgtcgcaattgagcttcaaccaatcttgcggggggggggactccaagaactcgtaggccgacggatggggcaagggagcaagaaagcatgatgatctgcaaaagagaaacgaatagtgtcaatgcatttaaaaatatccactggacagttattgtgtaccttttcattccgggttcgccatatcgtgtcaataaggagagatgcataaagaaagacctcatgatcattgatgcctttcttcttgagatcccataagaatttaacccagtcccacat

SEQ ID NO: 236512 - DNA, 1133 bp, Cannabis indica
agggggaagatatcccacccaggcaaggccaaagtatatctcacagtggagaatcttaccccaacgaggatggtgccactcaccaccctattgatgagctcaataactagagaactcattataatattaagtgcaataacgacgttcctccctagaatgctcaaacacattctgaccccaaggccaagggattctgtgtttgataggatgggcccccgagtagtagaagatctttggactaacttaaatcgaagaagaaataatcaggacggatacgtctcgacccaaaacaatccaccaagggcacaggataggccaactcatgcctacctgtacggccaacttcctatcaacctaagagaagagttggccggacaaaggacaactagacttgatcctgtagtgcaagcatagttggatgaactcaagagccttgtacaaggcatgtccaccctaaagctttaaaacttggaacttgacagggctcaagtattacctttctctccacgcattaacgcgttacccttaccaaccaagtttaagatgccaactttgaaaatgtatactgggaaagaggatcctttggcccatatcaaatactttgagatcttgatggatctataaagggtgatagatgatgttcgctgcaggatttttccaacaacattgtctaacaccgcacatcaatggtattttaagttgtccctaggaaaatttgattccttggatgctttcactgttgagttttacacttagttctcgtcctccaaacaaataacttcccaattagaggacttggttgaaataaagtaagggtcgggagaacctttgaaagactatatccaaaggttcatgactgaggccataaaggtcaaaggcctgacggaagaaaggtggtatacaaccatactaggagatatcctacccctaagtgcccattagaggacattaggaaaagatcaacaaataatatgcgagaatttttagatcgggctgaaggttttataaaacttgaagaagcagcccgaaaagtgtaaattggcgagcacaaaacaacctctctcagtaacacacctacaacagttggaccagtaatactgcccaacccctaactaacaacagtaatggaagga

SEQ ID NO: 236513 - DNA, 803 bp, Cannabis indica
tttataaactaatttagtactaataagttaattaattattaaaatttgtgataatattaaaaacttcattaacatgaaacgctaacaacagacatcataacgatactaaaaatgtgttatgtggatcctaattgtaaaagctttacaaaatgattatatacaatgacaagtcaaaatgcgaaatcaaaatacacagcagatacaactcagaacaactcttggcaactcggtacacaagccggtagggtcaatatatacattgctagagaagactgccacttcatggctgctctaacttttctttgcctttacttacaccatagagcatccgtgagtcacaaggactcaataagaaaagtaataaaagaaaatacatgaagttaattatccatttcactattataaaatgattaaacaataacattcaagagtggataatataacctgttgaccttgaaaagtgatcaaccgacggtgggtttgtagaaatctgatgcttgccacgtgttacacaaacaagaatgaaaagtaataaacacagagatttattatagaggtttggctccgttgtgatagcgggtaatgacctactctcattttggttgtactgatacttagagatagtactatttagatttctataggtgggatctgatatagctctctataaggatacacaacacaaatcaagtaggcaaatctctaatgagaaagatgaacatccttagaggcgtgtgagagatgaagtaagaagagagagtgagaaagccctattgggcgtgtacgagagagagagagagaga

SEQ ID NO: 236514 - DNA, 1505 bp, Cannabis indica
tgccaaaaaaacaaatgacagaggtctagcaagcattgcaataataaatttacacatatgatgaaacttataagaccttgtacaaacatgagcactttaatcccatggctgacgtgtgtcagaacctctaaatgaactacaattataatggtgaaacagaagaaaaaatggttatacagctgcttctgaaaagcttatattcatccaaaagcgtgtcaaagcacctccaaccttatctattatggatgcattaattcacttaaagatattacgaaaaaatcatagactcctggaactcatgatttgttttaaagacgttagtttcatatatttctaactaaacgaaaatgtcctgtctcattaacaaaatgaataaataatcctacatcctttttgtgagctcaacatgaactgttaaagaaggaaggaagtaataaagtgagcaaccagataagtcacaagatcaaaaaatgggagtatgaagatatgagaggcacaaaaagtcagattaactataaattagaaaccatacattctgtatctataaaggaatatctactcggtatttatcaaaaacaaaatggtcttataaaagaaaaacaaaaaaatacactgcaatggcataacaaaaacttaagaggaagtccaatttcatcaagcaaccttcaactaaaaatttaccagtagcatgcatcttatacagctctgaaagccatacattcagtaagaaagattaatgcttaaattttcaaaccaaccactaaagtggcaataaagcaatgaaaggcattgatagaaaattgaatttctgcattaaaaaaggaaatcatgtcatgcatttggtttggtattccacaaaaatgacatatatgacatatttctaagtgtctactcacatactctggaatctaactattacaaaagcacccaaactagcaacatggctatcgaagaaaaaaaatagataactacaactgatcaaatgactcttctaactccttaaagtgatctgtacattaaggcaaagacttaacaaattaataagagtcggtgttacatgaaaggtatagggactaattagtataaatatgtaaagtcatttcacaaatagagagtcaaaacagaaatgagagaaaattaggagtattcctattggagtttggcaatgactcgatgagtacattggatattgtatttttttttaacctataaaattgtctttattattgaatcgcccaactcatggagtctcaaggtaatacaatatcaaactcactcttcaagtcaactcctaattttcattcattctctatttataaaatgattttacatatttatactaaatagacaatttactaattgatccctataccctttcatttgatgtaagggtcgggctcaatctgtgtgtgcaatatccaaatgaacctagttgccccgacaaacaaatataatacagaaacaatcccaaaacatctaaacaactcaagctaaaatccacattc

SEQ ID NO: 236515 - DNA, 811 bp, Cannabis indica
ggttattcctctaaaaaaaactatactatgttttaatatttaatgtagatattaatgtcaatatagtaattaataaataaaaaaaaaaaagaaaaaggaataagaggtgtcaatgtcaataacaacattgtactctcattcaagttagtattagcacttcttttcaaaaaaaaaaaagttagtattaccagcttatgaatcaccatacatttcagattaacctgaaggcccataacaacttgaagtataatatctccctttataaaaggaaaaaaaagaagaaaacatgaagtatataaatggagttaagagtagattaaccaaaaatgttaacggatatctaaaagtattaagcactacaaaaaataacatactcttatttatgtatttcaaataccaaattctataaattttaatttaataaataatataaaaaactcttaatcaatcataaaacaccatatcaatataatgtgatgctttttaaaataccaaataacaatactcataaattaaatagataggaaatataatcataattttattccaataaaattcaactggattgaatattgtatattttaataacattttttttaaatcaatatattaataacatttataagtacttaatatatataattttcaattgcagaaagaactaagtaaatattactaaaaatataatacgaaattgtaataattttttcattaaaaagcttaaaagctttttcaatttaagtactttgactaaagttaaaaagtgtaaaaaaagcttaaagaagacttgtacactatacaaaaatttttt

SEQ ID NO: 236516 - DNA, 3209 bp, Cannabis indica
taacttttcttgctgagtcattgtgactcacgagtgcttcgtggtgtaggtaagaaagttaaagctatattcgaccatgaatcagaggtctcccagcaatgtatatatcagatgtggtgtcttggcttctgggaagcaggatcaaccctttttctatatttgaaaatgtaaccttacttttgtaataagggttttggtaactagatgtaaaagaattttctaaacaggggatctccatattatgacagtattttgtattaaagtcttattttaatttaatcaaaggtttttaattaaaccacactttttcttaaactaatagattagttaataataagtttgtaaaagcagacacgtggcgtccctgtgagtcagggcattacagaagcagtctgtggtgtaaaggtctagtttagaattagagtatagagctttagctcatgtggctgcagagataatatggctagagtcactatcgagtgaaatcaagttcccctagcttcaacatcattagtatggtgggataacaaaagtgctagtgcactagcatctaatccagtctatcatgctcgaacaaagcatatagaattggatttgcatttcgtgagagacagagtcctacaaaagaagtttgacatcggatatgttccttcctcaaaccaaattgcatactatttaaccaagggtctttcacattcaaggttccaacttctcgttgacaagctcagagtaaaacaattaccatctcgcttgagggtgatgttaagaacgttgttgctcactactccatgcttaattaatcttgtaatgcattagttaaggtctgcttcatctcattgtggtccctagtgcttatcgacaaattttgttatttttctcttttgcttgtggtctgggcgtgtgtgctagtgataagtgtctatcattgtcattgtaaagcctttcctctttgctattcaaagccaatacagcacctcagcataattgagctgagttttttctttttgtgtaaaagtgctctttctttactatgttcccagacgccctgatacttaagctgacgtggagactttgctcaaagaggaattggttaggctagttctttcggaccaacttaacaacctcgtttcttgcagccactgactttaggatcttgatcctaagcctataaatatcaccttgactttattattttgcagacgtgagattaagtacgaaatagatatgagattaagagtttgagagagataaaaattgagaggtgcatagaaaagagagagagattgggtttggattttgtaagaagaatgtattgtagatgaagaagattcttgggagtaagtgtgagagttgaaacaattagtgaggactcaatagagaaacacgtcttaactgtattgtacatattcttgctcaatcaataaagaagaattacagtggtgttccaaaactggagtagagccataaatcacatcgatgtatcagacttgaaccaatatatatcttggttttattttctttatttatgcatttattgtttctggtttcatatactccatttgcacctgttttatttccaattattgttctcgatttgttaatcttgtcattgctaatcgtttaattatttagagtttcattgattttattccgcatatttagttgtaattttcccacaaattagatctcggtaatcaatcaagaacgaaaaatcaagattctttctgctacaattcttgaagaaacttgaatatcatcaatggcgagattcgaattggataagtttgatggaactggggactttgcgctatagagagaaagtctaaaaggaatatcaatgcacctgaaagtctccaaggttcttggagatgagaacttggtagaaaagaaactagagaaaaaagaagaaatagaggagatggcatattacacgatcatcatgtatctatcaaatagtgttcaaaggaaactcatttcagagaagacatcaaaaggagtttggaataaactagaagaattatacttgaaaccatcaattgctagcaagattaatttgctagaaaggttatatagttttagaatgatttcttccctttctttagatgagaatattgatagatttaatgagattattgtaagtttggctaacataaataacaaggttgatgaagaaagccaagccatcatccaagaaagaagaagtgtatttggcaagaggaagatcaagtatggcagagatgtcattgctttggaagatgttcttgccgcacttaagtcagaatattttgaattataatttgagaaacaatccaagaaagaagaagtgtatatggcataaggaagatcacccaagaaagtgagttgaaaaagtaaacaccatcactctcattcaagatctaagtccagagagaaggacatgaggaaatgatacttctgtggaaagtctggacacttgcaaagattttgcaggaagtatatggaacaaaaaggctttagcaaatctcacaatggagataggaaggacttttggcgccatcaccacgggaaagactctgctacagtcgtaaaagatagtgatgactgttccaaggatggagagttattctctatctcagagtctttaatgaacagggaatggattctcgattctagatgcacttatcacagatgtcctaatcaagagttattttttgattataagtcagttaatattggaggtaaagttctaatgagaaatgatcattcttgtagtgtcattggaaccgagaaggtggccatcaaacagtatgatggcataatcaaggtgctgacaaacttaaggcacctcccaaaccttagacgatatctcatatccctaggtgcgcttgaggatgaaggatatggatacaattccatgcacaaaagcttgaggatcaccaaaggttctttggtaatgatgaaaggtaaaaacaacaatggtttatatgttctctaaggagttcctgccccagatggtgaggtaagtatggtgaaaggactagaatcagaggtgaaattttggcaccgcgcacagacttggacatatcagtgaacaaagactcaaagaattgcacaaataaggtatcattgaaaatttaaactcttgcgccttaccattttgtgaagcttgtgttttagggaaacaacataagataaagctcactctggcaaggcacacagggataaaaagg

SEQ ID NO: 236517 - DNA, 747 bp, Cannabis indica
attgacttgacacttaatggacaaatacctacaaaaattctagaaatataatttaagtatttaatagcaaccagaacaaaagttaaatttaggtatctatgctggaaataactcttttaattctttataaacttttggtaatcatattatatttttatataaatatagtattgttatcaatatctttataatttttatttttaaggctgcttttattggcttttatgttttttttttctatcattatcccttttctaattacatattgttagaaaggtagtattatttcttaaaaaaaaaaacctcatcccttttgtaattacatgttcttagaaaactaacaatgatattcatgcaactatacaataaaagtagtgaaaagtagaataatttgtattttctcttcctaaattatttttttaacactctcaaattgtctcttaaaagatacttttttgttaataattcattcgaaaatataacaattacattagaagtgggtaatatttaaatcaatctaattatattaaaccagtctagactctaatccaattacaaaaaattgaatatctaattataatttaatttaattgaatgtaaattacaaaataaataaataaataaataagatttaccgaaatatcagtggggaagaaacttatgaagctagtaaacaaatgaaaaatatttataagtatcaatacataagagaaatatttcaaaaaaagaaaaatatataaatataaa

SEQ ID NO: 236518 - DNA, 1223 bp, Cannabis indica
cataaaacccaacaggtgtcaggtggtctccagttgtagaggtgtggtcctcggttgcaggagtgtggttgcagtgtacccttagttgggtcctcagaccttgcagatgcattgtctccgctacatgtacctccttattgtcagagtttacaagtggcatggtggtacgtgttgcatgccttgtcctttgattccccgttcaacgacattctcatcagcatgcacttgaatgagcttcatcttacattcatgacacatgcatgttgcgctactcacccgttacaacacaactcatgcttgtgcataccactgctcgcaagcgagcccccggggcccccaacacatgcacattcacgcatgcactcaacaccacgtctcgcatgcaagcccctcgaggcccatagcacgcacacactcgcacacctcacaacacgcacacactcgcacacatgctcacatacaaaccctccatgggctcgcatgcaagccccttgtctcgcacccatgcaatcgcacacacacatgcatgcacacactcacatgcacaagcgacttcaccttcttgcgtcctcgctttcggcgttctcccgttcatgaatcaccacgagattagtcattgaatcgcatggatacatcccgagaatcgcgagagtcgtcgacaaatttatgagatacatgtcgagtaggtacattcgttgaatgcacttttgttcgtctcttggtgattagttaactaacctcaaaagttagctggactaattttcgaggctaacaaatgtctttcaaaatgttatgatgtgatgttgatgtgtgtttctgtcaatgaccctaaaccaattggttgctcaaagttggcttaactaatatgagttcaaactaggttaaaacattccaaatggattagatagttatccttcttagatgtttcttcatttttgcccaaggtagagaagaagaacaacgaagagggagagaagaaaaagaaagaaaaatgaaaaaagaaataaaagaaaagaaaaatatattttaatttttaaagtttagtaattaaattattttttatttaatttatttaattttcttaattatttttatattttaaattattaatattagatggactaatgaaaatttattatgtatacatttgtatacacaatgacagtccgccttaacactttatatagcaaagtagatgacaaagtggagaccaaaacagaaca

SEQ ID NO: 236519 - DNA, 637 bp, Cannabis indica
aattggcaatgagaggagtaacctatgcatcttatacatggtatttagtttcaatacattattaatgtgagattttctaacattcccctcaagatggtgaatatattttgctcaccaatcttgcaagactcgatcacaagtaactcttttggctcacactagtattttttggcttactattcccgaatcataagcagctctttatggctcatctttttagactagtttttggatttggatcagatactcgttatagtttagtctagctttgataccatgctagaatacgaaactgtatggttgagaaagtacgattaggtgagtatataatcaggtacatgcatcagtatttatctcaaaaccaattaataataaaatgaattatttatacatgttatttatggtatttaatttaaacaatgtgtgcttttctaacacctataacatataggggtatttacataaatataggaaaaatagagctagtttagataaatatgataatgaaacttaataggaaaaaagtatgatatttaaaataaaattttcacatatatgggattgaattacataaaaaatatttaaatttccttcatattttttttttaaaaaattaaaacaaatgaaactacagtga

SEQ ID NO: 236520 - DNA, 1001 bp, Cannabis indica
tttttcttagtgacaataatttttttattattttttttattttattttgagagtgtgtataatgctagataaataatttaattattggagataatttaatatttaattatttataaatattattataggtatattaataataataatatgggtaaatatattatagcatattacttaatttattattagtagaagtagtattattattatcagtattatattagtatatacggtacatgttatatatgtatatatatttttaaaattttaagttattgatttagggttatattagggttaggactatatataagatgcttatatgatcgtttagggtttagaaacggtggtgagatgctgagagagagaggttgtgggtcgaacgaaaccgagtggtgagaaattgagattttgggtttgttgagtttgagagtttctgggctgctgtagattaattctttgagttttatttcatccaagaggaattttagatgtgattagaaggtctgtaatcgcacctttcgacatatatataccattgtttacattcgaaaataccgttcttaaagtgaattcggattcgaacgtatttaagttgttttggggatcaaaggaggctgtatttgaatttttgggaccctaaggctaggcttggacgtaaaagaatggagctttaacgtctaaaacacataaccaatattttgacaccatcaacggcggtgcactggagctaaagaagacaactctttttagacgtgctttagttgtttctttggacgagattggattgggtttagtttccgagcattgtgggggaccattcctaatttaaaggaggcgtcgaaagcaagaaaacgggagttttggaactcgccgttgccggagaagacgacccaccggaaaaactccggcaaagctccgttcaggggtttttaaaggttttatttcagattttttttatacttgacttttttaggtatttttaggtctactatgaagtt

SEQ ID NO: 236521 - DNA, 857 bp, Cannabis indica
agagctccctactgtgaggttgcccttgctctggaataaattttggaacagtaaagtgttggagcaccataagattatgtggtggtgtattctctccagtgccctccctgtcaggtctgtgatcaggaaaatatttcatattgaggatgcgagttgccctttgtgcgggagggaggatgaatctttagaacacctttttcttatttgtgatgtgtttccatgcctacggtcatctccttagggtatttatcctatctgtaacaccggaatccgtatgtgggactaggtttcatttgggaccttaaacacaaggggattgttgcggaggaggttttcctatatgcatctgttgtggttgataccatctggcgcactgaaaatgacaaggtacataataactatattgttgatgtgaaaaagtgtattgactatatttgttcttcctatgcagatttatatgctacaattttcccttcccctagcccttgttcgaaggtgagctagtctcctctacttcaggattggatcaagctaaattgcgatgttaaagtagggcttgatagcatgtgcgcagcagttgttgtcaaaaaccatcttggtaggatggtttgggttcagacgtcccgtgttgacttttctgatgctctttgtggagaagcggaggcctgctgtttggccatttcgactgctaaggatattggtgccaagtttgtaattgtggagagtgactcgagggtagttatcaatgcacttaatggggagtctcactgggttattggaaactatatctcattttgtaatagttactctcatttgttttctagttgtattttctcttatattagcagggactgtaa

SEQ ID NO: 236522 - DNA, 909 bp, Cannabis indica
taaaataatttccaacaaattatattctagcttttaaagatccatggctgcctaggccctattcatttctaccaacaaaggttactaactcaatctcaactatgattgttaaagattttattctagataatagagaaggttggaattggcctatggtgcaatcttatttcaatgtggcagatcaagaatgtatttggtctattccaataagtaaatttgctaagacaaacagttggttatggcactacaccaccgatggtgattattcagttaaaagtagatatcatttagctacatctcttgcaactgatactccgtcatcatcaggtacaacccttatggattggtggaagaaattttgaaaactacatttacaatcaaagattttgcactttgcatggaggggatttcatgaagcatcacctacttacgtaggtttgtacaagagacatgtgacttcagacccatattgccctttatgtgggcatattgaagactcaaatggtcatgcaatattctggtgtgaaggagtttaaaaagtttggcaatcattggactttgagtttttgaagacaacttcttttaatatttcattccaacaagtgattctgaaagcatcagatatgctttcacaacaagattttgaattttttttttagcttggatgatatggggggaacgaaataaagtaactcatgatcaggaatttaaatcgttgagtattattgtggttcgaataaatgaactatttaaggaacacattcaaggatggcttaaaaatgcagtttctaatactaccagatgcacttctactgctagttgggttcttccttcaaaaggaaaatttaaattgaatgctgatgcaaccattgataaaaactcaacaactattggtattggagcaatatt

SEQ ID NO: 236523 - DNA, 639 bp, Cannabis indica
atcggagccgaggaagcggtggcaccgttgacgcctgcagctgcagagatttgagagagagagggtcaagcgagaaaacctagagagagagtgtttttatttagtttttcattccttttttatatagaaaattagggtatgttgaaaaatacaacttttattaattaaatttacctctaattttataaacattgtctaccttcaactttgtctattgtattacattttatttgaatgattaatataacagtattttttcctatcaaacattttttaagtatttttttaattaatgtataatacacttgttaacatgatgtctacgtccagtttcgtccggttctttcgtccggtaggatatcggtgggcgtccactccatttcttgtgtccggtgatggttctttcttcttctataactgtaggaatttttattcctagattgcccctacacactgcaatagattaatcaaaagcccaagtcaaattcgaccttttaccatcaaagaccctatgttgactcctaatattaaagcaacaaaaacgacagcccctttcccattactacaggtcgtttatatcactcaagcaaaccttaaaaaacagtcgacatatatattcatcttttcattcaaacacac

SEQ ID NO: 236524 - DNA, 959 bp, Cannabis indica
ctagggaggaagacttagttgatagtattgcactatcaaattggagtaactgttgtggatcaaacagagataattgctatggatcaatcaggtacacatacctaattattatatattactattgtgttctatgttatatacaaatagatcttgggtatattattaattttctaacaaaagatacttgcattcttgcaatataaggaataggcaaaaattttccaaaatattgagtaaataaaatttctatcagagagaatattaaagctctcacataataatgtgtaaaaatataataaaatataaaagattcataatttactcctttttattaccaatttttaagataaaatctcatacattttataatttaacactcaaaagtctctctttaatgtgcaaattagtagaaatcactaaaataagacttagtacgtcgtaagattgtcctttaagcggattttttcatcatgctgtatataattacatagctaattaataatatctatatatatacacataaaaaaatgtattatcaactttataaaatgtatatttaattacactaatagcgataaaatattgttatgaggtattcatagtatctagcatcatgatagagtgttattctataattatttagcaattttttataatatttattaaagtaaaataagtgagatctaatatcaaattgcaccaatagcaatatgattaaaaaaaaaatactaaatggcactagtggtactagcaccctcttacatattaatattgttatttgtctaatttagtatcgggtctaatataatttattgtattaacttttaaagaatatcgctaatcaataacaaagcgatatgtgtagaaaataataggcgcactactatacttaataagaagctctacaacaaatacgtctcttttaacaattctctctatatgaatataattacaaaata

SEQ ID NO: 236525 - DNA, 1876 bp, Cannabis indica
tgttctatgttatatacaaatagatcttgggttaattgttaatttatctaacatttatatcattaaatagagccaatttaagtgtatacttccgcattctttccccttaagaacccgaccacttgagaagaagtgaccttcaacaaaaactcaatggaagcagaaacaacaggtccaaccaccaactccacagccatggtgctcttagttttcgatttgcagaaagctaatgagcaatgacaatattgagatttagagaaactaccaaagtaagaaaataagattcttattgttgaaatttcaatgtaaaagagaaaataactgcaagacatgtgccactgccttggatagaatcttatatattaaaatatatatatgtatatatgtattcctaaatttgcacagatgaaagagattttaagcctttaaataaggagttgaaagactcgaggttttggcaactttctgtgcattgggaaaggaaggaaacaatctaagattgagtggtgcaatatgaaaattctaaacattggcagaagcaaataatcagattttggagacaactgcttgaactccaacaagcttagtgtagtagttaagtgctgctgtattcatggttggcattatttgaattgatgaagcaagctttttggaaaagcttgagtgagcataaatccatccaatccaatgaccacagaccgatctaattacaactgaccgtcaaacattggatgtccaattgtgatgggttcaaattgaatgttatttttaaatatccaattggatcggattagatgttggatgacttatccaaaaatccaatatatccaacattcaatcgaacatattaatattttcaatttgcttaaatgagtaattagattttatgttgttgtacttaataaaatatatgtatatataaaacttcaacattagaattttatttggattgaataaatactggatctaatatattggatggatttgatctgatccgatccaaaaaatactaggtgtaaaatattggataaatccaaattataccaatagatatacatgaaatacatccaatggttaaaaccaatccaatctaacatccaacagatattggatcgattagatgactgaaaataattagatcagatgagacagtaaaatttaacattcaatatataattaaatcatatctgaataggtcgaaaaatattagatgtggtccaatgaacaccccttttatcccccataatatgtgatgctgaactcttccaaagttgtgtttgaaaataacatgtcaagtaaatctctttcatgttctgttacattagttttttcaccccatctcaagtccatcataagctttcactagtctataaactgaaaatctgaaagctctcccaactctccattttggctctacaattgtttcccaccataaatgcaatcaagttcttaaggcttttcagattacacatttgcatcaagacctcaatgactgtaaaatgtaagagaggtccaaatagctaagatgcctcaattgagcaattgatttaagcagctgcttgacaatttcataacccaagtcaactggttagttaaggggaggggtatgagtgttactaaggtgtatgtaattatgtgatacacagtagagaattaggatttttggctcccaaatttgatatgtaccacatcatgcctcctgaacttttaaggtcgtgaaaaatcttctttgaactattaagattgttgaatttagaactaaagcccaattttagtaaagaaagtctaaatggatgaaagttcaggaaacataatttggtacatatcaaagtttgaggagtatgatttagtagatatcaaaatttcgggagcatga

SEQ ID NO: 236526 - DNA, 1801 bp, Cannabis indica
agtggtgaggagcacagttcacaagaagttagatatattccttgttcaccagctcctgcaattgatccattaccaacctcagttcttgatcctgagcctacaacagtttctactatcaatcaaggacagattgcttccaatattgatgctgtctcagtacctcaaacctctgttgtgccgacatctgcaccagaatcttcatctgtcactaccactgttaattctcacaggatgcaaagtcgtgccaagaatggaattaaaaagcctgaagcctacattgtcactgaaattctcactactctcaagcaggccctacaacaactacattggaataaagccatggcaaatgaggttcttgcattgaaaagaaacaagacttacacccttgtcaagcttccacctagaaggactgcaattggttgcaaatgggtgtataggaaaaaggaaaatcttgatgggagtgtccacaagctgaaagcaagacttgttgccaaagggtttcatcaacaacctggttttgactacacgaaaacttttagtcctgttgtcgaaccagtaacaattagacttgttcttacccttgctctcaccaaagaatggacaataaagcaactagatgtcaataatacttttctaaatgatgattcgtaagaaaaggtgtatatggtgcaaccccctggttttgaagaccctgcctctccagatcttgtgtgcaaacttcagaaagctttatattgactcaaacaggctcctcgacccttgtttgagaaactccatcactgcatgttgtccctgggatttgcttcttccaagtctgatcacagtctctttataagacatacacctctatcaatgacagtcattcttgtatatgttgatgacataatcatcacaggcagaagctaatagctcattacagaggagctcttgatgctaagtttcctcttaaagatttgggagattttgaatttttttcttggcatcgaagtgacttctacatcaggtggccttcacctatctcaagcaaaatacatcagggatcttctacacagggctgaaatggatgcagccaagccctccaatacaccaatggtcagtggtctcaagttatctgcttatggcagcccacctgttgccaatcgtcacttgtacaggtccattgttggtgcccagcggtacctggttattaccatacctgaaatatcgtttagtgtaaacaaggtttgccaattcatggctaaccccttggaatctcattagcatgatgtcaagcgaatattaagatacctcactggcacaattgaatacggcattcatctaagaaaatcagatcatcttgacctcactgccttttgcgatgtcgattgggctaccgatcctgatgatagatgatcaacctctggctttgtaatattttttggctgcaatatcatagccttgcagtgcaaaaaggaacacacaatgtgcaggagcagtactgaagttgaatttcgcagcttagcacagactgtcactgaaattagctggcttcactccctgtttacgaaattgcacattcacttgtctcgacctcctactatatggtgtgacaacctcagcacagtgcttcttactgccaatccagttctacatgctcacaccaagcacatcgaacttgatctttattttgtccgagagaagaatatgcagcatttggttcaagtcaagcatgtactagccattgaccaaattgctgatggcctcaccaaacctatatctagccaattattcttctcatttcgacacaaacttacaattggtg

SEQ ID NO: 236527 - DNA, 680 bp, Cannabis indica
caaaatagacgtagctccattactatcaagtcacggagagtgaacaactatgtctattatatgtctttacttatattacttatctcttatctggctaatctagcaaaaaaacagtattagctaagtttttgcatcaattttatctcgttatataaaaagaaatataaaaaagagatttttatttattattttgaaagagaaattgcatcattaactacggtagtagtgtgatatacagctgccgttgtggcagctatgaccttttccatttttcctttctcttgttgtttgaaaatcgttgcaaataaaaagcaactcttatttatacattacaaaataaagtttttgaattggatatcacctcaacattttatttttgctcctaagatatccttagttttgtaacacgggttacttatgaaagttcaacttgtcgagtttcattttgtatgtgatgtgggactaataatataaatattcacttttagtggttaacatcttttgccctctaataatgagctcataagtcataagttacaagagtcttctcggttagagagaattagatgaacggagagatgataaaggatggagaatgtaagagaggaaaaggagattaatgatcttttttatattgtttggtaagaatgatggagtgattgaaggatagataatattaa

SEQ ID NO: 236528 - DNA, 1693 bp, Cannabis indica
gataaatttaccgtttcacccctcaatgtattttatccttaaaacacttaactttctataaatgatatttcagtgagctaatataatgactgaaacaagagctcttccatttatctctattaagccaagctcaaaggaaatcatcgtttcacttctatgtccaaattgaagctatagattccatatctatgtctagcgctcccacccaattatactatcatgtttccaaaatgtacttattactctgaccaaaaagtacgcttaattaacaaatcaaaaaacatgaataacactcctgagattgaacctaagcttgtcaggattaagatcttttgatctaacaatctccaacagtctacaagttaaaaatttaaattgttattttcagacttgtacatctcatgtgcattctcaataatttggtcatcagaccaaccactgtgatgtgcttgttgtactcgcttgtaacacccattgaaacgtgtcaccttttgattcatcttgttccaatggtctttgcattgctttccagttctttgttgatcatctttgtagtaggtgttgaagtaatttgcgatccgacccaaaaatttacaaaggtttggtcagttcccacgacaacatccttagatgtattaagccatgcacttatcagaagtatatttgcttccttgctccatttaagtttatttttttggcttggttcctcttcactatgtagaaccacttttgctaacccttcaacaccatgtgttgaatgagtttcagagacggattgtgttgacgattcaacattcaaatcaatactttgcttattaatgcttgaaaccatttcaggttggtttggaaaaggtgagggaaacacctgtgggagtaaatttctttgtgtgaagattggactatgttggggagtctcaaaagagctaaaattttggtaagggaaagaggagattggataatttgggttgaattgagaatatttgaaattagaattttgggggttgttaaatggaggattatggttaaattgagaaaatggaaaatttggattttgagagttggtatatggaaaattttggttgattggaaaatattgcaaatttgaattttgtgggttggtttgtggagaattttgataattttggttggattgagaagattgaatgattgaattttgggtgttggtatgtggagaattttgagaatccatttatgaatataagataatgtagaaaagtggtttggaaaatgatatgaaataaaaaaaaaaataaagaaaatttgtgataataaattttaaaagaaattgtaaaaatggtgtagaagaagagtgaaaaataatgagtatttatagaggataaaatagttgattttttttattattaattaaattatttgagtgtgttaaaattgttaccgtacatttataattgatttgaccttcatttattatttcctttaatttaaaaaaaaattaaataagacagtaatgaccgttgctcctgcacaacagctggagtggtcaatttgaattcatccaatgcaatattactgagcatagtaactaagctactgacaaaagtaacttgggctactcctcatctatgagcgttggagatgctcttaaaataataataatttatttttttaatattctatacacatcattttgtactactttttacttaaaaaa

SEQ ID NO: 236529 - DNA, 2125 bp, Cannabis indica
gagatgagaatatatactaagcactaatgcatatatatgtgatgtatatatatatatatatatatatagaagattttgaaagaaaatttatgtggatatggtgtaactgaaaaagaaaaagtagacaaatgaatcaagtgaatatcatgtgtgaaagattaaagaattagtattatagatattttaaattttctacactttttatttgtgtggaatacttaatattcctcaagatgatggttaatttgctcacaaactattggattattagtgactttatatatattatatatagtatgtttagttttgaattttaggttactttgcaccatgcaattcacataatgagatcactatttgtaaagttaggatagaattgaataattaatcctaactatacaatttcaacaaaaaaaaaagtgaaagtgatggtcccacttaaaattatacatgacttattttttttatttttttttttcttttgggtaaggatatatggctaaaattaaatacacatcttgagtgtaaaaaatgtataaaatttacttacaaaagaaagaatgtatacgatttgagtgtctaataaatgtgttgtgtagcctataatatataatatttctactatttcttagtagctaaattgctctacaatattatatctggatatatatttaaataaccacatttattatatatagaccatataaattttttgtcactatgattttcagtcacaacaaaaagttatttgtgattaaaacataacacatagatacaagtttgtcactaatttagttttattcacagcaaacattgtgactaaaaatacattcagtcataacaaattgtaatttttgtaactaatacttttaatcacgtactttttagtcacaatataagaataataatttataattagttaattttttttatttttaatcacaaattttattgcgactaaaaatataaattttgtagtacatgtgcaaattgctactattgccaacttcattttattcactaggtggcgtttggttggaggtaatgaaatagaatagaaaaggaaggaaacaattttcattccattcttttgtttgattgcatattaaagtgttggaatgtcattccaatggaatggcttttccatcattttagtagaatgactattccattttgaaatgaaaggaaaaaccattctaatgcatagtgggaaaaaattcaataattttttttatcaatttttttatacattttaaatttgattgtattccattcctaatcctattccaattctcattttcattttctatgttttcattcctattccacagcacgaaatatacgattataacatatgttaattgttcactggtctccgataattattagattatatcatatatacgtacgtgtataaatttcgtatctatattagttttgtctctaataatagtaatacagagatgacgttaatatgaagtactcttaatcgatcatcacgagaaattaaattaacctttcatgtgatcaacgagagagagttttatgaagtgtagaacaatcttgtatgtatgatcacagggatcatggcaaaagaaaaatgaaaagtggttctttaatttatctttcattctttaattttgcatctgcaaaagagaaaataaaataaaaaagcaaacggatatgtattatggaatggtactacacacctttaagaaaaagtgagtgcaaatcacttgtatatatactttcgaaatccttttttaagtaaagattaaagctaaaagaaaattctagctagcctttaattaaaatatataaataaacaaccttaattattagaatgatttggactgggctccacttgttagaacacagttatatcatgctattgattaatatgagaaaagaatacttgtataccttgttaagaaacgtattgaaaatggaaaatgtaatctctctaaccatacctaaccctaaaccacatgaaaatggagagaaaagcactccaacaccttttctgctatatcctttaaaattaatatctcattaaaactttactttttttattttacctcacatatttacactacaaaaactgttacttttaatgataattttt

SEQ ID NO: 236530 - DNA, 1139 bp, Cannabis indica
gataacatggggttgacgggaacaaagagagtgaattgtgttgccttcatgttagaagatcatgcacgcgtctagtgggatatagtggggcagactcgagacgttagtgtgatgacttgggatgagttcaagagtttgtttgaggaaaaattctataacatcgccgtgagaacgtctcatatggaagacttgtgaaactgactcaaggaaaaatatctattgtcgaataccctctggaatttgatctattatctaaatttgctggtgatctggtgtctacagatttcaccaggaaacaaaaatatatgagaggattgaatgccacaatcagtcaggacttgaagattaccacttctcatgacactttgtacaagaaagtggttgaactagccttaattgctgaggagattgaggaacgtgtaattaaagagcagactgtaaaggatgccgccgtggcatcaaatcctcctactagtggtaatgttagtaagggaaccgacggtggtaaccctgataacaaacaaaaggctgatgctttcgaaaaatcaagggcaccagaaagttttggggaaacagaggtggccgtcagggctgcagatcttcattccgatcataccctgagtgttcgaaatgcaagaaacaccatcagggtgaatgccaggccaagacttgtttccagtgtggcatggtgggccactttattcgagattgtcctcaggccaagatagaggagctaaaaaagaatactaatcagaacctgggatgactttttaccattactcatgctaatgcggatgctagtccgtcagtggtgacaagtcagttatctataaatagttgttcttacactgtgttgtttgattcgggagctactcactcctacgtgtcgagtagagtaattgacagttttcataaaccatgtgatgtgtatgctttgaggtttggtaccctgttacctattgggattttatgccctaaataaaacccatttcaatctaatctgattcgctatcaatataagattagaaatcatttatgtttacatgtagttttcatgtttatggtttaatatatacaaaatcttttaagtccataacatatagttgttcataattacagtgatgtcaaacacagtagaa

SEQ ID NO: 236531 - DNA, 731 bp, Cannabis indica
aataaaatgtgtcttctcatgtgcaggtgtatggggagtcgagccgtgagttggatcatctggatcactaaggagttggccagccatagcctctgtagactgatcagcaacctcctccataggttggcttgccatagcctcatcaagatagcctaacgacgactccttaggctggatgaatgtttggccaacccaacatgtctacatctttctcttgtagagttcagtcccttgagcaagtgttctttcaatgaaagaagatcccatgtaagaaaggtcgaccttgggattacgcagataaaccttgtacaagaccttagaggacaagctaacatactcatccatgatgtcttattggccatcaagagcaagttgcaatgcttggtccttcttcacaagctccacctccaacttagaggcctcagcagcaaggatggtattttcttagttcctgataccaagcaagtgctccaaaccattgatcaagtcctaagacttttgtagatcagtcactgtctggttatgggcatccctctccgcataaagctcggtctccttggccttcggcttctcttgatgagaacccgaggagcccttagatctaccatgggtaaggctaaactttaacatggcctgaaatcaaaagaaaaaatcgagttagtgacaggagaagacctgggcagccagcccctaaatggtgcacttcttgccagccagcttctcagtaatac

SEQ ID NO: 236532 - DNA, 1290 bp, Cannabis indica
cacatggttgaaaaaaaaccattgcccatcaattattcgcctttttcaatccttgaggaagaattgaatttgtgtcttcatcatcgagaactcatcccagcaagcttggaacacaactcaagcttatgtcgaggaatcacctttgttagcatatctgttgcattcttgtctctatgaattttctgcacttggaatagcttttttttcaagtgcatcacgtgtccaatgatatctaacatcaatgtgtttcattctatagtggtaagtagcattcttcctcaggtcaatcgcactttgactgtcgcaatgaatcacgtacctttcttgcttcaaacccaattcttggagaaaattccttatccataacatttctttcccaggttctgcaagagcaatatactctgctattgtggtagataaagcagcacatttttgcaacttggattgccatgacacagctccccatgcaaaagtaaacatatatctagatgtagactttctaccgtcaagatcaccagccatatcagcatctgcatacccttccaagatcggttctcctttcccgaagcttaggcacatttttaatgtccctctcagatatctgaagatccattttacagcttcccaatgctgcttgcccggatttgcaaggaaacgacttacgactcccactgcatgagcaatatccggtctcgtacaaaccattgcatacatcaagcttccaactgctgaagagtaaggaatagccaacatcttcctcttttcttcttccgaagaaggacatgacttcttagtgagtctgaactggccaccaagtggcgaagaaactgactttgcatccttcatgttgaacctctcaagtattcgttcaacatagttctcctgtgacaaccataatcttcgagaaggtctgtcacgaatgatttccattcctaggatttgtttggctacccccaagtctttcatatcgaagactcctgatagttctttcttcagctgatttatcatcttaccatcctgaccgactattaacatgtcatcgacatatagtaataagatgacaaatttctcattaggaaatttcttgatgtagacacacaaatctgcagctaatctcttatagcttcgatccaccatgaatgaatcaaacttcttgtaccactgtcgtggagcctgttttagaccatacaaactcttacgcagtctacagacaagatcctcttttcctttcacctcaaaaccttcaggctgctgcatataaatttcttcttctaaatctccatgaagaaa

SEQ ID NO: 236533 - DNA, 589 bp, Cannabis indica
ttatctatttatttttttttattattattctgattctagttaaagattaaaaaacataagaattcttattttcacatctaaattctaaaggtgggtcaaaatacactaaaagctttaagatattgagctaattaaaatatttgcattatatcacttaaaaaaatcattagattagttttgctttctaactacgtattaaactaggctctaagagaaaagtacataattaatataggtataagtaatactactagagagaaagatgaccacttccttatcaattggtcattgtatgaagcaaacgattgcggatcaagttaaatgaaataaacttcttcatagtggttgaagaatgattctttgtttcattattaaatatatataacaaccaagactacattttcccaagtattactcaggtcttcgataagaaaagatggagtagattcaggttagaaaataactctataaacagacttagtttcatgctagcttatatatatatatcacaaaaactcacttataactacaaaataatatttagaataccttagccacttaaccaaaaatgaagagtgctcatttcctt

SEQ ID NO: 236534 - DNA, 970 bp, Cannabis indica
gactccgaccagacttggacccaaatcccccaaggccctggcactaaactcggcatctgacccaacccgaatccgactccagacctagacccgatataaataaaatcaaaaaataaattttataaaatacacttttattttttatttttaagatcaaaaaataaaaatagttatatagcgcatttttatttttcaaaaataaaaattttactttatcttgtgattaaaaaattaaaaaatagaaatattacaaccacaccaaaataatctttatatttgtatatttgttccaagctacgtaccaaaatatatgtgtgatataataaagtgaagatagattttttttttttttttgtagataaagtgaagatagatttagtaagtgtaaaagagtaatatgatcatttaattccaagttctgaaatcacgtttatgtcagaacccatattcaattgccatctatacattttacttcataaatgttataataatattatatgtatattttgtataaatgacacaccacgtgaatgccctcattttcttcctatcaagatgataacaaagattcaaatgaataaaattgataccaaagagagaaaaatataaattcaaagtttttttttttaaatagtaactaattacatgccaatagaacaaataaaagaaatttattaacccgctatgatttttaaatagaaagttttttaaaattcatttttatcattttttttggctgagcatacaaatatgttttgttttttttgacaaaaaaaaaaaaaaaattaatagaagaaaactaaaaagaaaaattaaaaataatagaaagaatagcttatgggtaaccgaattacatccttaaggtaaccagttaccttatttcttctattttcctaattattttttaaaaaatttacttaatgatatatattaggtaataaaaaataagatcacagatttttccttcact

SEQ ID NO: 236535 - DNA, 550 bp, Cannabis indica
tttctgtttgacacgttgagagaaaaattagttttcttgcactaacgatcgttttaatcgaaatagttaaaatctcacatttctgatagtggtacccctttgtgaaacgtggcccagacccatctcggaatttgtttggcactagtcacaatgaattcaaactactaattttgacttgagtctaaaattgctcttctaattatgactcattttacaagtttgtatccacttttgatccatttgttcttgctatgacaagataaatctcataagtgtaactctgatagttcactttctcatctcataaaatgatataaaaactactaatgaaaaaataattccaaaactccattcaaaaaatgatgagtacttttttttccatcattatcactattattttaatcatatacactaaatatgattagttacacatatattattatataccaataatatatatacctctcatgcataaaattataactcctaaattttatgctaatgtttatattatgtatgttacttttatctcatatataacatacacata

SEQ ID NO: 236536 - DNA, 1053 bp, Cannabis indica
cgccttctcattttcagttgaaaattgatgtcggagttgataacccatcattggaagcttgtgtatgaattagaagcttgcgtgtgagggtatgttactttaaatgttattgtttgatttatttatttattaagttatgagcatatttttgcatattagtggagatacgcatctctgtaaaaattaaaataataacctaattaatttgtttttcaatttttgggatataaggattgatattattagttcattaccttatcgtcttttgtcaatctttcattttaataatacaaaattatcggggacacaaggactaagaatttattaattgttgctacacaagacttttcttagtgcatagagcagtaacaatttattaatttctgggacatacttttcttaatatagggagaaagtcccacattgacttggtacaagtctacattgtagggactgaaatttgggtggggggtaattgctggagaatgaaccccttgtccctgtctatattcttctctaatggaagcaggatagggaatcctggctggaaaatcagatgggaacctgtatatggtaattattgtcattatttttatataaaagaaatttgtgagtgaaatggagaggtattggtttacagttagtattgttgtgtaactctgttgtagctttaataattaataatatatttatatagtatataatgtaattagcaaaatgaaaatataaaataaaaaaatatgagtgcaaatttatatgttggtgcatgatgaaaggtgtcaatataagttctctatacgcttatgcgcaatattattggcacatattatgtttgttgtagcctatgtcgtgccaataaggttcaattgtaatgttaattaggatttttgttgcctgaattttaatatgtaccaaatcatgcttcttgaattttttaggttgttaaaaattctccctgaactattgaaattgttggatttaacgacttttgcccaattttattagtgaagtttgacgtggatgaaagttatgggaacatgattttgtacttgt

SEQ ID NO: 236537 - DNA, 722 bp, Cannabis indica
tgcttttttggaatgggaataataagggttgagtttatggtaggaaagtctgtaccattattaatacaatcaagggctacattaacaagatctatgcctaggactaacagatttttttgatagaaataagcattcagaccatcaataccagtagctttgtcaccaaacaattggaaaagggctctcttaacttcatcaacactaaaaggctgtcgtagcattatagaatcatgatcattaagaggagatcctaaatgctctaaaatttgagcagtcgagccaacatcacagccttgagattgaaaaagattgataaaataggtagagacaacaccacaaattctttcaaaattattgacaatattttcattatcttccttgagaaattttatggtattaatctttttcctatgagaggcaaaatgatgaaagaacttagtgttcttgtcacaaactttgagccaagttaccctagcacgctggcaccaataaacctcctctttatataaaaaagcatccaattgagattggaggctttttatttgaccactaatggtggtgtctatggatgaagatttaggaggtcagtgatagctttattaagagcatttatgttggttttaaaatgattattagccgaagtattccaggaggtaagagaagaaacacgagcctattgtttgtccaaaaaattagataaagccccattattggtattgaaa

SEQ ID NO: 236538 - DNA, 885 bp, Cannabis indica
acctatgcgcatcaattgcaagactattgggtttcatacaagttagagaggtactcaaatgcacattgttccaccaacttcaccttatgctcccatgacctccgagagtgttggttcttttccactagcttcccaatgaagagggtgcctaccttccattaagctttaaaatcccaggtaaatattttcattgttgtctttccttctaacaaaatcttttctagtttaagtgctaattgggcttttatagtgaagagggtgcctaccttcccagtgaagagtgttggttcttttccactagcttcctagtgaagagggtgcctaccttccatttaagctttaaaatcctaggtaaatattttcattgttgtctttccttctttcaattttttttctagtttaagtgctaattgggcttttataattcttatttctagaagggcctgtacctcggagtcccaaagccaaggaaataaagaaaaaggcagcccaatacaagcccttcaccaaaacagagttgagagttgaaggcttggtcaccatgaagttcctacgtgaacacgagctaatcaccgatttccaaagaattgacaacgtgagtggcaggggccaaagtcaggcttccaaaggagataatggctcttgacttggctaaaatcatcactgatgctgctaaggaagataggctcctagaagcagattgcgtgccctgccattatgggtgttcgcggtgcgggtgctgcggtttttgactattttttcaaaccaacccgcacatgcggttttccaaatttcccaaactgcacccgcaccgcgaaattaaaacccgcaaaaactgcacctcaaaaatagtgcggtgcggtgcgatttttgtggtttatgcgg

SEQ ID NO: 236539 - DNA, 940 bp, Cannabis indica
ctcctgaacgactggttacaggtactgttaatcaagaattcacagcttggaaacgaaaggatcagttgcttctgagctggctccgatcgtccatgacagaatcgattcttggatctcttgccaatcatctctcttcacacaccctttggagagccttggaacaacgatttgcttctcaatcaaaggcacgactactacaggtaaaatctcagctctctatgattcaaaaagggaacctatccattgctgattacttcgataaaatcaaagttcttggagacactttgtccacagctagtcatccgattgatgaaagtgacctcatcatgcacctgctaaatggcttaggtccagaatatgacccagtagttgttcatgtaacaagcctcgtcgacgatctttcttttgaatcgatccagtctcttcttcttacccatgaaagtaggttggaaaggcactacactgttggagatccctcttcaaaaccatctgccaatctttctgtcaatacttcaagattttccactggttcaagaaccagcaactacaatggaagaggtggtgcctcaagtcaattcaatcgaaacaaccccagatccaatggccgcggctatccctccaatcgcttagtgtgtcaagtctgtcacaaacttggtcacacagcctcggtctgtcattatcattttcacaagaattagcaaccccccaagacttgtgaacatcaggattttcttacagaggatgatgaccctcaagcattctacaccagtactcttccagattttggccatgaccacgagtggtatgctgatacaggagccaataaccatgttgctactggtatggaacatcttgaatatgaatctccctacacaggacctgactcattagctgttggaaatggtaaacaacttcttatctcccatctaggtaattcatc

SEQ ID NO: 236540 - DNA, 1252 bp, Cannabis indica
tatatattttttgtatttttgaattattattttcgtaaaacttcatttcctataaaagtggagctactctagcttattttgtacattcttctaagtccccataaggtcagagcatctctctatactttctttctctagaattttgagccccacacttagttaattctttgtaattcttgtagagaaataaaaaacttgaagtagatgtagttctattacggtcgtgtcacgggggttgaactactataattttttgtgtctctacttacttatacttaactctcattacattctcgtcaatctagctagcgagtgtgtccagatatttgtgtccaaatttttcatcaataaccacaataaatattactattttatttactcttttgccacttattaatataattaattaatttttacatcttatttatatatttaataaaaaaatttatgtactttcaataaaaaattaatatttatgttaattttttttacacctttctatcaaaaaaataattaattttatcttaaatgtattggagcactattataaaatttgggatagatataatattaactacttttttagcttaaattatacactatctattggagatgataaaaaaaatactaaggaaagtgctaaataccaaaaatggtagcataggttattgatgtataatatcgaaccttataattttaatttagtgaataatataaaaaactattaaccaattattaaatcatatctttataatgttgaatattttaatgtatcaaataataatattctattaataataataaaaaataacttaccaaaaaaaaatatattgttcaaaatattatacctcaaaaatccatttaaaaaataaaacaaataagaccatttaaaaagccctacaaaaattgtaaaaaaattgtcaattataaaaaaaaaaaaaaattaagaatatttaaaaaaaaattactggtaaaaaaattatagcgaaaaaattaataaaacaaataataaaaaaacaaaaattgtaaaaaataaacaaaatgaaaaaaaaaatatattttttgtcttttgtactttttttttgtaaagatgtgattaatagagtaaatagtagtaaaaatatctaaaatttttagtttgtcagtagtataaattggcataaatactcaatgtttattaaactgtaatttttctctattttttcaaaattctatttgaatttataatagaagatttaaaagtaattagtat

SEQ ID NO: 236541 - DNA, 545 bp, Cannabis indica
caccaataacgatatgatactgagaagggtactaagcattaatggtgcttttttgtttgaaaaatcttttttttttatttcactaaacatcatcatttgaatttttgttctactattttttattaatcccataaaaaaaaaaggtatatctccatataagggataatcttactgactagtgagttccatagaggttctaacaagaacattttgcatcaacgggtagctcaaatggtgaggtacttgggtatctatggtgattggcatagtcttatgtctagaccaaaatacctagtaaataaatggacatgttagtggctgtatggcaatggcacgaagatgcctaacatgtccttggtcccgttgctatagagtcactaacatatgtcctatctgttgttggtgactttacagctttgaaattctaaacttataattgtgaaacagtttcatgcgacatttacatactactaacttattgtaaggtttgttttgtgaagttctcattttttaattcaagtaatgtataatatatgatttttttt

SEQ ID NO: 236542 - DNA, 765 bp, Cannabis indica
aaagttcctaaatcctagacccccttgaccttttggataacacaatttataccaagccaactaatgcattttcttatctttttctgagccactccaatagtaccgtgccatcatagattctaattcatcacatgtattctttaaaattcaaagcaagacattaggtatgtaggcattgcttgaataactgctttcaataacacttcatgccccccaaatgaaaaaagttttgaattccacgagtgaagttttgaccacaccttctccttaatttctgaaaataatctttgtttgttctgcccacttgacataggaagccccaagtatttctctattgcagaagtgaccgtgatattaaacgtggatacatagagatctttgacattgtctgaggtatttgtagagaaatagattgttgacttggtaaaattaatcacctacaattacaaaatatatagtttgtctaataaatattaattgtaaaaaatgagccactcaatcatgagaaccataatgtagttactcaaaagtttttgggtaaatctgaacagaacccctatttattatagtgttttttcctccatatttttatttattctcaaagtcatagccacaaaataagaacaaactttaattggtatatatattgttaattcatccaaaacttaattaacatccacaactatataaaataattaaaaatactaataatatatttttatagcaatctttcattagaccatcatataactaattttcaaaata

SEQ ID NO: 236543 - DNA, 1859 bp, Cannabis indica
aaaagggtagaggtaagtgctatttgtcctatttgtcatggtgatcatcaagagactatattgttcatactttaattatttgtcaagtggttaaaaaatgctggaacagagtgggcattgagacatcctatgtggatggggggagcttcttggaatggtgcacaactatttttaaggggctgaggaggagaaaagatgtatgatagttatggtgtgttgggcgatgtggggagctcgtaatgagctggtgtggaataagaaggctgttttggtggataatatattaaaggcctaaatatctcacagttattttctgttataaacagtattaggaagtttgttaggttctgttatttctgttttcctttcccttattttctggataatattgttgtataaataccctgtttttgggtcaatcaatacaattcaattcattctttcctaatatggtatcagtcgcttaaaacaatctctctcacgatcgctgccatggcaagaactcgcgcaactggttccaggaattccggccaaactccattgccgaatacttcatcctcaataccagctgttcctcctaaccctccgatcattcctccggcctctgctgtcaccggagacatagctcctcctcatcgtcctgtccatgaagatagttccagtccctactttctgaattctggtgataaccccggtctcaccttagtcactcctcttctctctgacaagaactttcaatcatggcgtcgagacttcgaactttccgttggtgcgcgaaacaagaccgtcttcctcaaaggaactctacctcaacctcctatcgataatcctctgcatcaccattggcttcgttgtaatcagatggtaatgtcctggatattacactcagtttcgcctgacattaagagcagtattatgttcttggatacgactgctgagatgtggcaggagctcaactcaaggtatgatcaaggaaacggtcctcggatcttcgaactcagggaaacgctcattactctccatcaaggcgatgactctgtaagttcttacttcactaaacttaagtgcatgtgggatgagattcaagaactcagtccaagaattccctgcaaatagaaatctttatcaatggagaaacgctcagaactcctttttggagtcatcatggtctccttgtttaaggaaggtgatggtgctgagtgctggtctacacctggtactaatagtgtaaagatcaatgtggatgccgctttatttgaggatgaacgaggttttggtattggagccgtagcacgagatgacaaaggccttctaattgaaggtgtttgtaaggactttcaagggaaagtggagcccctcctagacgaagctataggagtcaaggaagctcttagttggatcaaactaagagattggcagcaagttctagtggaggcggactgtatgggggttcttcaagtccttcgaagttcactagacatggtgtctctgtttggttgtgttatcaatgattgtaataaacttttatttgagttaagaaatgcctctgttttctttgttaaacgatcagcgaataaggttgctcatgcttttgcaaaagcatccctattctatcctgatcgtatttttcccctggaggatgttccggtggatttgctacctagtttggtagccgaatttgatggttaataagattaacttttccattaaaaaaaattcaagtaatgacgttttagcaatttcctttaattaattactctatacacaatctatagtcaaattagcaacaactcgagtctatgggagattaaacttttataaatgaaaacaaaaaaatgcatgtttggtattgttttctg

SEQ ID NO: 236544 - DNA, 954 bp, Cannabis indica
tgttgtatgtctgatccattcatctaggtcgttaatacccagtgagctagagtttatatcaagcgaggtggaagataattgacgttagagttgtgatttatgggaagaggggtgggcccttcaaaacgattctccaacctcaattaagaagcatgaacaactcttttgtcatggcaacatgcctacatagatacaagatagatatggtgatgagtgacaataggcttattcactgcatgtgggttagcccaaatacttctaaagttgtttgttcaatctaatttgattggaaacacatcatcactagaatggttctatgatgaaggtcacatactgtaggggcacttaggaatgaatctgttgaggacaaagcgatacttggagaggtgggcattgataggaatccactaaagagtagcaaacatatagatgagctgttagtaaaagggtatattggtttttgtagtaggtggatgagctggtctagaggtattgttagtaaagagtaaatagggagaaggagaatttgttatttttgtattgagctactgctcactaggaaagaaccaagctctcgactcttagtattagcatatgggtatgtaatgcttagttttggcttgttacatctctactccgtacaagagtaagatcaatattatatggaaagatgcacaatcatccagtttaatcaacttgatgaagtctcagaaaattggtcagttaagcaaagcataaatcaaaatcaatgactttttgatgcaactgtagtgtaggagtgaagcagtgacaaataagttataatcctaactattatgggtttaaaaaaagctctagtctacattgtcaaatgccactgccctttcactcattattattttattttttttgtagggtatccttccacttatttggaattcctataaagatgagcttaaggacactagaaatgat

SEQ ID NO: 236545 - DNA, 896 bp, Cannabis indica
aattcaatataatacaatacaatacaatacaaacctaatacggcgttccaaacgagcccttatagtatatccgataaattaaaattatatatataacaataaatttaattctattttaaaattaattggccaaattttatatacattataaactttctacatattagcaatatataattttctaatgatatgattaaactttcatcaaggccgagttaagggtggagcgggtcgggttgggccgttgctcaagaccattcggccactctagcccaaacttaaaaaaaaaacaatttattttttatcataatacttgtatttttactacttgctatttaaaaaattccagattacttttttttttctccaaaaatatatcgtattttaatatgtgttttaaatttaaactgaattatttaataatatatatctaatagcattttataattgtattggtaaaatttgttgacaaaatattatatatatataaattatattatacatatggtatatacgaatgttacaaaaatgatgagtatttattttagaataagcagttgcaaagagacataacagattagaaactatacatatgcgtgtgggtgatggagatgtctatttgtgtaataagagactttatcatcacaagtacatgatgttccatactcttctcctcttctttcaatatattatatatatatatatatttgtgtatatatatggtatggtttcgattaaattaaaataaaggcttttgtattgtatatattattcttgagcactttgaagaagatctgaagggagacagcttcaggtgaaggtaccattgagtagtttttgtaaagtacaacccctatacatgcctaatgcctcatatatatacttatatatatata

SEQ ID NO: 236546 - DNA, 1594 bp, Cannabis indica
gaaagaagaaaggtaaaaaaaaaataacataagaaaaaaaaaatactattattcatatatatatatatatatatatatatatatatattataaatgtgatcgagttagttagttatagcggtctacaaatgctccaaacttatttatttatttttattatttttttaataatttaccacaaattaaataaaagtaaaaatttctaatccattttatataaaaaaaaaaaatttcaatctcatactgtatttttctcatttattttaattatactgagacacgacatttcttttcttttttactaaataggggtgttatgtaaaaaacctcacatcactctgaggttttacacacgtcaaatgagacaaatagaattttactatagcacataacttttttacttagaaatgcaagttttgcatctggatagtacctattgattgctaagagaaataatattttaatgggtttatttgttttgcaatttaacttttaaatttgagggatataattgtaaaatattgtttttggtgatatgtgtttttgatgaatcaaaatgtattgtttgcaaatgaccatgtattctaatgttttgattattttgaaaaagatattgtgttgtttgtgatataattgtaaagaataattcacatttttattcctaaactttaactaataataaattttatctctttttattttaaaaaagttaaatgtaaaaattataattttttattaattttgaaaaaaattaataaaacctaataaaaaaatattatgtttactttaaaaacctaaattattcctacaaaaaatattttcaaactttattttatttacaaatacatatcttaaataatttaaacaaactaaaattttgtgaagagaaaatcaaatttatttatatttataaacccgtatctaaaaaaaaaaagaaaaataattaaaaaatcaataaaaatataaaattattttaaaaaaaatataaattaaactataaaaaaaaatatattatatttacttaaacaaatctagatttttagagaaaaaaaatatagtaatttgcggcataaatacctaagttttatgccgagtagcagataaatacctaagtcgtatttttgacggtaaaaataccttctgtcactagtgtgaaacttccgtaggtaccttcccgttttctgccatataatgtgcctgatggcggcgtgccatgtcattaaaataaattccacatcactctcaccattattaataactcactgtatatgtcaaatagatatacgcaatatttaattggcccatgttcttttttttttttggaaacagatggcccatgtcatttaagcaacatagtaaaataaaattaaacataataaaataaaattaaacctaatttaataaacatactaatattcattgaacttcataaactattgcctaaacccaagaaatgtcgtacccatgccaatctgttaacatcatcatcaatcatcttcccccaatatttttctccactctcttcccccatgccaatctgttaacatcatcatctatcatctgtgaacatggaccaacatcaaacacaatccaa

SEQ ID NO: 236547 - DNA, 1503 bp, Cannabis indica
gcatcaatcatcaatattgagggagttatgatcgttttattgaaggttgttcagcacccaaagcccaggttgacatcctgacgtcaacctggacgttgggtaagtgaaaaacatactggacttgtatttttttgatgcctaagtaatatgttgacatcacttaattagattctttgttttagagaagttgttcgccagttctcgaagatgttgctttttggtgaaatcgggtagattcgaaacttcccgatttgctaatattccaccttgttgaaatggtgaaatatcaaagtgtgaatttgatctgtcacaagtcatagctctcatttactatgaaaaatagtcggatgtttgagacggaattggattctgataagcaaaactcagctcactaggtcacacttcaactaggcgatgggtgcttcttcggtgacttctcggtgcttgttttgatacttctaaggaatttgagattgaaaacaaggtctcctacaccattttcttaaccaaaataagaagaatattcagagcaaaattttcatttgaggaacaaaaacatgagaaccaggttccatgtcaacctgggcgcagggcctagtgcccatgtcaacttagccgctgggtctctattttgaccccaaaaaatcttgtttgatccctaagatcacttgtatctttattatttataaagacgaaaaagattcttagagcacgttttgggaaaagtgactggaaatatcgcaatgggctcaacacagtgccaacctaggtggtgggtctaggtttttgccacctaatgcatctgtttgattcccaaaaatacttgtatcctaattattcatgaaaacagagaatatgcccagaagacttctgtgaaaagtggattagaaatggctcaggttgaaaacagtgcttaggtcaacctaggcgctgggtctcagttttggctcacagatgactttgtttgttctccaaaagcacccaaatcttaattatttgtgaaaatagagaatattattagaagacttcttctgaatggccgaagttaacaaagtggcaacttggacgctaggtccttactttggcctccaagtcgttctatttctttcccaaagcccttgtttccttgttttggatggagatgaataaaattcttgggatacttcttcaatattgtgatttgaagagccctaaattgacaatatgtcaactagtcgttgggtgccctaggcacttgatgccttaggtgctcaaaaatgaaaatgttctaattctaattctggtgccacaaatatgtttgtgataagtctttttcatgccaaagcacaaattttgagccattttcactaagacatgcccaaaaattgaaaccctagttctgatgtcaacttgggctctgggtgaaaatcctaggcgtctgggttgagatctggggtgttgtttcttttctttttagtttccaagccttaggacttgattcttcttgtcttcttgattcaaaat

SEQ ID NO: 236548 - DNA, 1798 bp, Cannabis indica
gtttcaatgaaaaataatttttgtatcaaaaattatgatgaaaacaattttggtatacacgggtatgcattgcaaacccctgcgcgcgcggatagagagggctgaccgagacagagggctgcatgtagcctcaatggctgagggaactcggcgtgacacggtttcagacagcccgtgtctgagtttcctcgatatggttgcctgaaaccgcgtggatgccgattgaatcacctcctgcgcgcgtgtgtgtgcaactcgatttcaaatattttcatccaaattcaaaaaatcataactaattcataaaaaattcaaatatagttctgtaaaatcctaaattcattaattaatttttgtctaatttccagtaaatatatttccagaatgtaacaaaaaatattttacaacatacattgcgatttccacacaatcatcaaataagcacataaaccatcatgaaaccatccaaatcaacacaaacatcgttttaaatacatatttcatgaaagtaaatcattatcatggctctgaggccaattttaagattatgttttaccagaatctagatttactaccatgtatgttagttaacatcctaaatatgaatttctaaaataatgtaaataaacacatataaagtttgagaaacctggcattgggtgaagcagaattaaatgacttcttccactcagatctctaactcttgtatcgtatctgtaccagagtatcactaagatctgggcccggttctccttctcttgaatttagattcttcacagccttatacactatgattgagtaccacttgatgtgtgtgggcacttactctatcactatagggttcaaaaaattgaagagtgaaagagagaagaagggttgaaataaggtagaatagatggctcagaattttgagtaaaggcaagtgatttcatcatctttcaattcaaggacatcactatctatttataggaatctacctaggtttaggtttgaattatttagcattaaaaaattgataaaataaatggtaaaatccctttaagtggccggccatggatgtgggtccccactttgcaattttgccatttttcaactatttatcttattttctcaaaaatattatttttccaattcaaccacttaaatgccaaaactatttatttaataattaaaactaattatcaaataaaatttccatttaacatatttattaattagacttaataacgtctcttaataaacaaataagccgtagaatctcttttcttcacaattaagccctagcttagtgaaattcataaacaagacatagtctaattttagaattataattaattaattaaaatcaattaattgagtcttacaagtagtattgtctcaactagtatggggatcatgggcctatacaactgagcttccaataagaagaacaagaatttacccagtaaattcccaaacttattaattcctcattgcatccactatagaacttggaattgcactctcagttatattgaacgctctatatgctccactatatagatacgctataaatatttaaccatcattctaatcccaataatcaaagatcctcaatagatgattttaccgtttgacccctcaatgtattttatccttaaaatacttagcttcctataaatgatatttctgtaaactaatataatcattgaaataagagcccttccatttatctctattaagccaagctcaaaagaaatcatcgtttcacttctatgtccaagtagaagctatagattccatatcaatgtttagcgct

SEQ ID NO: 236549 - DNA, 2349 bp, Cannabis indica
aaatatactaaaatataggacattattcatttatctcacacaaaaaacaatatatatatatataagactattctaatgtagggaatttaaaaaagactctattggtaggacatttaatatggttgagacctacattattgagtgagtatgagtacaagtgcaaatttaatttgctgagtttggttgtaggtagatattagcattgtctatctcttgatttaaaaaaaaaaaaagtgctcatccaagctctagctacttctgcaaagttggagattaagactttgctttatgagtattttctgttactgttgcttctgtagaaattgaaggaagaattgtttctttgctgcaaagttatgagaaaccaaattttgttagactctcttctattaattgaatttagtatactactatacatggtattttatagctcaataatatttctcctctttcttatttttttaacaagtttaagataatttaatatgtatctctacccagctatacaataagtgttattttacttcctctcgagagatcacttgtgatatggaacaacaaatggctaatttcttgtggaagtcttctagttctagagggaaaggtatcaattggatatcttaggatcatttgtgtcgacataaaagtattggcggaatgggttttcgctttgcaggatttaatattgtctttttgggcaagcaaggctggcgtcttcttacaaagtcataatctttggctgcgagaattttcaaagttaggtacttttccaatgttacaatcttactgcacaactcggtgctaatccaagctttgtttggagaagtatctaggaagctcagcacttagtaaaggaaggggtttgttggcgcgtgggcaatggtgaaaaatataaggtttcgaattcctcgtggcttcttgatgtggaaaacccactagttttatctaatctaaccttaaatcatgttaaagtaagtaaattgatgaatatgaatgggaatggttgggatgaggagttgcttatagatttgttcgaacaacgagatattgatctcattttaggcatcccatcacatcttaatcaaaaagcgaatcactatgtttggaaccaagaagcctttggtgcatattcagttaatagtacttacaagttacaatctccagcaaaaaattgaagggcattggtatgaaaatgatttttcaagtttttggaagctcaaactatgactcaacttcttactaagcgagttgaggggagttctttatgccccatctataacacagaggaagagtattcttcactgtctcttgtcaaattattcagcttgtttggaagagggttgggaccaatgtggcaatcgagaacacctttttggattgggtggtgaattaagtgttttcaacatgttgataatgagagatgttgtttattaacaactttgtgttgggccatttggagagttaggaatgagattgtttgtaacaaaaaggtttttggaatttctagtattgttgcttcggcatatgggtatcttaagtaatggataaaggctcaggcatcaaattttgagtcattacattctttttatgagattggtgatggagctgagctttggatagtaccttaatcaaacagtgtcaagataaatgtagatgcaataatttttaatgaatttcagtcatttggttttgggtttgtggctcgagatgatattgggctcttgattgaaggggtactcatttgcttcagggcaatatcaagtcaattttagcagaagcaatggggcaatagtaggtgtatcttttaatttttttttgttattggcccatgggtttagtgggctctatatcgacgcctaacccatcttagatcaagtccgaccctaacatattgttactatatttatgcactgattatttgaccaaggtctaatgatgtaagaaaaaattggaaatttaggattataaactcctacagtatttgagtattaaagcatctctagatccaacatttccaccaaattagtgtagaattttcacaacactatttcactctaaagagaccaatttatattggtgtataaaccttatacttattcttttaattgcccacaggttggtagctttctaacatttgctccttttttttttgacaaagtgatttaaatcactcatgaatttacgacgcccacgtccgccaccggcgctggaacctcctcgaaccaggatagctcatcgtctaaccgcagagcatgctttgccaaccatgggccgctaaaatcttagagcgagccccatgggacaaaactgcccccggaaatttagacaataaagctataacatcttcaa

SEQ ID NO: 236550 - DNA, 1805 bp, Cannabis indica
tgagacttttctaccacattttttatgctgacaaaaactatgaatatcttggcaaaataaattttatttttaccagcacatttttgcactggcaaaaaggactagcaaaatttgtattggtattagaacttttaccaacacaaaacgaaaatcgtcggtaaaaataacttttcccagtgcataaatactctagtaaaagttaaacttttgccatcaaaaatatatgttagggaaagtcttagttttaccagaacattaacgcgctaggaaaagtcttaactttttccagcaaaaatgtgcactgaaaaaattcttatatttaccagcgcattaacacactgggaaaaatcacaatgagcctaaatacgaagccttaatagccggcctcaagctggcacatgaagtacgagctaaccacatggacatattcaacaattctcaactggttgtgaatcatgtcctaggtgaatacacatttgatgtccaataataatactctaagtttacataccatttatatcagaacttttatagcttatacaaaatgtggtaacacacaaccctaacactgtatttaaaatgaaatacaataggtcaaacttatcattacatagtattgggaatcggaataaagtaatagagaaatgtaactgaataaattaataatcagaatcaatatttgtaatatgctatttacttaaactacttagaaatggaatgatagtgatttatcatgtttattttatcgaaaaaagtaatcgaaatgcttaaatttactaaattacccttttaagttaaactataatatatatattttttttggataattaaccattttattgaaaacaaaacaaatggattacaccattttagtagccacaaaaggggctacatcccttaaacaacccacagtctttgccttggcacatctggcccaaatcgcaagtgcatccgcacaaaagtttaaacaacgagaaatatgagtaaaactgaccacattaaaacttttgcacagagctaagtaggcatcaaaaacaaggtaagagcactaggcgaaaggcaggtaacccgatctcaaagcctgcactgccactaaggaattcggttgaatatgaagaatataaatacctctattagcattgtgaagagcaaggaggatagcctgcagctcaccttccagtacacccgagaccttgataaaattcgtgacaacccaagcactctctaaactctcccccacgatttccaacaccgttaaaccaacatcaaacataaccatgaaagcatccgttcaaaggcagcagacatcccccaaaggcacctccacagagctgcagagaggcacaaaaatcatctcatgattatgcaaatcagacatcacagtcaccatttcagtgtatctcgcggctatatccttgtcaatcaaagcaatgctgtagcaaattccttcaaaaaccaccctgtttctccatttccagatagtcttacacaaacagacgacacacaacttcaactcattctctttaattttcgaccaccaagacccaaaatcccttatagagtttcgattcatgcactcaattcaaattccccacttactcttgaaccacagaaccccggtgagattgcactggcagaataaatgttcaactgccatgttgcaaaaaacacactgtctttcctcctgctcaataaaacccagccttgccttaacaggtagacactcggaccaaattttccacatcaggagctttaagcgaggatgcatcttaaacctccactggtctttccacaattgatctgga

SEQ ID NO: 236551 - DNA, 893 bp, Cannabis indica
tattttcttataaaatcttaattaaaattgcttatatttaaaattaaattactaataattattaattaactttttacaatttgttattaagtaaagatcttttagcaatttttttacacttaattattgaaatatttgtaacaaaattctttataatttaaaattattacacacataacattaattaataagaaaatagtaagaatgacctctaattagagataattcgatactaaatcttatttataatactttaagtgccaaatcagtatgtcagtttcaatttccaaattggttcaagtcatttaattatttttttaatttaaaaagtaaaaaatataaaatccaataacaattataaagttaaagataagttaattttttttctattgctccttcctcatcgtgttcaaaaaaatatttgaaataagtgagacaaaattacatagttaaatgatcactgagaaattacattgattgaggaggtggagccttttgtgtcaagactctctaccatgaacttggtatattagtttttcttttggtatgaaattttcacattagcaaaaaaaataaaaataaaaaataacaagtattatatatgaatgacataatgatcatgctaaaaatatcatttaaaaatgagtggacctgatgaaaaaaaatatgtagaaagaatttgaagaaaagtagacaagacaaaataacattttgttgttattgtcaattgatttatgaataacgtgcaacattattaggtttggccgtacggcaagacgattgagaaccaaaaagaaagggaaagaatgtgatacagctggtgaattagaagaataggtttgtggcagagatgtaggagattgcatcgaagtaaaaaattcacatgatgttag

SEQ ID NO: 236552 - DNA, 509 bp, Cannabis indica
aagcatggatcattgtgcccgtactgcgagtctcatcgacacagtaaacacttttaaagtttgtttagtcttgtttagtgactcatgtgtaaaagtttagaatcaaaaaatatcgtgaaacaaatagaaaaatgtcgcaaaaaattacaaattatgtttcaataaactatttatgtttgtgtatttcgctactttaatcgtgaaatgtcaccacatgtcgatatcatcacaaaattattatgtttcaatatgtcgcgtctaaaattgcaacatgtctcaaaataaatatcgcaaattaaaagacatcaaagttatttatgtttctctatatcggaaaacatatcgtcaaaatgttgcaatatgtcgatattatcacaaaataattatgttccaataaaactatttatgtttctgtatgtcgtgatattaatcgtgaaatgtcgccacatgtcgatatcatgacaaaataattatgttcaaatatgtcgcatcttagattgctgcatgtc

SEQ ID NO: 236553 - DNA, 578 bp, Cannabis indica
ccattcatgtgagatttccctggcattatgtattgcccaggtccggatgggtatggagtagagttctttaaggatctctagaatgagattggggaggatgtgtctagagctattttgggattcttccaaaaagaattctccctaagcaccttaatgagaccaccatatctcgcatccctataacagaacacccccagaatgctattgactatagaccaattgcttgctacaacacgatctataaatgcatctccaaaatgatttgtgctagcttttcaaaaattcttcctagtgtgatcaataacaaccagggtgcctttgtcaagaattaatagatagctggcgcataatatcttgatcttccaagacttacttaaaggttataaagagaaaaacacatctgctagatgcatatgatactgtggactagaaatttgttgctgatttgttaaagggtctgtgtttcccttccaattttatcaattggatcctaagatgtcttcatggtgcctcttatgtcctttattgaatggccaacttcaaagttcatttaaaggtgaaaaaggccttcgccaagg

SEQ ID NO: 236554 - DNA, 2027 bp, Cannabis indica
atacgaaataactttttaatcctgtaccacaataaaaggataagctttcgcagattttgtggctgaatgcacgagcaaagaaccagacaaatcaaaagataaccgcgagctgaacaaaggacaaaaataggtgtccccactagaagaaaattaaaagacaaacttatctggaagctgcatgtggacggatcagccactgatcagctttttggcgtaggaatcgctctcattgcacctgggggaaacctttgcacaaagcagttaaatttaggtttaaagcctctaatattgaagtagaatatgaaacactcattgttgggctaaagctctctcgggaggtacgtgccaaatacattgaattttacagtgactcacaattggtggtgaatcatgtgtcatgggaatacatagctcgtgaggaaaaatggtggcttatctcagtaagatccatgaccttgttgcacaattcaagggttttgctctcaagaaattctaagagaagaaaatgcaactattgatgccctagcacgacttgcgagtagcacagtgacaaataaggccaacctagttccgattcagcttttgaaagaacctagtatcacctgcacgaaggaaatcaaaatgatggatactttaccaaactagatgaccccataccaacctatctcaacattggagaacttccaagcaacaggaatgaggctcaaaaaatgatgagaaaagctgcacattacatcatagtggaaggtgtaatgtatagaagaggtttctccatgccacggttaaggtgtgtaacgaatgaagatgctgcacgactcctacttaggtgcacaaaggattttgtagtaatcatgcaaggagcaaagtcaatttaaaaaaaatattaaggcaagggtatttctggcctacaatgattgaagattcaaaggcccatgtgaaaaagtgcgacaaatgccaaagatttttcaagatcccccaagcatcaccaaatgagccaatacagatgcaaagtccatggccctttgctatggagaatagacttgatcggacagttgcccaaaaggataaagtgaagtacaaaatgcagtggtagcagcagattactttaccaattggacaaaaagtcaaacctctggcaaccataacatccatgaaagtattggattttgtagtgaaaaacatcatatattggtactgacttccacaaaaaaattgtctcagacaatggaaagtaattcaatagccagatattcacagatttctatacaacacatggaatcatcaagagtttctcaatagtggcacaccccccaaaaagtaggcaagtcaaagcgatcaacaagacactaaaagacaccatgaaaaaatggctcgagtaagctaaagggaaatggccagaggaattaccagaggtattgtggtcgtatagaacaactaaaagaacagtaattgggcagacgatttttgccatggcctatggttatgaggcaatgctacatgtggaattagaacccatatctcacaaaagattaacttacgactaaacgactaatcatgccctcctggcgaaatcacttgatgacatcaaagaaaaaagagcttcaacaaacctaaagctaatggatcatcagcaaaaggtagctcaatactgcaataaacatgtgagagcaaggaaatcttttattggagacatggtcctccgaagagtgtccttaaacataaaagaaagtgcagttggcgtgctcggacctaacttgtaaggaccatatcaagtaacagaagttacagattctagaacatacaaatttggtcggtatgacgaaaacataaaactagttctagtaccaaggtattggaaaagtgaacatctaagaaaacactaccaataactgcacaaggtctgatgaccccacaaggtgcacaatgctcgaacacttactcttaaggaggcagccttctgagcagatctcactcaaagatttagaaaaacagttggtactcagttcggatgaccacccctaaagtat

SEQ ID NO: 236555 - DNA, 1170 bp, Cannabis indica
acaaaagagtttttaatatgtatatcctgctttaagaatacactaagggctcgtttggtacattatgttgtaatgcattgtattgtatagtattagtattatttagtacaagattatgtttgatattgacttgtattagtatgttgtttaaaattatactatctttttcataaatttgaccccaatcccgaccctgcctcgaacggctggatccacgtccaggtttattatgtcatacaatataactcttatcggtctaccaaacgagccctaaattttatctgctaatttgaagattttagtcccattattaccttgtagagtggagcaaagagacaatgaaaagcagatacaataaggaaatagcgagtagaccggtatagtatgttgaaaggcaagactaacatcacaagcagagcctgcaaagattttgaattttagtagtgaacataacaaaagatttttaatatgttgaatgagttttgtgcaaatactcacaacgacgagtcccacggggactaattcaggcaacaaatcgaagcttcgtgttctcgggtctattttcatatccaaatttgatatgacagcacctaaagagagtacagaaagacctgcactgagaagaaacacttgtctgtagccaagatctgttccttgtttcaaaccaaatataaatggataattgatttggtatttcctccaaaagtatatgtttgctgagaacataagcatatgtaggactatgaatccgaacaagctgcaaaaacagactcaacattatgcaattgtaggactatgaataagagttcattcattatttttagaacttacctataaagaggaaatatattgtccatatattgaccactgtattcactttttctaagatttcttatttgtacaagcacaatgatggtcaccacaagagcaactgagcaaccagagagaaagcctgcatttgcttgacaagctcagacactaacagaaaacaagatattttcatcaatcttacttacccaataaaaatgtagtcctgcgcctttctctttttgtctttggcctcaatgtgttcattccttttgcttggtttccatttgcaaagtgttttatgaaggtgacttccactctttccattagcttactaacctgtgtgtgcaacagatatggact

SEQ ID NO: 236556 - DNA, 574 bp, Cannabis indica
catagatggtgatctgttgattagttagaaggttgttttaagagtccccaaaaggttctgtctaaaccaactcctagtaacatgcacctaaccctttcaatcaatgttctattcatcctcttagcaacactattttgctaaggggttttgatcacagttctatgtctctggattctcattttggcacacaatcccttgaactcatatgagtagtactcaaggccattgtcagttcttaggaccttgagtttatttttagtctagttttctagcagtctcttccatgtgtcaaaggaacctagatcttcatctttgcttttcaacaaataaatccagactttcctgttgtaatcattaattatactcatgaaatagtgtgctccgcctttagttggaatcctagatggcccctaaaggtcggaatggacataagctaacccttctatggtggtgtattctgccttgttgaactacaatctgcaagcctttcccaaaatacattcatcacagaattcaagtctttttgttagcttctctttgaacagtccttacctgttcatttcctcaagtcccc

SEQ ID NO: 236557 - DNA, 2727 bp, Cannabis indica
actagcacatcatgtcagcctgaccattaatgcaggactagagaggtgcattactctacttgaccctaaaaaatcttgcttgctccctaagatcacttgattctcattatttccaaaaatgaaaaagatgcccaaaacacttttcaagaaagctgaactgaaatgacctaggttgacaaaatgtcaacctggacgctaggtccacttttttttccaccaaacgattctatttgattgaaaacactcgatcccagttatttatgaacggagaatatcccaagaagacttcacggaaaaactaattggaaatggacaaggttgacgaaatttcaacttgggcgttgggcccagcacttgggtcaacctcagtgctgggtcccagttttggctctcagaatttgtttgtttctcgaaagtatctaaatcttaattattgaggaaaaatagataatttgcttagaaggcttcttctgaactactattggtaatgaccctagttggaaaaatatcagcctagacgctgagcccaacgcttaggtcaacctgggctttgggtcctagttttggccttcaagtcgatcagtttctttccctaacacacttaatttcttgttttggatatatggagacgaataaaatgcttgggatacttcttcaatattatggttggaagcgcctcaggttgaaaatatgtcagtctaggcactgtgtgcattaggtgtccttggcgcctggtgccttaattgctctgattctgattttggtgcctcaaatatgttcgaaataagtcttattcatgtcaaagtataaagtttgagccatttgtactaagatgggcccaaagactgaaatcctaagctgaatgtctacctgggtgctgggtgaaaattctatgccccgggttgactttcggggtcctatttcatatgttttcagtttctaggccttggacttggattcttctaatctttttggttcaaaactgaaagatggtgagtttgaaacaacttaacaggatccaaacacccattctggagttcttggagttaacttgggcacaaggctagagacttctctcaaattgaatgctttgactcgggactactcaattctaagaatttttttttcttgctacgtagtaaatattgatgtccacatcaccagaattagtttttaagtaaataaaagctattaattaaatcattcgaattgataaaaaaattaattaatgtgtaaaattattgactatatgtagcttatttaattagtctatatatatatagctggggatgagctatatatcaaaagttgcagctgtaccatttcacttattatatcactaatttatatagtacactttattgattgatcaaattatgcttctctgacccgatcaatatccatcaccatttccactcatagaagttttattttattttctgtcttttcgaatgaaataatagttgaagggttcatatacaatttgatccatatgtttaattcacttttgaaatctttaagggtgtgttacatgcatggaggaatttacatgatttgaaggttctagttacactctttaattttcattatcctatgaaattgagtgtaattactaaaaaagattatttaaatatgaactactaaaaaatattatttcttttgtaattactataataattttgtcaaatgttataaattcataggtaatgccatattatatctaaacacatattatattttaaaataaaatgtaattattatttataattaccatcataataataatttcacaataactttcaaacacacacactaataactatttgagaaagaaatcgtgcttacttttaataaattgaatactaagtatattaattagtaaaaagtaaaagaattaatatataagggcattatcacctatctataaaaacttaagatgaaaaatgaaaatgaggaaaagatatatcaattcaaagacatggtccacaactcaaaattgtgatgggaaatggtaatttatttgtggatgttggtattcaagatatatatgatgattggaatattggtgttgaggcagtggtgttaaactgatcggctgatgttctatgctcgacagcaacgctgctgactgctgcatttgactctcacgtggtagaggcgccagctttgttgcagggctgcttctttatttttggttgggttcagagtcggtcctgaaatttagtaggtcatagcaaaaaaaggctaattaggatttttgcctcctgaattttgacatgtatcaaatcatgccccctgaactattgaaattgttggatttaaggattttatcacatttcattcaattttacgatttcaaagattatttatatattaaattgtgctcccaaactttgatatctaccaaatcatgtcccttgaactttgacatgtactaaattatgccctctgaactatcatctatgttagacgtttttactaaaattagaaaaaagtctttaaattcaacaatctcaatagttcaggggcatttttaacgaccttaaaagttcaagaggcatgctttagtatatgtcaaaatttaaggggtaaaaatcaataattaaccttaaaaaaaatatagtatgttttaaaattagtaaaaaaaaaatagtagtattttcaaatgagaaaaaaatttgaaacccgtctcaattaaagcacatgcttaacctacttatacctaaa

SEQ ID NO: 236558 - DNA, 1082 bp, Cannabis indica
accgggtattttgtgccgaaccgagttcgcgacccaaaatacattttcgggatttaaaatttggaattatttgataagtatgaaaacctgaaaataatgagttttatatgtgtgattttaaatgactatgttgtccttgttttcatatttgtgatatattggtcttcggggaaattttggtcatatgaccaattattctttttttcaacaaaaatttattttttttgggaaattaaaactcattttccggttacttccagccctagccgacccccttactttccatttctatttgcttgtcattttcaacaatcttggaatcaagcttgagttggtgtaatttgtggcttgggacttgtgagtttgtggtaagctcttaatcctcctttgtttggattgtcaatttatgatatttgaatgttcttggagttgtgtttgatgttcatacttgatgaaatccatgtggttgagaaatgcttaatttttggtgtttttgattagattaatgttagtagattcatgctaggcacttttatgatgatatttattattttgattggttaaggtgtgatttcatgctttaatttcaggggttgtgttctgaaatatctgggcaaatattattgatttaaatgctttgataattgatgttcaacttggtgattatggtgagattgcttgatatttcctttttgtgtatctttggtatcaaagttagctaggtttattttgatttaaaaatctgagtttatgaatgggtttggttgaattttgggaatggtttgattgaggttcgaatttatggaaaatttagctatttttaggccttaaaagtggtagtttttgggtgttctgaacccagtccccgcgacgagagttttggccgtcgcgactgggtttgggagtgagaaagtctgtttttcctgaatttgttttagccataacttttgactcgggaatccgtttgggacgttcttatatcgttcgaaagcttgttttgagctctatttaattatcttgtattttgaatgccatgtttataatatgtgaaagtggatttagggattaacccgtatgcttgt

SEQ ID NO: 236559 - DNA, 757 bp, Cannabis indica
aaaagtgttgcggaagaagactattccgctagtttaactgatgtggtagaacaacaaggttgaagaaccacataattcattgtattcttgtctagtgacaattttatttttataaaatatgagataaaagtagtattaactaaaataatatatatacaaatatgatatatatataaatatatgtatatatgcgtgtagcgtgttgcgtgtagtgtgtagaatattagattacctgatagatgcagtaaagtgcaaggaatataacagaaatagtgagagaaagaaaaatgatgattcgtgtccaaaaatatgaattgtgaacttttgacagctggagaatgatatatggaatgagtgaaactagaatgagccttgcagtcacattcgtctcaatatcagtagttataccataacctgtataaatatatatatacatgcattaatttaaatgaatcaagaccataatatataacttgcaaaaagtacgtgcatattacaatattatatacattattattacctgttaatgtgaaaggttttgagtggtagtggtgttgaagtggaagtgttgatgaactaattagggagtgtgaaaggtcgcggctgccaaaagcaacaacaaaaccccaaatcaatgtgagggaaatgattgttgttcctgctagtagtccaatactcatttctagctcctctcccatcgaatcttgacttgcagcaataccactcgctacccgaaaaatcaataaaaataataaat

SEQ ID NO: 236560 - DNA, 718 bp, Cannabis indica
agtatgaaacttataaaaaaataccgtctgacagtatttttgtaaaaaaaatgataaagttagtataccatgtaaattaccatctaaattttacttactttaattgctttaattaattaattaataaaaaaaaatatttttccgatcaaatttctcatcatccaaacattgctaagaagaaaaaatttaggaaatttactaactaaaggtgtactttgcttttgaaaattacactaaatatgatttttataattaaaatatttcaaatttaagtttagttattatacattttgtagcatattttgaattttaggtttttttatagtattttataatgccaaatttgtaagcttgattttaaaagctatgacttataaataaatcatttagaaaatagtaatttacaaaaataaaacaactcaacaacaatcataaaacaacttaataattaacatggaaagaattataaaacaacaaaaatatagctacaaagtaacaaaaaaataacattatattgacctaattacaataagcaaaataatatcaactcttcaatatgtttttgtattacgaattttttgtaattagttttgtcaacttgatttatttttttgtgctattacattatttttttttccatggaatttattgctataattttattctttcaaccttttttttttttcttcttttcatttttgagttagtgatagttaaa

SEQ ID NO: 236561 - DNA, 986 bp, Cannabis indica
tacattttttttttcaattttttttctcaggagtcgactgcccctcctcgccactatatgaattcgcccctgctatgaacattacaacaaataatttttaagtaaaatttaatttcaaaaaataaataaattacataaagaattcctatgctccatattggcttacattattttctataaaataataacaataaattctacacccaattataccatataattaacaatttatcacttctcatacattcacaataaaaaactatccaactttgtcttttgtcttcacaactttgtcttgacaaatcttgtcttgacaaattttgtcttaacaaattttgtaatttttctctatttgactaattttaaaaaataaataattactatttttccaacttaaaataaaattttctgaacatctttatacaactctttatcgtggcgattcggggaccatggacctataattctaagtttcaataaactagattatttattgagtctcattaagtaaatagtcccgtgtttgttaattatatgattactctacaatagatatagaattgcactcttaataattattgagtcatatttactgagtttaaatgcagtgtgcattggtataatcaattccagtaaatagctctccatgtgttggttcgtaaagtagttttggtcaaaattactattttactcttctaattatttctttatcctttagttccattcaattcactagtagaagtataattcaagatcccatctgaatttgcgtgcaacttttcagtaccagaattaacacataaagggaaccaacattcaatccgttagaaaagtcaggattccataattgtaaatcatgttctcagtcatccatattattagattttccaaaataaaagttgtaagaatcatcttctctgagaaactttaacgagtgaatcaaagaaactaacatgaatatatgagttcatgataactcatgattt

SEQ ID NO: 236562 - DNA, 718 bp, Cannabis indica
gatacattaccctcttgggtttccaaagaactcatcaattactgcgccaataagttcaaccaaactggctttaccggaggattgaactattatcgagctgctaacttgtaggattctctcttaggattgaatttgaaattagtccatttacatctatgcttagtggtttttgttaatccaatgctctttaagactttgatgttaaattggttaaaacactgctttttgtttgtggttttgcagatcatgggagctcctggcaccttggacaggagcacagataaaagttccaactaagtacatagcgggggaacaagaaagcacctaccttttccctggcgttaaggaatacatagaaagtggtggctttaaaaaagatgtgccattgctggaagaagtggttataatggaaggtgtgcctcattttattaaccaagcaaaaccagaggagattagctcccatatacatgaattcattaagaagttctgagtttaatttgcttgaataatctatgtaaaacagagcagtcatgatacctaaatcaaataaattactattaattgtacttttagtagcttacacatcaattaataattgagtcatgagtgaatctgttgcttagttatatataaactaggaaacaaacagctggattctaaagcataattgaaatatatatatttaatagcacatttatttaagggaaaaaaacaaaaa

SEQ ID NO: 236563 - DNA, 963 bp, Cannabis indica
aaaacaatatcaattgatgaacaaataaatatcaaacacacaaaataactcaaaatcaactactgaagttgttattgtgtcaggatatgtaacttttctttatattttcaatatcttattgtcatatacatcgttatatttctgttgttattgtgtcacctgtatattttacttttattttcaggaagattaaacaacgtaaacaaaacttaaaaacaatgttaaatcaacattttttttgtattgaaactaatccacaccttggagcatatgacaattgttttgttgttgttcttatgttgttgggttgctgcatagttgagtgtcatgagtgatgttcacttccaaccactgtcatattgttaaacatcattacttgggtagttgctaaaaaggattgtgttaacattgtttctgtgttgttgaatgtgtttacatacaatggatatcgtgtgacggtttccttggttagtagctttatgtaaaatagtagactcttgtcatccttgctttggagtggttggcaatatttcttcagttgtatttgagttgtttcaaggttgcagtgtagttcctgcaacattatctacaccagttcaacataaattcaatctctagattttagttctccacttgatttgtaatcaacatataatgtttgttgtcatccaaatgataattgctttgtaccaatatttttagatccatattctaaaatttttgtacttattcagaatatttggtatcaatatttctaaacaattattttaatccataaaaacaatatataaaaacaagaaaatgaatattaaaaaagatgatccaaaactagatattcgaaaaaagaattgtcacaaaatttcatcgacggagatcgaattcctaatttgtggaatcaactaaagcatggttaggaggagtggaggacattaatccctaggttagtggaaatttgtagcagaa

SEQ ID NO: 236564 - DNA, 1392 bp, Cannabis indica
gctgctgtgtgccactatcgcttcgacaagaactatgttccccctaagtcagcccctcctcgtgcctatctcaccgagattgaagttgataatgatcatcaggtacctcacactactatcttacctgattttggagatgacaatctttggtttgttgatacaggggcaaatgtacatgtcacaaatggttctgagtctcttgattcccctgccccttatgttggcactgaaacactttctgtaggtgatggtaagagtcttcttataactcacataggctccacatctctgtcttttcccaattctcatgctttacacttaaattctgttttaaatgtccctgccatgaaaaagaatttaattagtgtgtctaagctaactaatgacaatgatgtgtatcttgaatttcacaaaaattgttgttttgtcaaggacaaactcacgggagctgttcttctcaaaggaccagttaaagatggcctctatgttcttggtgactctagtcataactcacacactctacaatgtaatctcactgccttgtctcagcccaatactgtttcagattttccaaattgttcacattgttgtaataaactcactgaaacttcagtgactacttgtaatatgtcccatatcaataaagaacatctttctgagtattcttctccccattcttcatctgtttcattaacaacccttactcatgatatcaatacttggcatcaaaattggggcacccttcatctgccactcttagcagaattttaaaaaatgttccacattcaggcactttaaaagaccttcatttctatgttgcatgccaaaaaggcaagaatcacaaacaaccatatccattgtccaatagtcatgcatctcagccccttcaattaattcatactgatttatggggcccttctcatgtctcatctaaagaaggatatcaatattacattcattttatagatgatcacactaggtacacttggatatatcccatgacacttaagtctcaagcctttgacatttttttaaaattcaaaagcatggtagaaaaacaatttcatttgcctattaaaagtgttcagtctgattggggaggggaatatagaccatttgcttgatttctacatgatcaaggaattcattttcaacatccttgtcctcatgaccataacaaaatggaagagctgaaagaaagcataggcacattactgaaaccgggttggttttacttgcacaatctggcctttctttgtcatattggtggtatgcttttcaatgtgctgtcttcacaattaatagacttcctactgctattttagacttcaaaagtccttgtgaaagtctatttggaagcctaccggagtacaagattctcaaaccatttgg

SEQ ID NO: 236565 - DNA, 979 bp, Cannabis indica
gacgaaatgataaaggaatacccagaaaggcagttacaaaaatttcacgtcggagtctacaaaagtttcgaaggcatatccaatagaacttgtattttggtctaattcaaagttgttgatgtttatatcgatcgatcatagaagaaaaattatgattccttccgattaagcatccttcctattaatctagaagttcttctcagatacaaggaaatgattcaattccagagccaaggatcgtagttctcgaacaagtaatcgaaaagattttggagcatcctcgggtttaggtattggtcctccaatgatcgtggtaacaagtacttcttggcgagctctaatatgatctgatttataagtaagcatctcttgtaaaatatgagcaacaccaaatccttatagagcccaaacttccatttctcctacccgttgtcccagttgcttggcccttcctctaaggggttgttgtgtaacaagtgcataatgcccactgcaacgtccacgtattttatcatttacttgatgaattaatttcaagatatatggttttcctattataagaggttgctcaaaaggatcccccattcttccatcaaatattctacttttacccggatactcgggttcaaatacccatgcatttgttgtttgcatactggcttccctaaactagaacttgatttagcagctctttccaaaaggcgtgaatgcaaataaaaaatatctctaatcaaagtgggtgataaagtagttggaagacatggaaacaaaagtatcgtttcaaaaattttacccacacaagatatgccttatttgcaagatggaagacataaattctgtttactcacattgagtatacgtttcccttcttttcttgctaggatgtgaaatcctgcattttacatatccatacgattgagtcctgttcttctccataaatgctcgataccaattgaaaaaatcaaatagaaaaattttt

SEQ ID NO: 236566 - DNA, 722 bp, Cannabis indica
ttataaaaaatattaaaaataataaagtacgtaggacttactatacagtacaacggaatacaatccgtaattttacaagatgggcacaaaatcggttgcctataaatttatgatacaaagaaaaagaaaagtagtatgctaaagcagtttttttttttgttttccttgttctcgtactagagttatttttgtcctcgataagtatactttatgtaatctatgtatatacatatgcttttgatttgtcaaacacaaaaggtttatgatggtcattctccactctcaaggtactcggagcttatggtaaagataaattttggaaccaaatacaaatagtttaattgttcttgaaattgtaattataatattttggtctattggtatcgattttgttttttaaatttttaatcacaaaattaaaattaaaatttgtgttttaaaaaataaaaatgtgttttataaccacttttattttttaattttaaaaacagaaaataaaagtgtattgtataatttttattttcattcttatttttttaatttatttatgttgggttcgagtatgggggccgagaccatggttcgagtctgagagtggggccggggtcagactccgggtcctaaggtctaggttggagtcgaagtccaaaatattgattaagaaaaaaaaactgtgaaagtgatttttttttttatttttaaaattttaaaattttgattct

SEQ ID NO: 236567 - DNA, 583 bp, Cannabis indica
tttgtataagttataattataatatttttatatgtctatgtataattgtatattgtaattattgtacttttaataaatttttaagaaactttaaataatttattgtccaataaggttttttgtttatgcgtttatgaaatgtgttgattgaaattagatttcaacacaataaggtttttataactttttgaaaacatgcgagaaatttacaactttatcatcgtgtcaaaaacttccaacaaatttccctcccattcaaaattgaaaaaaaaaaataacccttgaatcactccctaccttcaacaaatttccctttagtttttaaagtactaatcacgtttattttgtttagcttcaaacaagaaaatctctaatttaaaacggtaaagcgaatacgttgaattattactgcaaatttaacatataattatacaacaaatataatttttagggcggcaacatttgtaattaagcaaatctttattttattgattacattgatacgtatatctccagtgagaatatttgagtacattaattaaagaaacctatctcacacaaaacagaaattaaacaagaccaa

SEQ ID NO: 236568 - DNA, 916 bp, Cannabis indica
aggctgtatagccaaagaatatgcaccttttatagattacagagatgtttttacttgattacttcagcttaaattgtaacattttgattatggccagtattgcaggatgtggattaatatcttactgccataccatgttagtaaaattattacggtgacttctgttaagcaacaccaagaagttaatacaaaagtgatagattcggcttataaacttttgggattcaatttcaggacaaattatgccaactgcacaattgagttgttatgacagtaaaaattgtgtattcggtctaactaaatttatgatttcgtaatatttagttgacgaaaaaccgtgtaacactcttcacaaagtcgtgctgtcaatccacaattaattggcccaaaactccttatgtcgtgatttttagatttgtgaggttgcttagccaaaacaaatgatcttggttgacattttaattttgtccagtattgctggacgtggaataatttcgttatgctcaacatgtttatatacaaaaagtgaatacaaaattgaaagatatgaccaatattacaaaattacgatttcaatttcatgtcaaattatgatctctgtacaattgcttcacgacttcaacaaagaaaaagaaaatttaaaatgagaattagtttgaatttgcccaaaacccatgaaaaccaagagggaagttcaagtgtttagggacttcaagtctggccacaagagcgttggtttggccaattcttttggcattcagtataactaggaagcacttttgtactgaaactgcatactgaaaaagaagaagaagaaagatgagctaggtaacaagaaaatcaacatattagttaaagacatcacaatagattagtgttgggagtcagtaacacttgcctcaacaacaagaaggta

SEQ ID NO: 236569 - DNA, 1726 bp, Cannabis indica
cttcaatccttacttactgaactttacattccatccacttctatcccaaaagtatggtgtggtaatatcagtacagtaatgatggctgccaatccgattctccatgctagaacaaaacacatagaaattgatctttactatgtgcgtgacaaggttcttcaaggccaacttcaagtgttacatgtcacagctcaggatcaacttgcagactgccttactaaagctatctcaagctctagatttcctattttgcatgacaaactaagtgtggttttagcttccacactcagtttgaggggggctgttagatgagagagttagttatttttctattttgttagttgcttctgttatttccattgtaacaaactctcctgttacttactttgtatataaatagtcctctctctcatttgtaatgtaatactaagaaatcaataaagcattctttactctactctgttcttgttcttctttctctctttcaacaactgatggttttcatttttgcaagtgatttattcatttttgggttgtggtggtcgatgatggtgggtttgggatggccatcgcaggtttaatttttgttctctttttttttttgctcacgacaattcaaaacttaagctaataagtaaaaaaaatacattagtatattgtgttaattatgaaccggtgcatacaaccttattcatttatttatagccgatgcaaacaagttagtacttgcattacagtatatatgtcaattttgagaattggtgcaattagatcaaatgtcatttaataaacgatgtaaattaagcattttgtaataatgttagttgctggttattagaaatgaggaatgaatgatggatgctagatattaatttggtgtttattgacttattaaatctatctctttgaagactgcataactacatgagttatttaattaatttaaaacattattttgtaatgtaaattaaaggattatttgtaagtgttattttattttaagggttaaagtgacatttgatcacccaaataataaatattatatatttgccacggtttatggttcaggtcaggacaatttttcataatgagattttcgtaggtggcatttggtaatatttttttaattaatcagttttctatttttaaaattaaaaaagtgaaaatatttttcaaaaatatgatttataaaattgtttcacttttaattttttaattgagaatcaaaattttgaaagcaaaatttttttaaacaattttttttttcctaatcaatattttggactacaaccagacccgaacccaaattctctacagagccttggcgttgaacccgacctctgactcaaacccgaatccgaccccgaacctagaccagacttaaataaaatcaaaaaaataaaaatgaactttagagaacatatttttgttttctgtttttaaaattaaaaaaaaaagtagatatatatgacatttttatttttcaaaaacaaaaattttactttcatttggtgattaaaaaattagaaaataaaagtgttaacaaactgccttaattattattattattatttaatttccatttttttcttacattttccttattttttactttctttaccaaaacccaacttcgtacaggagtaaaatatataatttattcaatcttaagcttttttaataataaaaaatatatatagggatatgttattgtactttcacggat

SEQ ID NO: 236570 - DNA, 1326 bp, Cannabis indica
atgaaattgaaaaaaaaattaataaccataattaaaacctaaaataaaacttagtatacgtgacaggtcacgtatacatctacctatatatatatatataaaaatcccaaaaaagagtctaagtggcatgttatttttttttcttcctattttttcttttttctaatacactcttattttctttcaaaaatacactacatatataaattaaaagtctcacattagttaaagactttttaggtgttatccatgtaagttataaataatagctttattattttacttacttttgtttaagaaatattattttttatgggtggttgattaatatcttacccaataagtagttatttattttccaataattaactttataataataatttttaattttatatatatatttatgaaattaattttattttactctagatttttatattgttatttattcgggttaaaaatattttctcttaaactttttattttttcaaaagttaaaatttatcaggtgaacatacttatatgactatttgagaattcttgattatatatatatattaattttttgttactttttttattatttaaattttagaatataaaaaatatctatttctacaaattgtttttttatagtatagcatttttcttattataatttttttaagtttagtttaaattatttaaatcaatatctattgtttaggatgtatttagggtgatgatgtggtagtttagaaattgagtgatccaattttttaattttgtggtttttttaacttttacattgtttttttttttcaattctcttcaaaaattttcatttaatgacttttcaattatttttctatttattgatttaagtggtgacctttcaattattgacccatagatgcatttgttgtattaattttgcatggacattaagtataattataattaatgatatttagaaagtgaagagactcaaagttttttgaaacctatgaattaataatgatgaccttatacgtgagtcatatagatttgtttctccttatccaccattaaaagtaataccataacttcatatatgtatagttaaaatatgagcattgttattaggcactagtgatgtctaataatttctttacatgttatcttgtaattggctagcgatactccctaaaaataattatattaaattatatgggatccgatacttaagtacaccaatagcgatattaacctgtaaaagggtgttaggcaccactggtgccctttagcatttcccttaaaatattgcatagtaaattaattcaattaatcaaaaatcaagaagca

SEQ ID NO: 236571 - DNA, 694 bp, Cannabis indica
aagaaaaaaaaaataaaaatgaagaactaaatcacagtaaataattattatattttaaataattaattaaaattatttttagtatgtaattacactcacttctcataagtgtatgagaattagagagagtaattgaggtatctcaattatctccaattacacaattactgtgtaattacgtggctagacaaacacatcaaactatgcttgccgaccatcgatgaactgatcggattaaccaaccaaaattaacttcagtcattatatattgaacagaagtaaaagcctcaatgtatatatatatatatatcctattttcgattttgatcaggtggcttttcaaacgtgctctaataatttttaaatttaaatatgtgagattcaatacttagttatattaatagtaatactataatatattgtggtgcctaataacatttatctaactagttttagggtaagtattaacgtctttgatttacatttaacatattcataatatttcaagagagataaagatatacaactactataatatttgtgactaaatttattataagaaaatataaacatcactaaagttaggtgaaaaagaagtgaaatttagtgagtaaagtaactttctatttagatatcttactatattgccttaacactaatttcattgtatctaacacaagttaatgaaatatag

SEQ ID NO: 236572 - DNA, 687 bp, Cannabis indica
ccgccacttgtttacttttctttcttcattttctccgggacacattttccggcggataccaccgccggtaggaaaaatcccggtatagacttgtcatcctttttccgccgaatcttcattttgggattttttttttctttctttttcaagaagagcgtgtgtataaatatatatatattataagcaatgttttgggatgaaaattttatgcatgcttggattttgaaaatgggttttcgttgagttttggtgttgattttaatggggtttttttatggtcgtctagacgcaaaatttgtcgtcatcttcattcttcttttgttaccaaagaaatttcagaggaataggaaaataatgaacaggttttacttttgagtatattttcttttttttttgataagaagttatttttgataaaaatatattattttttgataaatatgtattttttttctttctagaaccgagtcaataacagttttgtcagttcttgtaatgactccagttatttatttattatattttttaaattagaagaattagggaagaaacaaatggagcctttttcgtcttactttgtaatcatacattgagtcgaaatatgtgctgaaatgaggtttttattgtgaagaaaacagagttgtctgtttttgtatgaagatttattactagaataccaacaaagct

SEQ ID NO: 236573 - DNA, 1220 bp, Cannabis indica
ttcattcaatatattgtactttaatttaggatccaaaattaagagaatattgcttaccgcttttgtctacaactcttcccaaacttcatcattcatactctcaggcttctttcccaatagtgccttcaggtgcccttgttgtaccaatacatctttcaccgtgctctgccataaactgaaattattctttccatcaaagtgctcgatcttaagttttgtggaagacatcatctttaacactttcggtgtagatcttaacattggctctgataccatttgttagaaaaaataataaacttcaagtgcattgaaataataaagaaacaaagtaatttttttattacgttcagtaaaactaccaaattcacgaagagaaatatatttcacttattattccaaaattacatatactctctatctcaatatctccacccaaaacccaatacactcttcgcttctttctcacttttcgcacactaaaaactcactcatttttaatttcacaactcacacttcttctcacacacgctcttcttctctctcacacacaaaatacatatttatagaaaaaataaacttggacaccaagacactccaaagcttcctctaggagactcttcaaaatttggccaccaaaattttctttttcacacaattaataattacccaaaaataattacaacttaacaaatatagataaattaattaatttgagttaaactccatcaatgtaatgtaaatatatgaggtaagatagggaaaaaaaatagagttttaatgaggtatttgaaatgatagagtagagagtttgttgtgagttctctaataactaaactaataaatttcttagctacatttaaataagcactattcatgaggtaaataattgagttattttagctcatccattgtatgtgcttttttgtttttactcttgggtataattttacatctgtagttattttatattagttactgtgagtgctcttaggctcagctacataaaataaaagtctatgattttgtcatcgaattttgacatgtaccaaattgtgtttcccaaactttctagatcgttaaatttttttctaaactattgagattgttggatttaagaatttttgtctaagtatgttcaatttcactaacaccacgattgtccatgtactaaagcatactctctggattttaatatgtatcaaatcgtgtccccagaattt

SEQ ID NO: 236574 - DNA, 1112 bp, Cannabis indica
cacgacaaaattaggtgttctcaatttcacctaacaatcattttttttcttaccggagtgcaattacagtcaattgatgagactgtgaagaatttcttcaaactggcgcccaacttttgattgaacgtgacagccttgatttaagaaacataacccaacaagtaggaaacttacaaggaaaatttcctttagctttttgaaatattttacaccttcaaagagcatcccttttagctttttcaaagaaacattagcttcttctctgactcaagggcagtaacaaacagatcaacaccaaaagaatcaatattataggagagaagaggattgagagacatgcgaaaatgaggatcaatttaccttgagactgccatggatgtttgaagcggtcattcgttgacgccgttttcttgttgctaggctagaccgatgaaaactcttcaaaaattcaaaaaggatgtagctatataatacttaactacttttcaggtttttaggcagtagctaaattgaataatattttttatcttttcagttcaaatatctataatttttacattttttttattagaataatttataaaataatataaatttaattatggatattctgttaaagaatggtatattctgttaaaataaaaagataaaccaaaaataatcgttaaaccaagaattgacgtttgatagacacttttaatatataaagattgtgtgttagattttttaattacaatttttttacataaaatattagttatacgtataatttatttaaaatttatataaatgtgtgtatattagattggggtcggttacttttacatgtcaatcaacatccgatccgcacaagtgtagattttgaagtttctaatccaatccgcactctgcaatttgtagattgaattagattagattgtgcgaattgaattggattgcttattttatgaacacccctatataatgcaatttaagcaactacgtaacgaacattttcacttcatctagtctacgttttatattagattttcaacattttagctcattacctcaactggtgtacaatgttggaaattattttaccaggatcttaaatctactcacaagtatgt

SEQ ID NO: 236575 - DNA, 2185 bp, Cannabis indica
tcatcaaagcaacaagaaaagtgctcttcgaaataacacatgactactccatcttccacctcttttcaaacttgaaatcaaaataaaaaaaatgcaaactatttcacaggaccattatttgtagcagcaaaatcttacacaaaaataaagtttgaatttcatatgagggagctagacaacttgaataagtgcataacaccgtatctagaaaaaattagccacaagaaatattcaagatatcattcaaaaacaacaggtaaaataataaaatttaataataaaaaaatatataatacaatgactgctattgaaaaagttttttttgtgttacttttgagttgcatatcagttgtataaaattaatgttactgataaaaaactatttaaactacatgtactcaactatgacttctaatataacgaaagcagttaactcagcaaatgtagcagccacagaaacaccagtcacaacattgtggagtgcttgcgcgcacaaatgcaagaataaacatacaataacagaaaagaagcataaaagtcactactacaaaaagtactatttgtgccgatcaacgcgtctcaccaaaatggttgaccgaggaaaaaaataggggggagattttgtgcttcagagtataactgaagctaaaaaataccaattagtgtcggctcattccccgatgcaaaaagtagaaccgaggaaaaatgtgaaaattttcaaaattatcttttatattttgcatcggtggaaaggtgaagctaattatttttgcttcggttgaaaagtgagattaatgtgaaaaatgtgaaaatttaaaaatggttttggcttttagagagaatggtcttaaactggttctctcttcctagagcttggtctttcaccaatctctagcctgtgtgtgtttttattctttgcgtctctcctctggtgtctactggtttgttttctctctcgaagtgtattgtgcctttgttccctcctcttgtgtgttttgtgtttattctgtgtccgtggtgttgtgtggtctcgtggtgattctctgagtgtcttttctgtgagtgtggggtctttgtttagtgtttgttgtttgtttattgtgttttgtcggttgttgtctctcatttatggagatagttaatgctcctggtgcccctacaagtggcaaagctgtctcctgcgtagaagcaactatttctcttaacccgagtgcttcatctctcaaggcactctcgactttgtgtttgtatggaagagtggtggctcctatggcggttcatgcggatgatatcaagcaatttgttacaaaaaactggcttaagaaagtggctgtatttggtctggacgttggttcgtcaaaacccaactgctttaaactgggtttcgacagcgaggaggataggcaatgggcgctggaacaaggtccatggtcctttaaaagatatacgtttgcccttagtgcatggaagccgagtaaggaaggaattacaactgtggatttattgacttatgggtgcagattcacaacttaccccatgaatatttttcggtggttaatggcactctccttggtggattaattggtaaggttattaaattggaacttgaagaggacaaagcgagttcgtgggaactctttctcagagttcttgtggagattgatttagagcgtcctttaacttcgggctgtttctttgatattgccctcggagtcaaacgctggttgcagttcaagtacgagaaagttggaatcttttggtacttctgtgggtgtttgggacatcaaaggaggggatgttccttgtcttctccgtccacggtggccaatcttgatgaaactccctctcctctgttcggaacgtggctgtccacggcctctaggttccatgatgtcttctctagtgattcgaacaagaagagtctggctcctgcgactgtgccggtcgaaggtgttggctatggtgaaggagcgttgattgtgtatcgggtagccggtgccggagttcttgaggaaaatgttgtggaacgtggaccgaggcaaaagttgaaagtgatggatcgtggcttttctgggcacggcaaaggagggcagaaaaaatggcttcccaagaagaagcctgctgtgtttggtcgaggttttgctgaaatgggaaagaagctaaatgataatttgaaaataggggt

SEQ ID NO: 236576 - DNA, 1122 bp, Cannabis indica
tattttgagtgtgtttagagtaatatgtcagtgtctcatacctcttttttatatatttaaaaactttagtttcttctacatgtcatcttcaacaaatgttacaaattaaattaaaaactctttgtgtgacctacaaacaaagaattttaattagtgttacctaactcagaatcctatttcaacaatatagagggaacctaccaacaaagaatttcttaattctcatgcaaaatgaaaactctattgaatgataatcgaagaggacaaagaaattaaatgatgagagaattgagagagaatgatagagacaatatgattttaggattttattatttgaatggtatatttataaaatttagataaataggctttactagtttatggtataatttattagttttagatgaatatctttgttttgtttaaatgatagggttagatattttagtttttaaaaattaatataaaacatattaagtacggatgtatttattagttttaaatttatatatatttagaaaagtagattaaaaatagaaaataggaggataaaaaattattaaggagagcatggatgtatttagaatatttttagaatgatatgtcacaaatacattgatgaacaaattttcgtaactatttctctcacaaatacattttctacaagatattataaattgtgatccgagttgaggatatatttctttatgcatcaattgttgttgacaccatctggagaatgaacaatgacatggtacacaataattactcctccggatgtgctgaaatgtattgaccatatttgtacttcttttacagagttacatgcttctctcttgcctagtcctacaccgatcttgaaggagacttgaactcctcatcctcaggattggataaaactgaattgtgatgttagagtaggcttagagagtatgtgcacagctgttgtagcaagaaatcatctggacagggtggttcagattcacacgacccggttagatttcccagatgctttatgtggagaagctgcgacttactgcttggctatttcgttggctataaatttaaggtataagtatgttattgtggagagtgactcgatgatcgctatcaatgcgctca

SEQ ID NO: 236577 - DNA, 908 bp, Cannabis indica
tgccgttataatgtccgtttttagtgttttattttagtcaagtttttattatcgtcacagtttttaataattaattaatatattagtattaaactagttttataaaatcacacacgtgtcattcctatagattagggcgttatagccaatcaggacgaaaggacagctgttggacattctgaggatagctggtccaccacgaacctccaacggggattagacgccaagtaggagaagcacaaaagtgaaaacgcaaggccacatggggccgaccttaggaaccacttaagcaataaatgaggggacatgattttcttgagagtgacacaaagaggttggaggagcagatagtcactctaaccaagttggtcaaaaaagaaagcagagccctctcaaactcagaagatgaatacccaaaaccctgtgcaaggaggattgtagaaatctcacttccaaaaaacattaaaattccccttattgagttgtatgagggaaggactgatctgcgaccacctttggcaaagtacaaaaaatgatccaagttacttgaggggtcgacgatgccaagtggttatgcttttccttaaccttgaccaagtctacaaaagattggtggaaacaactagctcaacgatcaattgatagctggaaggacttgcaatcgcctttcagcaaatagtttattgttgcgcgtgacaaggacatggaagttggttatcttaccaatgtcaaacaacaacataatgaaaacttgaaggctttgttcaaaggatgatggaggcaattcccaagactaaggtcagcgatgacatgaaattgatggccctccaatatggattagttgttagctctttgctatggggagagatgcagagaaagagagtcgaaactttgagtgagtttatgac

SEQ ID NO: 236578 - DNA, 1199 bp, Cannabis indica
aattcaaatgaaaaaaaaattaaagttaactccatatatgagcaagatagtagaatgtaaaattaagagatgaatttcgagagaaagagagagagagagacgaagatagaaacaaagaatgcgaaagctcaattatctacagaacaaatacaaagtatttgtagagtacagagtactctatttgcatcaagattaaaaaacaagaaaatgaaaaacaacatacagaattctattatataactaacaactaacaacaaagtttttaattcggtttttcattaacatccccctgcaaacgaaatggtgtggacaccatttttagtttggacttcaagtgaaaaaaacgttctgttgtgagagctttagtgagaatatcagcaacttgatcatgagctgagacataatgaacaaaaaatttcttactaacaatttgatccctaacaaaatgtagataaatctctatatgtttagatcgagcatgaaatactgggttagctgccaaagttgttgccctttgattatcaacccaaatgatagggctgtgaagaacaggtacatgtaactcttgcagcagtgattagatccacgttaactcagcagcaacattggccaaagctcaaaactcactttcggtgctggatcgagccacgccatgttgtttctttactgaccagttgattggattatctcctaaaaataccaagtaacctcctgtagagcgtctgtcatccacacaacttgcccagtcagcatctgagtatgctgtgagagtcaattcagatgtaggagtgagttaaataccatctctgattgtgcccttaaggtatcgaagtagcttctcacatgcttcctagtgtaagtgtgtaggagccttcaaaaattgactgagttcgttaacaatataggccacatcaggccgtgtgagagacaaatattgaagtgcccctaatgtacttcgatacagagtaatgtcttcatatggttctccttcatttagtgatagttttacagtagcactagttggatttgggcatggtttggcaccttccatttttaacttgaccaacagatctgtaatatacttcgtttgagataaatacataccagtattatctcgatagatctccactccaagaaaataatgaacctgtcccaagtcttttaaacagaaggtcttgttgaggtcattaacaagttta

SEQ ID NO: 236579 - DNA, 1396 bp, Cannabis indica
caaactggaagtccatttgtgaatcagaattccagaattaacacaaccgaccgaaattttggttaaggggcagtatgcattttgcccttttttacttaaaatgtgcataactccttactcgtttattcgattttaaaaaatccagttgcattctcttagttaaatgatatgtgatcttaaaataaatttaaaaaatttagatatcatttttgtgaaataacttgtggcacaagctagtgagccaaacttttaacttataaaccctaatgtactaaatcactttaacaagactaaagtaaacctatgaccatttaattgtgagtagtcttgatgtgaatgcggttcttagcttgatttgcatggtttgatccaaatgtgacttttctcaagagttgactttgactttgactttcaggttgacttttgattttcagcttttgaagtcttcttttgaatagggtcttgaattcttgatatctcgattaaattttttctcttgtgaagtataaagtagtttatatacatgttggattcacttttttgattatgtttaattttattgagcaaatattgatactttgtgaatttgcttgcaaaatgataaaaaataaattagtaacaaataatatcaaatatttgtttattgcagacttttgacaattataaagaacaactactctttattaactactactaatcccacttactcggtttggatgttaaagcgtgaatgaacaatagcaacaatggtaggttgaaaaatctttattaattacagtaataacattatagtcatggtggcggatttggtgggcctcctgaaggcccaaaagggcctggtggacctcctggaggcccaaaaggacctggtgggccgaaagaaggtccaggtgggggaactgggtcgaaaggaggtgccggaggctcaggaggaggaggcaaaggtgggccaggtgttcgaggagttggccaagctggcccgggaggaggagctgttgggccttctggaggcccaagtggaccaccaaagcaatcttgtatcaaccagcaacagcataacacgtagacactgcaaaaaattagagaggatgtataaaatttctttttctaccttaaaaatgttattttttcaagaggagtgctaagcaaactctcttttgcactctcttttacactctctttctaattgagtgacatgtgtaacaatttaaattatgtttaaaaatagttacaattatgtccttatttagtttttattaaagataattaaaatgagtcatctcatttatttattttttatttttttaaaactaataattaatttatttatttttactgataattaaaatgtgtgattctatttacttgtttgtttgttttttagacaataaaaaac

SEQ ID NO: 236580 - DNA, 1008 bp, Cannabis indica
gtcatcattcttagttctgttggcagcatgcgaggtatatgtgaaaacctctggcacttatcacatttcctgagaaactcgtgggtgtccttattgatcattggccagtaatatccttttctaatgagcttttcagatagactttgacaacttgcatgatccccataaaagccttcatgaatttctctgatgattccattcgcttctgtagggagaacacaccgaagtaggggcatcgaataccctattctatatagtttgccttcaattattgtgtagcgaggcattgaatacaatagttttcgcccctcatttttgtcattggaagttgcccatcgagtaagtaactgataataggagtcatccatgtaggagaactgtctatcatctcgacgtcttccatttcacatatgcttgcttgcttagcatctccaccgaaacttagttcaattcatccaagttgttctgcgaggccagttttgctaaggcatcggtgttggagttttgttctcttggaatctgttcgattttaaagtaattgaatctttccaagttcttccaactttctctaaatacttattcattttcaaacctttggcctagtattcccagaggacctggttcacaatcagctgcgaatcactatggaaaatgaggtttttgactttcaacgtctcagctatctttaacccagcgatcaaggcttcatacccagcctctttatttgatgcatcaaattgaaatctcagagcatagtgaaacttaaagctttctggtgatattaatattacccctacacccgaacatttctcgttggatgcagcatccatgtataacttctaggtttccgcatctcgttcaacaggcagaatttcttctgaagttataccttctatcaagaagtcagccaaggcttggccaatgatggatattcgagggtggtatgttatgtcgaactgccccagttcgattgaacaatttatcaatcttccagaagcatctggtttt

SEQ ID NO: 236581 - DNA, 1288 bp, Cannabis indica
acaaatttattttaatctaaataaaaaaaattaaatatagaatggttaagaacaataaataaaaatgatgtggttacataaaagaaataaaatcatcgtatatgagattcatttattatatttcaaattttcgtcctattttctaaccaatgtttaaagaatgaagataagttatcgttataattcaatatattagtcaaataaattatagattgaaggatattaaaaaaaaaaaaaaagagttcaacacattgacactttgttttatactattttgaaatacgaaatggaaataaaaaacaatagttataaacaagctcaaatgatatttttttgcttaatgcttgtaggacatatttattatagcaaaatagtatccttcaatgattatttttgcgaagattctctttctgttctttctcctcgtcaacaagtttaataagtgttacaatccagcagtgctcctccttctcgattgcatggagaagcttttgaatagtgacatgttgttgcttttgaatgtcgatcgcttctttcatatttagctttgggatgcatcgcgattcaaaaagttggttaagcttatgccttctaattcgtatgtcacttatgcgttgattaatttcttgcctctttttggagaacttttctgttatagatatttcttcatcgatacgagatgtgccgtcccgtactaaatcaattaccttattcaagaaggtatgactattaccatcagccgtaactatttttatttggccatttgcgtttttctcttgtgagttgtcttctcattttctcttaccttttcggtcctgtttgattggattcccttgatcgatttccgcttttattgatttgatgttgtacaccacttccttctgtcgatttttagccatttttttttttttgattgattggtttgtaagatgagtgtgacaatatagaataaactttgcatatatagatgacaaacaaacttgtattcctgtattctttaaatactcaacttatgaataaaaaaaaataataaacacggttatatagtatgagataaataattattttcatttaaaaaattacattaaaaaaattggatatagatttacctttccaatacagatttgtgtgaattccaataaatttcttatttagagtcccaaaatatatttaacaatacttgttaattagtcactacacatttaacttaaataaaaatttttaataataataaagacatcgtttaagtacagtacacgttactgatttttgaaaaatttaaaaatta

SEQ ID NO: 236582 - DNA, 1051 bp, Cannabis indica
aggaggacgtcgcttctcaattgctccatcaaatgtgtgatcatatctcattcgatgattagacgacaaaaatcttctatgcccaacgtaggaggtcttattgagcactctcatggaagaagtgtcttcgttacatgtatgtagggcaagccttgtaaccttgaccactccacccagataagatgctgcaagcaggaaaatcattcacagtccacaacaaagccgcacgcatcttaaacattgaattggtagtagcatcccttgtatcgaccccattcacccacaattccttcaattcgtccaccaaaggcctgagaaatacatccatgtcctttcccggtgatctcgcaccaggataagggtagtcaacatgaaattgttgtccttcatacacaaccacggtgggagattgtagattgccaacactacgggccacatgctgtacgcttgactcatgtttccaaatggataaatccatcagcagctaaccctaagcgaacaattctaggatctctagcaaaattaggatgcaagttgtcaaagtttttccacgctttcgcatctacaagatgacacatgacaccatcttctctaactctcccagtacgatgccataccatctcctttgtagtatgtcttgaactatacattcttctcaaacgtggactcaacagaaagtaacgcatcacctttgtggtattttctgtccctttgttgcttcggtaatccatctactagtcacacacactggataaaattctttgattgcattctcattataaaataagcaacaatcttgaacacacacatgaattgattaataccccaagcctaatctacttagctttttcttggcctcataatgtgatgttggaatgttgttctcttttggaaaggaaaacttcaacagtttcaataattcatcaaatgtattgttcggaatatttccttgcacttttaaatgcatcaattttgctagaaaattgagtgacgacatccaatcacagtcagggcacaactcagcttgaatctccttaaacatttcgtcgta

SEQ ID NO: 236583 - DNA, 2163 bp, Cannabis indica
gcaacattcctgacttcaatccaagtgatggcctccttagggaaaaggttaatgcttagaccttgattctcagtaggagacacagtgtgaaatgcatttgccatttcgactgcctctagaccaaaaatagcaatgtcaaaatcaagcaattttgttagggtagatgtagtcattgacagcctagtcataagctttcttcttttcttctttttcattattgaagtcgcgggtaagagtgacgacttgatcctccaatttcatgactatctcctatgcttgatttttagctttgtcgagatcctcgatcttcttatccttatctactgcctcaagatttactttcccgatcccctcttgaaacaccattctttttcttcaaaagctcattatctttgagaacctattgattcacagtaatggctcgggagaaaatggtcaccccaaggatcatggactcgacacagtgagtccaaagatcattgacaggcattccctcaatatgggtaacaaggtcatcacttacatatttctcctacagagccatgaagtcatgagcctgagcttctagtttcatcatgggtttcttccccttctcttggacatttttttgatgctttttggacaagtcaatgactaggggtcaacaacatcacttttcctcttttaagcaggattcacagaagatggagtcagaacatctttcttagtctttgatttgcaattgaggatcagagcattcttcaagaacttcatgtctgcataattaatattttctaagtacaagtaaatcgtgtaaacttacataaaattattagtacaagcaaagttgtgttacctaagatttgcctcggggtctgcttcggaagacacttgtcaatcttcactttttgcttctcagaaggatctttgtataccgattcttgctgaagtctaacgttagggaaaattaattaatgttctcacaacttaggagatgtgcaaagaagatgccaatctcgatccctaactagaagattagttaaagcttcagcaattcccgcgtgatctggagctaactcaaatagagctggtctacctacgagtacaaacaaatgagcatttgtgaaacagacaagaaaaagactaagtatggaaattagcaacatacgaagatgatgattaaagtctatcctaattcctgatagtgagaacgcataaaaccactttgatttttaatctcccatactggatactataccttctactccattgagttcagaattagaccatttgctaaaacaatagaaatttttgtcgtgaccaacattttaatgtcataaaagtagcagagtcctcaatcgtgggttccccttgcgtgtattccatatacatcgcataggatccaagaactatcctataactgttgggagtaagttgaaatagagatacatcataatatgtcaaaatatctttgataaagggatggaaaagaacaacaacaccacaacgaacaatggatattgaaataatgaccacttaagatcttatgattgtgggattagtataaggacgatgaggatgctgaatcgatattggcttcgtgtattcaatgtttatcagtttcaatctctagaacgttgtcaggtcagatttcataacctgtgaaacaaggtcctcacaggaaaagggttcatcaagaggcgcatcctcaacccagtccgcatcatcctcatcgtcacccctttcttccccacaatcaggtaaattgaaatcttgtgccatttccacgacttttgcatttgggacaacccttggatgaataaagctcccctgagccgatatcctaatatgaatttctaaaacgatgaatataaacacataaaaggtatgagaaactttacagtggttgcagcggaatctgtagcagagtatcatcaagatctgagcccgattctacttcttgttgtttggattcttcacagtcttacatactatgattgaggaccaacttgttatgtgtgagcatgcactcaatcactaatggctgaattttggtttgtgaagaaggctatggtattttgaattagaagaagaagaaggaagaggtctcatcaacctagagagaaaactaggtttttagctttggaggcattagttggataatgagaccatagccttcctttt

SEQ ID NO: 236584 - DNA, 1603 bp, Cannabis indica
tttgttatcaattacgttcataccagaaagataagggacgactttccaggttttattcttgacaagtgctataatttcttcatccatagcatttttccaccctggatgagctagagcttcagagacactagttggttctgcaaaagaataaacctgtttagcagcacctaaatacactttcagtttaaaaattcctgccttccctcttgttgtcataggatgtgtaggcataatcgggttgacaggaacatcaatgacagcagcaggtatttctggtgttgtagtggcaggttggagtctcagcttcatgtgtgtccccttgcatatgagcagtatcatcataaaccagagagtttggtgaatttacatcctgattgctgtcaggtgaaggaaaatgagcagatggtggttctccaacagatgcttcaggatggtctgaggtgttggagaatttttcttgagaattaatggccagtgggagaactgtactccagctaggaactgagacttgaatagattgttcagattgatgagtgttgagaaaaccgattttgaaagggaattcatcttcattgaagattacattcctggagatgtaaagtctccctgtgctactcaagcacttgtagcctttgtagctctcactataccctaagttgacacattttgttgaatgatattggaatttatgggtttggtatggtcttagacacgggtaacagctacagccaaagctttttaggaatttatagtctggtttcttgttgaacaaaacctctatgggagatttgttcttgagaacaagtgtaggtagtcggtttatgagatagacagaagtttggaaagcatcccaccaatatttttggggtataccagcttgagcaagaagagttagacccatttccacaatgtgtctatgtttcctctctgcccttccattttgagcagaagtatgaggacaagaatgatggaaactaataccattttgaacaacatgatcattaaaagcttggtattcgcctccaccatctgtttggagatactttatctttctctcaagtaaattctcagctaatgttttaaagtgagtgaaagcttggagagcatcagatttggcttttagagggtatatccaagtgtgcctactgaaatcatcgatgaagtgtatataaaatctataattagtgtttgacataactggggcagggccccatatgtcggtatgcacaagttcaagaggatgtttagcatgaaaactatttgctttgaaaggcagggaatgagatttgcctagttgacatgcttcacaaaaatgctcaacattactaattagagatttttcattaatttgagtaagcacaaggtttaacactctattggacggatggcctaatctcctatgccatttgtccttgattgaattgaaaaaagcagcagtagtgtgctgagttacattagacttagacagagtaaaagcaccagtaacgggtgagagttgagaggaagagaagttgctgtagcttggttttgtcacagagtcagtatttggaatgcagaagtgataaagactatctttaagcctcccccgaagaaccaccttctt

SEQ ID NO: 236585 - DNA, 589 bp, Cannabis indica
tatgcaaaattcaaaaaagtgtgagtttttgttgtcacaagtgtcttttctgggacatatttttggaaaggacagggttatggtagacccagggaaagttgaagcagtaaagaattggcccagaccgaaaacagttattgaagttcgaagtttcctcagtttagccggttactatcaacgtttcgttgaggggttctctaagattgtaatgccattatcttaattaactagaaagaatcagcaatttgtgtggtcagatcagtgtgagaagagttttcaacaactaaagcaaaggttgattacggctccggtgttcgccttgccaactgatcaagagaagtttgtggtatattgtgatgcatctaagcagggtttaggttgtgtgttaatgcaagcagacaaggtcatagcctatgcctcacgacaactgaaagattacgagcaacgttatccaactcatgacctaaaactagcagcagtagtgttttccttaaagatttggcgacactacttatatggtgaacgatgtgaaatttatactgaccacaaaagtctcaagtacttttttactcagaaagatttgaacatg

SEQ ID NO: 236586 - DNA, 5951 bp, Cannabis indica
aggatctatcacaactactagaaacccaatacaccatctcctaaaaggtctctagctttcaaaactgagatgatcagaatttgggaaccctaaattgttcccatgaagacaaatggttcttcaaccttacgctgaaaagtcagaattttcctcttacaatctgtactagttgcatattttgacaaaaaaatccattctaaggataatatgaaaatatcctaaaaccagctcgacaagatcagcacttcactctctaccatccattctgatccatatagacctaacccctctcttggagataactaactctccactaggaaataggattccaaaccctatcatataattatcacaaggcttacccaattcgtcaattactttggcacacacatgtgagagtgtagctctaaattttaataatacataataaaagaagttgttaataagaagatgacctatcaccactgaagggctagcctcagcatcagcctaagtaatgacaaacactcgagctagcatgggttttgcctactgctttggttcttccctctttagttatggacaatcccttatgtagtggcccatcaagcaatattggaaacatgccatgcctttacattcacccagatgatgcttcttacaactagggcattttgggtaagtgtaacggcctttagaatcaccctaacaaccatcgcgatcctgattcgcttagaatctcttgctctggttcaaaccatcggatgctggtggagcttttctcttatgatcaaaggttgaatcactaccattcttaccaaatctaaaaagtaagaggagaagtgactccaccaataatgtgatttcctcggggctcttgaataaactcaactacacccttaacacataattccttatctaccatctaagataggtagtggcatcatctatggtgatcatcagatgatgcttgattttagggttgaatccatccaaatacttttctttcttacttaagttagtaggtgcaatttctaaggccaatctagcaagcctgttaaactgggtcgtatacttagttatcgacattgattccccttgaaccaactgagtattttgcattgaacaaatcttggaactcctcctaggtgattaccaaaatgtctcgagttagggataccatatcccaccataccaaggcatcatcttggaattgaaagggagcacaagtcaccctagcattgttagtgactcccataaaattcaaattctatttatagtagttagccattgcttggccttcatcaggtcaaggcctcccaggaaaattggaggtccttacttcctaaatctctcatatagtagctttaatgggttaagagcaacaactgttctgctagcaacaccaaagctacaacgaatggtacctgaggtagagacacaataggatatccatgttgcctcaacctctaaatttatttatctttttgttgaatcctagcttgtattttctgcaaatctttgctcctaatcctgtggagcatgcggtagatttttatgaatacctctgtaaagcctaccacaacctctactgacaccacaagcatgaggagaattctattctccttgaccgccaccatcctcgaccatttaccctgacctctagtgtttcattgactccattctataggacgtgtttgcaaaatcacaggttaggtcagtcatgcatcgatcaaaactataaactaattaccataaacatgggaacttaacatgctcttaattttctatcaagctactaatattcttcatatcatcgttttctattcaaactaatttaaactactaaaaacacgtaaacgcttactaaaccatgtgtcgagcatatctttgatgatgattgtacataagatgacaatctttgaaagataacctggtagatctgatgccgaattttaatgccttactagtttaggcacgctacagtgttttcttctaattattgtgcattcccttactaataaaaggacttattgaaaaacgtaattaattaaattttcgtaaattaaataaacttataataaataaccatgagcttatacgattctgtgatccctttttttttacaatcattttcaaaatgctacatataatagtgtcgcctagcgaatatcaaaatatgagcccaactatcccaaagacccaaacacttcaaagtctagccgcctcgatatgtacaatcttcatccaactcaagactcactacatctcagcctttgctttgaccttacttacacatgtaaaaatatttgtgagtcgatagactcggtaagaaaagtatagatataaacatataaccaaactgtaactaggtgcccatacaccaaatcaattttatatcccacgtccaacatgtacaactttcaaatattcttaatggcagtatgattgatcataatatcaacgtatatttagtactctagtcgtactaatgtgataacatcaatgcatactatatttccaatcataaatcagttgatattcagtgtaactctaagtatactaatatcacttttactgatatgctaactaataggaaatcataaaatatgtatgttaaacatgtatggatatatatcattatacgaatcttacctttattcttaattcaagtgtgtcggtcaacctgagtgaaaactgctgctcgatgatttaaatgccctaagtcacaatttacataaaactagtaagtgactcgctaactcaatttaaaagagttaaattcaaaattaaaaattttcctatcgatgaatagtgtggtaataccctaaatatcaataaaatgcaaaaactgaggctcccaaaacttccccaaccggtgaactagatttaaaaactcctaaatcgttctttgtgattttgcctggaaaagcctgtttttctacagaaaacacaaaaaactttaaaccaatttcaattttaccccaactcgaaccaaaacctccaaaacacctataaaaatcataaataacatataccaaccagaaattgcatcatcaatacacaatataaaaaacttgccattgttgagcaagctttgaaaaactcaaactttctcaacatttaaaaaaccacaacaagggcaaaaaatagaagaaaacactcaaattcaactccccaaattagcccctaagttccccaagctcggacatagagcagaaataaaattgcttgctcacccaaagcattttcttttaaaaaataaaagagaaataagagtaagggcttaccttagagtataacctcaatgccatttaaattcttgtagaaattgctctagtatttggtctgaattaataaagaaaagggatagcttcttgaggtttctttgtggctgaaccaagagaggcaaaaaggatgagattgtgtaaatttttgtttattcttaaataattctaattttagggataatatctgtaatgattgttatacttagacatgggattagtaggatacttagcactaattaatctgattatgtgattatttgtgcattttatgctttgtagaccccattttcatgaaaacatgtgttatgattattatttttgaattctagagattttattgaattataagtgtgatatgcatgttatctgtgaattttcatgtttttatatttttatatttgataacagtgtaaatgggccagacaataattttagtcacatgaatacaaatttttatcaagtaatttgtagggaaatatcattgaactttttagaatatatgggtttagggcaataacaaaaattggaccatttcacccctagggtcacgaggtaactttgtgagcaagggcattttagtctttttgtcctttgattagtcacttattttgatggattagggagctatgactcatctcatttgatgaccagtagcttggagtgaaattaaaagaaaatccaaaatgaaaaaaataaagtcaaagttgaagtaaagcaaaaaaacttaccttactgcttcctctccttcatgacctaaaaccacaacaaaaccaaggggttttcatcattttcaagctccatttaagctaaatttgatcgaggtattcaactcgtagcttcttggtttcttgatgaaatatgttggttatgttgtgtctagaagttctggacaatttggaaagatttcggttagaattggagggaaaaaaaattatgtttgtttccaactataaaaatggcttgccatttttacaagggcaaaaatttggtctgccatttttggtaatttaggaggattgaaattcgtatttttcccataaatttcacttgattgtgtgttttagatgttctatatactgttatgaagcttgcaatgagctctataatatgatatatatatattttagagccaaaatataagttttattttagggtattttcaccatgtagttcgatagaaaactctagattctttttaagaatccaaaagtgttctggagcaaatacttatcagcttttttttaaatgtgacttagggcctccgatcatcaacacctctttccactaaggttcaatgttacatttaaagttggaattgaggtaagactagtatatcacacatacatatgtacatgtttatattgccagattgatgacatatcagttgtagcaatagtttatacacacaagcatgcatatcatgattatatgtgtttggaaatttaagaagtatgaaccaatgctaccacatcagtatgactagagtgctgagtatatgttgatattatgattggttataccttggggtagtacaagttgatgttatcatggcaacacaactatggtgtcagcttgatattatggtcagctgtacttatggtatggattgacgctatcattgcagcacaactatagtgctgggctggtattattgttaatggtactgtcaagaatgtttgagaattatatgtgtttgacgcaagttatgacttggtgatgggtgtatgggatcctgatcactggtcaggtatttgtttatgttttatgcttttcttactgagtttgttgactcgcagatgctatgttatgtgtaggtaaaggcaaggctattgttgaatggtagtgagtctagatctggaagaagattgtacataacaagacagtttgacgtggagagttagatctttgggacagttacggctcacaattttgtagtcggtgtgctacatcttttgattatgtacagttgaaaaatatagatacaagatcccaatttttgtaaatgtaatacagtttatatttatttattaaagtttaaattttaacactttttgataaaccctttgattagcaaaggttgcacagtaatcatgaaaagcactgtagcacgtctaaactagtagggtgttacaatttcagtattagagctgccaggttgtctaccaaggaccataaagatttgtacaatcataatcatagataagctcgactcatggttcaataagcctttacatgttttagtagcttattatgattagaatagcttgatagaaacatgttagtgatatattgattgttaatgtgtgtgtctaagatcccatgtatgcggtcataagtttcttatgttgaccattgtctgattgaactgacttatgggtctataggctagtatcatatggatacctgacataatgtacaaattcaaggtaatgtggtcggaactgggtcaaggccatcaagatcggcctcatctttgtggtcaaagatagaggcattggacgggcttgtggtgtgggtaatgttaatccaccataagctccacaagattaggagcaaaggcttactgagttgcaagccaaaaaacaacaacaagatgaggtgatcgttaggctaacgcagcaaggcccttaggttggtcctcttcctcatatttgtattactccaggactagtgttgctagca

SEQ ID NO: 236587 - DNA, 869 bp, Cannabis indica
cccagttgtaggggttagtcaagcctgttaacttggtcgatagttgaactcaaagctaggtccatagctttaacgaccaaggatgttggtggctttgttctaccaaaccttgtaaaaatcgagagtttacaatttctatcactaacctctttacatttcaagtttgctatttgtttatacttgtgtttatcaatgttggggtttctaaatttttaaaattagtttaaattttcaattccctccccactcctcttggaagcatatattgggctaacacaaagcaagtcccatgcttttcttcgaaggctacagttcaattcgccatatacccaaataagacgaaacgaaggatacccattaagagaaacacacactccacgtaatttttagaaaagatatttatttttacctcatcattatttttccatatcatagagataccaccacttctatcttaagcctcaacaacaaagcaaccctcaaacccaatttgtcttctcaaccacacaactcttgctttatcgtttcacataaaaatatcatcatgggcttcttttgcaatacaagttcttttaggaactgtatagtccgtggaggctcaagcccatgatagttctagcttaagatgctcataacgactggcgagccccttctccaaggcccgccattggtaagttttctgaaagcccatctttcccctcaccttacttcgaaggcccctttgaggaactctattgttaactattcaaatattttttaaaatttacaagttaaacattgtaactataatgaatatcgcaatgaaaaaataggttaattaaaatttttgccctccctccccgcgaactttgatatgtactaaattatag

SEQ ID NO: 236588 - DNA, 2035 bp, Cannabis indica
ataccacatatagttttacagaaaaatatttataaaatacaatacaatatacaatgcaatacaatacgacttaatacggcgttccaaacaagccctataagtattttagggtggtcttcctaagtgaaacttacaaaaatactgaaatttatgttaacttttacaaaaatattaccacacagaatttttttcaaaaatactgtttttttttataaataacagtaaaacacaaaacaaaacaactaaaaaataacagtgaaacaactaaaaaacaacagtagaataacaaaggaaacttaacacagtaacaatatttttttaaaaaattctgccccacagttaaaagaaaaaaaaaagtaaaaaatttcagtatgtggcgtaaaaaatcccttcttgtttggtaacttgtcactttttgaccctactattttctttcttctgaatttttttattattctcccttattttagggtggtcttcctagtgagtaagtttttttattttcttttaattttttgcactttattttttactttaaatttgctctacgaattctaggtatatataaaactgttcttcgaaattagaaattgaaatttttaattttaggtttgaatacacatgtgcagttcacgacgtttaatttttaattgatctcaaattgtttttgttgaaaaaattacttaaaaatgcttattcagtgtttctagacatttttagtgttcttcatgtgttctttaacctttgacttaatcttgaaatctatttggtcgaagcattagaaatgttttacccttgttaaaatcatactcgtgtgtctggttcttacctttctctctcctccttttgtagatggacctggatgatttagggaggttagcaccaaatagataatgatcttctccaactgctcttcaaataccagtctagtctccatgcaacttcaccatcgtcgagtgagagttcgtcaacttcaaggttcgacgagtgggaagtcacacgtgactcatcagagtctttggagcctgtcgtgcaacaccaccattaccccagccggattggcaaagatgggtacgaaagatttatctagaaactgaacaaagattagagacattacttgcccgcttaggttccaggcagacgttctaggcacactttcggagggttgtccagagccttcaagggaagcctccgtgctagcggggattgcagttaatgaatataacttcaatttccaatcaaactattaatctcgctgataaaattgaagcagttaattatcccaatctccttattagatgtaatcaaggcgaagtgctcaataataaactcttttacctaagcagtaaatctatgaagcatataatttctttaacttagataagatttatggagatagattaatctaggaaataaatgaatgaagcatataatttatttaacctagattctattcttcatcacaattaaaatacctttgacaatattaaaaattataatttatcacaaacacttagaatcctagactattaggtgaatagtacctaaaataacggtatattaaagtaaaacctaatttagtggtcatctaaacaagattaaaacaataatcatgacattgaattagaagagtataaacaatttgatataataaaaaactggaaattaacattcaataatggaattaagaattcatgtcttaggttttgaaataacatttaactaaaaggaaactactcagaattagtaacgataattataataaatagtaagagtttaaggagaagaaaagaattatgatgaagaacacttcgaagccgcgatctccgtctcttccttgctctctctctctaagtttttatctaaatttggtagctctaggaatctgaaattcatagcgtaaaaggttctatttatagtgcttgaaaagatagatgaatccccttaaaattaggatttttttttaaaaaaaaagagataagtacggcgctatagcacctcgagacttgcgctatggcgtccatgagatatttcc

SEQ ID NO: 236589 - DNA, 655 bp, Cannabis indica
caaaaatagcggcaatagtcctccaaaaaagctccacatataacaagagtatgctaatttattatcactaaatattaacaatttcttacgtaattttggttaggagtgactaatatacctaattttaattgacaaggaactagaaaactcctcaggacgaatatacacttagacaagcgaacttttttctttttctaccactaacggtgaagataaaataaggtttaatggctgatgtgtgtgaatttttttaaaaactattttaaaagtaattaacattttctatttcataactatttcttacataattttggttatgagtgactaatgtacctaatttttattgacaagaaactaagaaactcctacggacgaatatacacttaaacaagcaaacttatttctttttttaacactaatagtgaacttaaaataaggtttaatagatgttgtgtatgaatttttttaaaaaatattttaaaagtaattaacattttctatttcataacaaaataaaacagtttttcctatattaattctttgatggaatcactagttacaatagtttaaaattttagtatatccctattcttaatttacatatatccagtgaaaaagaagagcaatttttatatttgtatcagtagtactatat

SEQ ID NO: 236590 - DNA, 1585 bp, Cannabis indica
cttgccctcagtgaatgtatgataactttgacatcattatccataatcttctacaaattaaagccaaaaatatatacaaacgcaccgccactgaacccaatagagagacacccccattcatcgaaatagtttgacgtccagatcggtattgacatgaatccccattgggcactcaccacactcatctatccccacttcctcttacaagtaagttccatttattccttgaattgtataatttcttgacgctacagaaatgtatgccaaagttttgattatggataattatttgtatgcgaatgtaaggattgggtgtgtttagcctgggcaattttaaagttgaagaattattttagtttaagtgtaggtgaaactctgggtattttgggtcatggtgtgttttcatgcattggttgaatatgaattatgcatgtgttgaaccatacctaaatttcctcattcattgtcattacggttccaaacaaaatgtctagatttgtatcgtttattcttgcgttcctgaccagttatcctgaattatagcttcatgaggatcatgctgatcctttggatgactggttcagaagggacctttccaagcagagtttaggagaggccttctccagtacccatacttaattgtttaccgagatttgtaaaaattaagtcaaataagagctattaaataagtaattaaataataagatggagatttttacatagtttgggtattaatgaactctagtccaagagccaatgtattggcctaagaaaacttgattgattacaaatgagtctcacgattcttgctatattatttttctctctcgatttctcttagaagaagaatacagcttagagagaaattaggagttttcttatctgccccccttgcatgaaggagaaaaagaatttttataggctaagattcagattcaagcatacacgtgaccagtttaggctctttgtgcaaaataggcccattgttgaggtaaatacataaaatacatgactttgaggtccactacaagtgtttggcttgtgcggcaaagggatccgtacatattgggcccacgcagtctatacaagtgtcacgtgtgggggctgctgcagtagataagaatatcagtaggtgttggttagaaaagaggacgtactccctttggtagtgctcgtactatcatgttctgacataggagacaaggtcagattttgtagggctaggcgttagatgatttccacgtcaccctacaagggcctttcagacgcacctcttggacttcttctccagataaacctcatcgattgtctagaggtctttatttgctacatctcttggaaggaagaatgggcttctagaagcaaaagggtctcgtctttgaagacgaggttcttggggtttagatgggctcaggcctttctccaatttagactgggcttttgtatattggaaggcttgggccttatcttatacaaaccaactacactttgatcatccaacgtctcgcccatccagaaacatacgatgacagtttacccccctaaacttctaaaacttgagtctggcagagcttgcagtctttct

SEQ ID NO: 236591 - DNA, 1279 bp, Cannabis indica
agatacatcaaagaacatcaaactaaacaaaaaaattaatcgatatgatgaactaaattaagattcaaaattaaagttgatgctgacataaacaaaagtaaaataattagaacaactctataaagaagaacaaacactagccttcttctttattgctttcaatggagttacaacaatgcatcaaaatttattgaattcctctagaggaaactcaatactcacttgaagaaaattctcttagaaaagcttagattgagaaacattcaactcttttagagagaacactcaactcatatagagatcacaaagtatagaaacactcaaaattaacttggttcttctctcagtgcttgacacattatctcatatgcccttatttattttctattctctcaaattgaaatgacttttgttatatatatatatagtaatcaacaaccagttaacttcatttcactaaacaacaattgatagcttagatgactcccaacagtaccaattaatcttaaattgatcttatgtcactattaataaattaggtaatggtaatcatggaggcagtggggaagttagaggtacctcgaaatgtcttctttgtccatttggaagattataaacttcaggacttcgacttcgaactcgagatgcatgaggttggttctcagagttgttaaatgaaccattgctatcactagatgaaccgttagttgcagtgttagtattattttctagctgctgatacataacagataatgcatttgaagaaggcattttatgtgtatgatgcaaattatacaaccataacacctttatatagctcctgagaccgcctctcctttaaaaaatagtgatatgaaaagttgattattttagttttttttttaatttattatataaaaagaaaacatcactttgatacacacgtccattgattatgactcagcatataattattttaattaaaaataatatattatttatgaaaaagtaatacatcaatgacaaaataaatcttatgttttccaaaatagtataaataggaccctgaactcaaatttcaacaattttatattttaatataaacaaactttaagacaaattctaacacgaacaaatacaaaaaatgtaaccagttttgtcataacatctctagatcagattattattaaatcttattttgacaaaaagccatttcagagtcttatttttaccattttagaaaataataaaataataattggacattttataaaagttactaattggacattctattttg

SEQ ID NO: 236592 - DNA, 541 bp, Cannabis indica
tttttgaatgaacctactccaaaccacaagggacaaagaaaggtatcaagagagaacccacaaaaaagaatgctcaaaattctccaaggaacaacaagaacacaaccaaccaacctcctaggaaaaaaaaggttgccaatgctttagagccaggctgcctgattgatttgcgaggcagagttgcacgaaacgataggcttgatgctcaggtacaaaggcctaacgtttggggatggaaaaattgccctagtaattttgttaactagaacgatggggtagacaaagttcacccaattccagaagactatatatcaacataggacctccgggaacacttaaatggaaagaaagatcgagctagaggcgagaaggaaagacctcatggaaacgatctcagaaatcacattaatgacaaagttcatgggcatgaattccaagaaaaacactaagcctctagaagaccaaatagttgaatgactaaggtcatggaacgtctagcccgaaatcaaagtggggccgtatatgactcaaaagaagaaga

SEQ ID NO: 236593 - DNA, 939 bp, Cannabis indica
tcttgtgcgttgtcttttgtagatgaactcaggtgagtcttgcgaaaacggacattggatcgaccaggatgagcttcaacttctgcacgaggatcatccttgtctttgttctagtccaccttcctctagcgaacgacattcttcaaaccctgtacccaaccatagattgatggctcgtacaaagaaaactacgtgtttggctgacacgtctgaccctcaaatggctcgacataccgttttgcctaccgccgaacaggatccagctgtccaaatggaggaggatcatgaaggggacgctgatatccaggagatcaaggggcaggacgatgtacgttctggaagttcctccgaggaggaggaataggcagaggttgcacccccaaactacggggagtacaacgggctagggagccagtcgatgctgacagagacatcctggttgagggcgtggactacatcagtgaggaacttgttgtgacggttcctcatagaaggcaacgtgccttgggcttcaggtgggtaagccctccgtccaaggttactgaggcgcgccttcggtctctcgactaggatgggcacttgggtgacttggactgctacattcccgtctacaacaattgtgccacaaaccctgaaaaggggatgtgtgcctagtcgggtgcccatggttaggaaggggcattgatgcctttgcatcaatacttcaagaatgtggcagacttcttcggcctctgcccagcccagttcactcctaagggcatcaagtatctgtctgccatcttcgtcctctatgcctcccagaattagggtacgccctctccccatgaggttgcttggtactttgatttgaagtccacccctaagcaaggcaggtcggggtacttctacttttctcaaccaggcttcaagtggttggcgggcatggacgatacgtccatc

SEQ ID NO: 236594 - DNA, 826 bp, Cannabis indica
ccacatgggacaaaactgccccataagttttattataattttacttttcaaaattttttatttataaaaatatgtaaagttttaaaattataaaattacattttacttaaaaaaaaactaaaatataacgagaattcaacttcatgataactataaataaactataaaataataaaaaaaaacaaccagataaaaaatctcctgataactataatacaactataaataagttaaacaaataactaaaaaatgatttattatttttaatgaagaagtatttttgtaaataaagaagattaaagtgtaaaaataaaaaaaaaatcgtgttaatatatttttgtaatttttttttcaaatttttagtctgtaaataagtttgcaaaattctacggtgcactctctttttgtttcaacacttgaaaaaaaaaattagtccaattcttttttatcgtgcatattgtaattatttaagacattctcgaaaaatttgagaaatttaaaaaaattaacacacagaaaataggattcaaataatttgttgtacacattactcttttatttatccgtgtctgaaataaattgtttgaacattgctttctatgttgtaatttaattcaagtaatctcgattcgtattacagatgtagcatgacatctaagtgaaggtattgtacataatagagattgcatatgacaaggaccgatatgaataaatttgtctttatcaaacttactatagacctaattcatatcataaagatgatcaataatatatcggcctaaatcttgagtaatcatgaactagtgtttatgttattagttttttt

SEQ ID NO: 236595 - DNA, 872 bp, Cannabis indica
agatagccaatattccaatttcggtttctacgatacatcaaatctgcaacacatctaaggcaaggcgccttggatctaatactttccattaaatccctaaattcgtcataacccaaccaaggtatccaaggttgccaccaaatatcgatatcctcccccgaagtgataatagtacaggacccatgagcaattgtttttctagcatttaaaatgcctctccacacaaagctatcattgtttttctcactgatactccaaaaggactctctaggaaagtactttcctttgaacaaatgacaccacggtttgtccattttgctcgccaattgccaagccaatttggttaggagagcatggttgatgtcctcgaaacggcgaaagcccagccctcctctctgttttggttggcaaagagcattccaagagattgcagcccaataattcttgcactcgggtgaaccattccaccaaaatcttttgacaatagaatcaaggtctctacaagaagaaatagggagttggaaagttgacatggtgtacgaaggtagagcaagtgcaaccgagttcacatacaccgccctccccatcttggatagcgttttaagtctccaaccctccaatctttcatgaagcttcgtcttaaggaaattgaaatcctttcgtttactacggctgaaaaggaaaggattgcccaagtgtttttcatcatcgcgaatggttccaatattcaaactgttctctatagcgtctttcaaggatcgggggcaattactcgaaaagagaagtcccgatttctgcttactgcatttttgaccagaccagtcttcgaatctcttaatacagctattaagcacttccacttcgttgagatt

SEQ ID NO: 236596 - DNA, 612 bp, Cannabis indica
tatttgattgtcaattactatctttctatacttggaagatatgatcttcaaacgagatcttgggaggtaagtcctgatatcgcgagatctggtaattaatagatgtgatacgaagctggatgtctggacgtttgctgactacttctctagacgctccaaatgatgccttccagattctcgttgtgctagaggtttaactctcctagacgagtcggctatccatcatcaagaaaaggtgacttcgttaatagatttgacctattatcttggttgggcttgaagtcattaaactataactaactttagaaattacatgtgttctcatctagaaacacaaataatatttagttatattcttagtggttatgtatatttttagttgtataattagctttttttttttaaatgttattcaataaataaaattattattttattaaaaaatatttaatttaagtgtatttataaaaataaaatattataatattcaaaatttattattaattatattcttaatttaatcaccgtaatacttttaattttatatataatacttttcactgtttttgaaatataatatactttttctaatttttttttaaaaaaataata

SEQ ID NO: 236597 - DNA, 1951 bp, Cannabis indica
attgtattaagttcgaatgaaattagacacatttaagataagaaaaacccaagttgggttacaaacttgttgttacaaaaatgccactaggggcaaaccattaagtcatcttcctaaacaaaggatgagaggagaagccgataaactcgagaaagaccgtcttcatatagcttgagaaagactgcctgcacgtagcttggagaaagactggctacacatagctcgagaaagaccggctacatgtggagagccttgtctctgcacagacctcattctcctcatcaaaagatcccatttcctgcatccgagaccttattcccagcctcaggaaattcctccatcccaaaaagaggttggcgcaaaggtcttctggtgtaggtttaggtcttgggttggctggattctcttatagaaaccacgctaacttccctcctggattcattcgaaaccacaccaactttattttgggattccttgtcaaccttaggaggaactctaagatcaatcacaagatctatgtctattcctgtggagaagaagaaaaaaggtcaatggagcaacgaaaaacatacaaaaataatgatatgtataaactgactcaaaccaccattcacaagggatgatactcaccttcaagaatcacttgtgaggatctcccatagcggctacggggttcccctggtttggattggtcggaagctcctcagccttggtccattgtttccagttccaattgaggcttgaagttcttgaaacgaatggaaaatggttggtgcatcttggtattatgagtttgggagagtgaacttctgaactcagaaaggacattctagcaagaaagagatgatccattctcaaaatggatctcaccaaaaagccagaggtttgtgaaaaatgataagcttgagccgcccttttatacacaaagtccagtgacaagaaatctaaggatcgggaaatctaacagttggcagtagggaagaatacgaagggacgattcataatgaccctcaaaatcatacaaccgccaaaatcaaaggacgcattttttccaagaacgaattttgacgaaaataccctctgtaattattaaaaatcactttttaaggggcaattgttatacccgaaattcggctgccatctcagtggaggacacgtgtcaagataaggggaatatggatcgatgcaatcgctttatatggaataactcattaattacgtgagtatcacagtatatttgtaacttgcagactgtaaggtcttaggcgaggaatcaatatacaaactggtgcttagtatattagcgagaaaccatatgttgctgaatgcgaatagcgaggcatcaaggacagtacacgtaggaagacaaaagtgacatatatcaattgcgaaagcccttagtgtacaaactaagtgttacagtcggatcagctcgagaccaagtaagcgaggtgcccgtctcgctatgggaagacttcctataacttcatcacgattagcgtcagcgaggcttacaaccctggcaagtcagaagctaacattcaaatgagcttcgaagaactctttgtaaataacaaccacgatcgacacaagacatgcatcttcacatcggaaggaaaaatggccccggctcgctattgagatcactggaaccaagcttctgccaaagataactccgaatacaataattaaagacgtgtttaattcacaatcattttgacccagtaaaagcgggaaaatcacagctgtatgattttcaaatcataatcacgtgtacattacgtgatatgtaatcaaatcctatgattttagggacgattgttgtaaacatattacagtcaactttgtaattaactgcccattatgtaattataaatagtggcaagtaagatgaaaaggggggacgaaaaaaattcatacaagaggaaccctgaaaaacaatcagaaaact

SEQ ID NO: 236598 - DNA, 768 bp, Cannabis indica
aaatgcaaaagaaaaaaattgatggtagatcttataagaaaacaacaccatataaaactttaaagattttcttcatatattttgacattgattagaacagaacaaacctacacgatttcattgatgaaaaaaatgacaaaaagactaaagagaacttaactctaatcttattaaagagagaacaagataaaagaatgccagaatgaaccttacctctggtgctgagaagaagatatctgtcaccaatttttatctaaggtaacgtgtaaaaattcttctagactgattagaaaatgttttgatttctgatgattatagatacttttggatcaggcatgtgatttggaaaaatatatttagttattctattatttagaaagggaaaaaaaaataaacaaactaacttaccgttcatcatccatattaaaaatagtcccagaaccattagtaggaaaaatatgccaatccagttgaatggcttgtcagaactcttctctctcgattgtacttcttggagtagaagtataatggtgattaagaggattgcttttccaaatgccattgggattttcctatatgcaaaggaaagtttcatttgatcgatcgagaaagaaagaaagacatagaacaatcctttaggtacatatcaaatctttatcgagagacattaattggaaaactcaaattagagagagagggagaacaatctatatatttatataaaggaaagcaaaaaataaattacgtgatattttatatgattttttt

SEQ ID NO: 236599 - DNA, 1033 bp, Cannabis indica
ggctgcgaactctaatgtccaagtgccacctgccatgaccatgtttcggccagctacccgaaacttccaccatggaggtccaaccaaaagagaaaggttttgctagacccactgtccagcccacatttgagactcttggcacgagagtgggaccttgtgtctatgctagtgagactggacctggggttggcaaccctagcattgatgaaccccacatggacctaggggatgatactaaacttgtcaggctaagagaggctacaagacaagtttagggtcatacaaactaagagaggttgtaggacaagtttagggtcatacaaacctcttacatcatgaccaacaagaaacatatgctgctatggatgatgctttcgctcagcagagacgtgaattccaggagtggatggatcgacaggccgtgatcctccaagcccaacaggcagagctgaactactggaatagaaggctaacaacctaatcaggtcattcaatgagagatttggatctcaagttaaagagccctccctcgtaagggatccctataaaggaaaaggtcgccgtgtcctagagggaactcagcatccaagggatcatggacagatctcaaggctaggagggccaactgtgtcccaaacaagtccatcatatcagcccaatgatggccaggtcttgcctgaaagatcatatgccaggactgaccaatttcaaagcctgcccaaagatgaagaagggggaagacatcccaccaatgcaaggccagagcaggtctcataatggggagtcttaccccaatcctaatgatgatagtgccactagtcagccaagtgatgagcgcactaattggagagattaaaaatttttggacacaataacaacattccgcctcaaaacaatcaaccatgttctgacttgaggcctaaagaatctgtgtttgcagaatggccctcatgttagggagatcttcaggttggtctgaactgaagagaaatgcttgggacaatacgtcctgcccctaaacagtccaccaatg

SEQ ID NO: 236600 - DNA, 1598 bp, Cannabis indica
tctcaagaaaactactttggctgcaaagtcagcttgtgccaactcgagttttgcagctacaaagtttgaaattaagggggaatcgaaaaagagaccgcgcgaagtatttgaaagtgcaagaattgaaaaagaaatagaggaaagggaaaaaagagaaggagagaagttacaaagacaaaaagaaagacaggaaaaagaagaaagagaaaaaagagcgaatttgcaacgattaattagagaaagaaaagctcacttagctatgattgaaaaggttaatatttgcttgcatattttttcgtttggtatcttaaatgattgtaaaatattttgttttgacgataaattctaactaatttgtattatgataattaattaatacaggttaagcaagaagttgatcattctgatcaaaaccataagtatttcttggaacttgaaaaactatgcggctacaaacaatcatgcagatataatagaagaaattctgaaatgcacacttactcttcttctaatatattatttgggacgccattgaaaaagttgggattatatttgaaaaatgacgaggagaaagaatttgaagaagaagaggaaaacttgaatctacaaaattaaagaagttgaaacaagcttagtttatattgtttgtaactaaatattctattataaaatttaataatgacaagattgattacattttttttacatttagagatgttatgacaagattgttcttgctagaaattatcttttaagttagttatatatatataaaactgtcgaaaattgagcctagtgtactgttttgtatcactttagaacacatggtccaatttatcatttaacaaaacagagagttggatcgataatttttataaaacacaaaagttaaaataatattaacactatatatatttatataaattcttatatatgtaattcttttaaattcttatatactacgcgtggtgttacaaagacaaaaagaaagacaggaaaaagaagaaagagaaaaaatagcgaatttacaacgattaattagagaaagagaagctcacttacctatgattaaaaatgttaatatttgcttgcatattttttcgtttggtatcttaaataattgtaaaagattttgttttgatgataaattctaactaatttgtactatgataattcattaacataggttaagcaagaagtacttgatcaaaactttaaggatttcttatcaaaatttgaaaagctatgcatgtacaaacaatcatgcagatatgatggcagaaattttgaaatgcacacttattcatcttctaatatattatatgagacaccgttgacaaaattgggattgtttttgaaaaacgacgaggagaaagaatatgaagaagaagaggaaaacttgaatctacaaaagaagatgaaacaaacttagtttaaaggccaaaaacaattgtttgcaattaaatattttattagtatataattctaattctattgtatggatgatgattattgaaattatttgattaataaattcttaaagtttctttcaataataataaaaaaaagagcctcattaattatgtaatttatattaa

SEQ ID NO: 236601 - DNA, 1093 bp, Cannabis indica
caatatctgcaacaacaatccaaaagtcttttatcatcaaggacataattaatgagtagaaatagtgaataataataataatatacctcgtgagtatacttcttaagtggaacagtgaaggctcgagctaacccaagatctgcaattttaagcatcagtgtcttcggatccatgaggatattgtgtggcttaagatccctgcaaagacaaatgtgagtacactcaaagttctgaaaagagaataatgaaagatatgaagaaagagatggattttgacctgtgtaagatcccgtgaccatggcagtaggctacacctttgcaaagctggaacatcagagtctgcaaaagcacaagttcatttctactgaatgaaaccacacaatacatcaaaacaatagggaaatgattattactttgacggtatcgagagggactttctccggagtttgacgaaatgaacgaatgaatttcttcagatcagtctccagatactcaaacaccaaatacagaactgttttcccttccttattaaacccttgtttcacatccagtaacctaaattcaattcaaacaactgaaaatcaaaaaccttatttcttaaaagaagaaaagaaaaaaagaagtttacctgacgacatgagtatccctggagagcattcgcaagatggagatctcacggagagtagtgggaggaacaccttcttcgtcctcatggagacgggttttcttgagagcgacgatctttccagtatccttctctcgagctctataaacctttccataagttccttctccaaccttctccagcttctcgaaagcttccatggccgatagagtgggtgttgcctccggtgattccatcctcagattcttggaacagtataccgatcgatagaaacgcaagagagagagagagactctttcacttcttacagcaaatgaaattgggaatttgggagggatttttgaaattcaaatatgggtcagagagcctctcctacttttgttttcccaaaaagcccctcagctatacctttaatttcaattgggcctagctcttagcgattggaggcccaacattggcccattcact

SEQ ID NO: 236602 - DNA, 1377 bp, Cannabis indica
tgagccctacctctcccaagtcgttaattttttttccaaacgacgatcttaagctctcaagtctcgagctcaaattgttcagtccaatcttacatattactctcacctataccatcaaatggttaaataattatcatcatcgcattctacatttaaaaccgagtccaatgacatataatatgactatattcaaaatctggagctctgaaacctcacctaagcagtgcacattaacaatcggtggcggtaaaaaacggtataccgaaaacgtcgccaaaaatagggatagtgtatatcaaaacgaccacctcgacgagtagatcacaccaatgccaaccgtttgtcaaaacggtacaagatgtcatcggaaagggacgaagctacaaaaatgtcaccagaaaaagtagcgagctaggcgaaatagcttagtgtaggttgttctcctcgacgagctgagtctagtggtgaagatagctcgtcaaacagacaccggaggtgaccgaaaaatctgttcaaagtttgaatcaccaaactttgacttgcgatcccaagctaacgacagcgaaaggagcagcgccgcttgggggggtgaggtcgctggcacttgggctttcgatttttccggcgcgtggggctgggcggtggccggaggtgggtcgtcggagtgtggtggtgatggtggtttgtgggttttcttttttgtgtttgaagagagagaaaaagagagatagatagagagaggaggatgaagggggggtctgatttgtatatatataattaaatttttttgtatacatatatattatattatatttatttatttattatatatatatactcggtttgactcggtcaaaccgagtcttcacatgaagtcaatacaaactcttaaagtcccatttagtttgggcactaggattagattagctagccatttggggttgtacacgtactatttgaaggtactttgcctcatgttagggctaagggtgattgggagatggaccttcccccgtggggaagagagaatcttcgttgaaactagatgagttttgagtaacctacacaaggctagatcctggtccatgaggcatatttccaagaaggcagaattttcagttaatttttttgatggttgtctatgttgtagttatttaagatactttgcaaaatttttgagtagatttcaacaaaattttaaaacatttaaaaataaggtttcaaaacaatactgttaacacgcgatactcttttactttatacgagtgtaaaatagactgtttgaaattctattttgaagtgtgttaaattttttttgaatttctcaaaattttgtatgatgtcctaaataagtacaacatatgaatataaaaaaaa

SEQ ID NO: 236603 - DNA, 1100 bp, Cannabis indica
tgatcaattgggaaaaagataatgatggttcaaatagaatatttgttttggttttccctataaaaagataaggtgaaaagggataaaacaatgaaagggaatatatgaacaaatcaattagaattgattctggtatgaactttgttacagctattttaatttggaatggcttaaggataatatctcccaatcttttgaaacagaaagcgattattttgtgggcgtatgatccttgcgaaagggacgcgaaattagcccgggaagccttggaaaacagtaagaaaagtgttgagcatctcaaaatcatagttgagatgtcatgtgcttcatctcctgaccatttggtgggagtgaggcaagcttacacttctctttttcattgttctttagaagaagatattgcatcaaatgtgtctccttcttcactagcaaaggtgaaaacaaaacacccctttaggcctttctcaaatactcaatgcttatctattgtaaagtaatttgtatgtttttctatagcttctagtggctgtagtgagctcatataggtatgacagagatgaggtggattctgctattgccaatttagaggcatctagattacatgaggctattaaaataaagcaattagatgatgatcatgttaattggatactcagcactaggaatttctagctctctcttgttttttttaattaattactttcttagtttaatttgtgtagtttcgagatcaataaatgaaaacatatattgtttttgtttattcgagattttatttttagactaattgtttatatatattgtcttgatcatgaccaaacattgtcctatttttattattttatcatcattattatatatctactgtaaaaatttatttgaatttttttcttggatgtgtaaaatgggatataatttgttgtattatgtatttactattatataaaattattttaaaatttgataatgtaggtggagaaaattgtatgaaattacaatttttctttacctacatttatgcttcattttataactgacgtaatagatgaaaaaaaaaatatttcagcaatttatctatcattttagaactgacggtataa

SEQ ID NO: 236604 - DNA, 1061 bp, Cannabis indica
aattttctaaaacaataaaataaacacatataaagttacagaaaaaccttacattgctggcagcagaatatgatgatttcttccgttcagatctctaacccttgattctttctatcacagagtatgatcaagatctgaatcttgtttctccttcaggcaatacaaattttcacaatcttccacactatatttaagtgttgacttgaaatgtgtgggtaagtaatcttcactatagggcacaaaaatcaaagaagaaaagacgaagaattcaaaaattatgtgagctttcttatttttctgatttgtttgacaaagagtcaatcatgttattatgttaagagttataattttctatttatatgatgtttattagggttagattagaatttaaatatagaataaaaaaagataaaatggatttattttgaactcctttggccgaactcccttgtgggcccaatgggtttcaattttgccactttattaaaactttatctttcttttctaaaataccatattttaattctatctctataaatattaattttgtcaatttaataattataattaattattaaataaaatttttatttaacttattttttaattagaccttccaaagttttttaattaataaacaaaccctaaaatctcttttcttttcaattaatcccttgcttagtgaaaattcataaataagacatagtctaatttagaattataattgattaattaataacaattaagtgagtttacaagctaatattatctcaactagtgcggggaccatgggcctatataatcaagctcccaataagtagttctagaatttaccaagtaaattctctatcttattaattcttcttgactccactatagattggaattgtactcctgattatatagaacactctatatgttccaaatatagatacgctataaattttttattgtttcaatccaaataatcagtgatcatctattgatgatctacatcgagtaggaataaatttactgttctacccttcaatgtattttatccttaaaacacttagttactt

SEQ ID NO: 236605 - DNA, 852 bp, Cannabis indica
ttagggcacaaaacccaataggtttggcattcctatcaagatagtatctgataatggaactcagtttgatggcgaattattcactgagttttgtgaaagaaataaaataattaagagcttctcatcagtgtcgagacctcaaccaaatgggcaagtagaagctgttaataaaaccttaaaggatactattaagaagaagttagatgctgacaaaggaagatagatacacgagctaccacaagtgctctaggcccatagaacaatagagaaaatagtgatgggacacactccattttcattggaattcagctcaaaagatatgttacatgtagaagttaacaccgcgacccagagacgcatattctacaatcaggagcaaaatcaagaacttctacatatgtccttggacttgcctgaagaaaaacacaatcagtcacaaataaccaatgcagcttgccaccaccaaataacaagatactttaacaagagagttcgaaagaggttgtttagagtaggagatttcgtgttgagatgtgtatttgcaaatacacaagatctagcagtaggagtgtttaacccaaactaggaaggcccgtatattatagaagctattgtaggaatcagggtttataaattagcttggcttaatggctcgctaataaagaatcactggaacagcgagtatttacggccttattaccagtaattttattacgtaaatgctatatctatctccgtaatgattgatcatttttctgaagagaaaaaaaagttgaattttttaaagtaattataaagttttattttctttaaaattacttgggggcatatatgtgtataataactagattc

SEQ ID NO: 236606 - DNA, 613 bp, Cannabis indica
ttggagcattgcaatatctcacattaagcagacccgatattgccttttcggtcaacaagctaagccaatttctccaagccccaactaaaaaccattggcttgcttgcaagagaatactaaggtacattgcagggagcattggtgaaggcattcaatttaccaaagcaactaatcctatcattgaaagcttctgcgactcggattgggccagctctattgatgaccggaagtccacatctggtatatgtgtctattttggtggaaatttaatcaaatgagttcaaggaaacaaaaatagtcgctcgatcaagcaccgaagccgagtacagatcattggcacaagcttgcaccaaagtcacttggttgcaatcgctcttcactgaaattggaatagagcacaaccacacagccatgatctggtgtgataattcaggggctcgtcaactcgcttccaatcccgtcttccactcaagaactaaacatatcgaaattgatgttcacttcatacgagacaaagtgatgaacaaatctgttgaagttcgatacataccaaccgaggaaaaaattgacgatatattgacaaagtcgctgcctataacaacctttcattatc

SEQ ID NO: 236607 - DNA, 1313 bp, Cannabis indica
  modified_base (140)..(140): a, c, t, g, unknown or other
aaaaatttcaatagctatcacgagattatcacactttcccacgaccacaattcataccacccttactactcttcgttgctgtacaaaatagaaagcacctcaggaactagatgtaattaaaacctacaaattattaacgnggagataaaactgagcactatttcgaaccaataaacaacattagatggctcacatatttaccatctatcttagacaaaagatgcatatgatgcaactaaatatcatgcatacaaaaaacaagtcttcactaaggtaactgtttgccttacataacagtattaaacaaactgttacaatttaccattatgaagctggaactaagtcaaatgtgccttaagatacataggcgaaaggattatcatgtatggcaatacatattagcactagtaaacagcactttatctaaaaccgaaaatgaaattaaaaaacattgcatagaaacatgatggagcttaatcatacagttgcaatatcttgcatatttctgtaacatattgccaatatcatatgttaacatcataatacttcatatgataccaaattaggagaatatgatatggcacctgactaaaatattattattatcaccatgatgcggtggtcatgtaatgatggaagtcctgatgagtcaaattaaattgcgcaagaaagagaggcacatacatgtaaatgacacatgcatacagcataaataattgaaagttatataagacagaaagacaaactttaccgggaaattattgacacattccaaacacagcataaaaatgaaggaaaacacattaaactacatttcaaatataaaaattacttgttcagatgtagtgtgtttgtcaaactatcaatgtctcaatcattacattatgaaataaaatgactttaaactgtgcaatctaaggcaagaaaataaacaacatccactaggtttcgaaaaatacacataatagccacatatgacatccgacaagtcaatatagcagaaataacagaaatcataatagataaaactttcgtgacacagaccaagatgaatgtttaaatttgtcaggacactcattctttaaagttgacactaagaatagaaacagaacataaatttggtttgtgttcttaaaaagatgtcctgaataaatggaatgaaaaagcttactgggtttaggtctaactgagagcaaaaagagcattgctattcaaaggcccactcgtagccataatatagaaaggaaacaaaatatcacaacccacctaaatttcccaattacaaagcattaattccaaatttggagatatat

SEQ ID NO: 236608 - DNA, 873 bp, Cannabis indica
atgctgaatatactgagctcaatgaaacttgaaaaaaaaatctacctcgcacatgtacaggaagctgtttttggcgagccaagacctatgaaacatgcgaggcgcaagagggatcaaaataagcggtgtgaatatcttgatgatattggtcataccacggaagagtgtcgtcaattgaaagatgagatagaaggtctcatattgcaaggacaccttcagcgatatataaaggggcaggaggatgcctatgattagttctatctgcccaataactcgagcgacttaagattataaccctcctctgtaagaagaagggacgctttggttgtctcgagagggagtgggtcacaagaatacaaggggcagttactccggtaaagtaattgcgtaaaagaattgcgacgcgagtagatatcagcccaccgtggttgccatatcaagctgccacgtggaaagctggatgtcagccagtagcagtcaaaggcatacaactaaaattaggattactttacctggaaccccggtatatgtcagggattgaccctggatattgaaacaattgtgggagtatgttggggactgaccctggacatcgaaacccgttttatcaaaaccagattctcttggaagattaataagataagcaattgaactggggaagttcttttgagattaatgattgtaaatcacattactgatgaaatattttaaattccagttgtgaataaaataatcatttctttcaaataagtaattaaaaagtgtaaaccctttaaaattacttgaggggcatatatgtatgattaactggaattgatctggaaatacatataacaatgcaaacccatcgtttttaaaaaaaaaataattttt

SEQ ID NO: 236609 - DNA, 532 bp, Cannabis indica
ctcctaaaatggaggatcaaaaggaaactcatgccatctgggaggattttaaagatgagttggatccctgggttgggacggaaagaactttagaaccaatgaaggaggtagaggaagtaagtatcagcgatgaggaccctaaaaaaaccatcaaagtgggaagaaacctacctccatccatataagagaagattgtgaacacattcataaagaactagaatgtgctggcatggagccattctgacatgactagattcaccgtaacactatttgcaatgccttgaacattcgagaagatgcaacacgagtccgaaagaaaaaaagacccttggattcggtaagggcagaagcagtgaaagtggaagttgataagttgaccaccaatgacttcctctgggaagcattgtaccctgtctggcttgcgaaccctgtcttggttcctaaacccaatggcatgtggaggatgtgcatcaactttactgacctaaataaggcttgcctataataaatgctttctacatatgcagataga

SEQ ID NO: 236610 - DNA, 1088 bp, Cannabis indica
tttacgacggtcgtataggtgacggttatagaaaccgacaggaatactttaaacgactatttaaaaacgtcgggaaaaccctattttgtagtagtgacacatcgttgacagtcgccaagaaggcctcctccactacaaagccaagggggtgttgaaggcctcctgcactgtaaagctaaggagttgacgaaggcctcctccgctatcaaaccgaggagatgaaaaagaccaccttcgctgaaacacagctgagggaatgctaaagaacttcaaggctacaacctaacagagacaaatactacatcaatattcacataaacacacatggtgacaagagagtcaatactaagacaacaactaaagatcaaagtaaatgttaacattccaatgtcggcatgatttcaaagtatctaaactcaaaggaaatcactcaaggagtcatctaaattttaagtcgaaaaccaaaagataaatgataagaaaagatgatcatcttttctcttctccttatatattgggaatttcaaattctactattcaacagggaatgggaattcgaactcctactctcagtgggaattcttgaagaatagaaacaattgttcaagattgtcaagattgatgtccacctagtagttttgagagaaaagagcttagttcacgtcgttaagtcaacctcacacaagtgtaaagttgacttgggggcaaatgtttacaccaagagtagccctgatgacgtggacatcaatgtttgacacatggcaagaaagatgacatctcagagttgagtagtcacgagtcatagcaagtcggcctgggagggctccctagtcctacccccaggttgacttcgggaactccgagatagaagttcggactataataacttgaatccaacccactatctttcagtattatgtaccatgaagacatggagcaatcaaattcaagcccctggagttgaaattacacgaacctacaccctgaaagccaacctaggcacctagggtataatttgaaccactcatcaatataaagaacaataatatccccacagttatgtaatcaccgaatagatagatttaata

SEQ ID NO: 236611 - DNA, 864 bp, Cannabis indica
acaacgtttggctaaatcaaatcgaggaaacactaagttggcgcgagaagtcgtagcgactagggctatacagggaacgattcctcaaagccaacttgatccaactgtaaggagacatcaaggaagacctcgaggctctaggaccaggagacaggaaaaaaaaccaagagaatcccccaaatacctaggaggaacaacctgggaataaagggatgtcccaataaataatcaacctaatcaaagtaatacaaggaaccaagaacatcgacgagatgtcccacaaacttcctatggatttgcgaaccaagggaatgaacaaactaatatgcccgaatcagctcgcatgattaagaggcgaggcaaactcgaccaacaaactaaggatttcctcatgataatgaaagaaatccttgaaaccaacctacctctagtagtctcctcccgagacatccacaacacactactataaaaatggtttttcccgacatttttaaatagtcgcctattcctgtccgtttttataaccatcgcctatatgaccgtcgccaaatgggtagaataggcgacgatttaaaaccgtcgctattgtggacttcccgacaatttaaaactgtcacctataaaagggtatatgcgacgattttaaactatgtccctataccataggcgaccaataacaagttgctacttaaatttatggtaaacatgcgcccaataacaagttgctactattttaataattattaaactaactttaaaaaaaaatagttagaataattctacaaaacataagttactaaaaaggctatttatttgattgatgaaaatttatgttaacagtttagtgctttcattgagagtctt

SEQ ID NO: 236612 - DNA, 738 bp, Cannabis indica
catatggtgtataatttcttcttcagatagcattcctgagattcttgaattcatccatccttatggtgtataatttcttcttcaaataaagttaattggccatatttttgagtttggaggatgaagttctcaggaaagtttcgaataaagaaactacagtaggataattaggaagagaatgagcatcactaataaaaaaagatcatcacagttagaaaaactaatagtagaaggatcatcagagttgaagatgatgattgatacaaacaatataacattcctgagatctttggattcatccatcttatggtgtataattccttcttgagataaagttaattggccatagtagttctgagtttgggggatgaaattttcaaggaagtttcgaatgaagaaactccagtaggataattaggaatagaaggagcatcactaataaaaaaaatcatcacaattagaaaaactaatagcagaaagatcatcacagttaaagaaagacgaagattgatacaaattacaatatagcattcaagcaaatataatttatgaccatcaacaattatgatgtaattgaattctttctcaattcataacaacattactatttacaaactttctcataaattcctgatcagtgccaataattagactcatcaaatttgagaatataggcttggttgcacccctgaaacaatctaccttcaaatgaatcaaaaatataacaaatatgaaatt

SEQ ID NO: 236613 - DNA, 1085 bp, Cannabis indica
gcctggcagagaattagttatctctaaaaggtgggttaggtctatgacgatcataattgaggatagagagttgagtgcttatttagtagagttgggattactgaatttcgacatcatacttggaatgaatttctggtctaagtactcagctagtattgattgtaaatgaaagatggtgagcttccaacccaagggcaaggaaccatttgtatttgtgggatcagttcagcgatcccaaattctggtaattttggtattgaaagctagagatttgttacaagatggatgcttagggtttttggcagtgttattggataccacatgacctgattcagttcggcctaaagacttcagggtggttcaagaatttctagatgtttttcttgatgaacttttgggtttaccaccgcaacaagaaatagattttgttattgatttagcacctggagcagaacattttctaagataccatacagaatggctctggaagagcttaaagaattaaaaatttagcttcagaggatacttgacctagggttttcaagaccaagtgtgtcaccttggggagctcccgtattatttttaagaagaaagacagatccctatgcatgtgcattgactaccaggaactaaataaactgactatcaagaataagtatcctttacctaggatcgtcgacctattcaataaacttcaggggaagacaatcttctctaagattgatctccgattaggctatcatcaattgagaatttgaaaaactcaaaaaaaaataaaaaataaaacacaacaacaaattttacacaaagacttaacacacaagacaaatgagagattccatagaaattcaatttggcctagcgaacatcgatgctctcagaaaaaatggaatggaaaaatgtgtttgctgtaactttatatgctgcccctttgacttttctcgttggataacattaatacctccccaaagtcacctaatcaataatttatacaagtatatcccaccaaaactttgaactttcctacaactaccttaaacttttttttttcattcatttcagctccataagttggattagtgcac

SEQ ID NO: 236614 - DNA, 2816 bp, Cannabis indica
caatgtcgccattgagaaacactattttaacatccatctaatgtaactcaagatgtgacagtcattcccgtgatctattaggagaaatatcgagtaagttgtgcaatcccacacctcctgggaaatgtcaagtgggatgattctgagactgtgttagtatgggactatacagttgaagacgcatttacagctgctaaacaatcagattcaataaaatgtgaagaaagacctacagtaagagtccaatccaatgctacaagtaaagccaagcactctgcttgaacaactgaaaaacaacctgcaaaatgataccaataaaataacattaactctcaaagaactaaaaaaagataaattaacaagacaaatttattaactcatgctaataataataacaataataatgaagatattaagaatataataaaattatatataaaaataaatatatatatatagtatatatattgaaagggagttccgcttaaaaataaataaattattagcagattttcaagtatgctatataaatactatatatacgggctaggtgatgaagggggagtgtatgtatgtatgctatatatacgagaacatttatgcaaaattacagatttcttgaggagaaccatatgaaactttttggagaatatgaattcaagaattgagttactagggccaaagaaatttaaggagaatttaggtcagaaggattgatatagatggatgagtggtagagaactttcttttcgataccttatttctaagctttccaactactacaatggtagaatgatgttcgtctcttcacgccaagaaatagagaaatgttgacatggaagatcggtgttggtgcaagaaaaagataagggaaaaaacttctgacattttgcataccaatcgtattccatatcattgtcaaacataaatattaaatctccattgctataccattgccaaaaaagaggatactaatttccatcctttttcgcactagcttgttgctactttccacaaccctttccaaaataaaaccgataatggcacaaaataataccagttgcccgctttattttatattttacccttacttggcaatggtaatttcctaaccattggattctgaaaattcacattttttttttatcatccaatgacccaaaatgttttgaggtgttaaacacttcaaacccatctgaggtactacataattgaccataaatgaatatacatgaaaaggcatagtaataataaaaaacaatgaaaaggaacgatgaccaaaataaactacagaaacatagatatttattcatttgttttccttagatctataatatatggctacaaagactcccctaccatagggacaaaatcagtgtgcttactataaaaataacctataaatatcaatcccatgacaattaaatactaatttaatttaagcatacgaatttgattaaatattatataatcaacctattaattatgtaaatgaaaaaaaacaatcagaaattagtacaaaagggaatatattattttaaatgcagtactcattatagaaactataaacctaaaaaaataattagctatttaagaaacttaaacaacaaacctaatgatactcatccgaaagaagtttaatctttgaaataatcacctctaggtgttgcgatacttttccatgagttatactatttcttttcccccaaacataccatgccgaaaggataaataacttaaaatctgattgaggcaacacatccgatgctcgtaacagaacttgttgaaaacttacatccactaataccttatcaataaaactaaagtgtaagagtttccaaatttgacgaaaagcactacaccaaaatattgcatggctattagtatctttatcaaaaccacaaataggacaattcgaacgaagaatcacatttcgctttttttaaaccccaataggtgggtaaaatttcatgaaaacccctccacgcaaaagtaagaattttatttggcaagtgcaatttccagaaacatttccacctaaaagaaaaagcttctctagagggagagccatgcatagtatcaaaacttgtagccacccaataaccactctttactgaataatttccatcattcgtatagtgccacatccaactatctgttttttagaacttactaagtgggatagagcaaatacactcttgatcaacccggtgaaaaacagtatccaatgttgagaaattccaatacccagtttcttatgaaataagatctttaacaagcaatccagagttctctcctacaggagtaactggtagaaatgaataagatcgtggtagccaaggatctttaaatacatggatactatctccatttcctactcgatgacgcaacccttttgcaagtagagcatgtccccaaacaataattttccagacataactaggatggtcgccctctggaacgagaaacaagaaaataaaatcaagtgttatagtatactaaaaaaaattaagaccataaactaggattgctcctatatactggagaaacgttataactataaaagaaatatcaccatatattgaaagtgggcttgctatcaacaatcaacatgatatttcaaagcaagacatgacatacgttggtattgattatatcactgctttaagcaaaattgcacgacctccaaaagaaaataattttgacttattttaacgtttggataactattatataaagattctttttacatcactagtttttagacgtgcgttgcacgtaataaaagattgcaaattattaatattaatattaat

SEQ ID NO: 236615 - DNA, 1002 bp, Cannabis indica
taactgtaaatgcattgattcatatactaagagcaataaagatataattccatcaaaaaggtttttgccttttgtgtgtttatattctgtgagttgtgagtgtttttggattattgttcttggagccattcctggcatgtgggattgagctcgagttacaatatgtggaatcagagcttggagatcgaagagaaatcttattttagctcgaaggttcaagatttcggtggtcaagcaagaaaatgaaaaatgcaaagttcaatcttaaaaatggaagaacaatttttgtttgtggtgtgtgaaaatgagagtcttgctagttcaacagagtctataatcaactttgttaggagagaaggatggctaaaggtcttacccagaaagagaaaacaaagattctcgagaaagcacatagtgctataattctaagtcttggtgacaaagttctaagggaagtgtcgaaagaagactcggctgcaaggatatagatgacactggaaagtctttacatgaaaaaatcgttggcaaacagattatttcttaagcagaaattatactcttttaagatgatgtcaggaaaggaaattgaagaccatcttgatgatttcaataaggtgattctcaacttagagagcattggaattaaagttgaggatgatgatcaggccatcattatgctaaattctcttcccacaaagaattatgaacactttgtaaataccatgatgtatagtaaagatatattaacattagaggaagtccaaaatgcattaatgtcaaagaaattaaagaaaaaagtagagaagcaagatgaaggtgctggagatgacttatcgatttgaggaaaaagatccaagaagaagaacaaggaccataacaacataggaaaaggaaaatcaaaattcaagtttcaaaggagatgtttcatctgcaacaaactatcttacctgaagaatgactgtccaatcttgaaagattacaaattcaagaaagatggaaatg

SEQ ID NO: 236616 - DNA, 1338 bp, Cannabis indica
caatgtgtaacccgtgatgcacagttcccttcaagtatctcagcacacgttttgctcctctccagtgacttgtggtaggagtttgaagaaactggctcaattcgttcacagcaaaggcaatatcaggccttgtgagacacaaatattgcaaagctcctattaaacttctataggcagtgggattggtcagctgattcccatcatttttcgacaatggcttgcctgcaaccatgggtgtaggacatggttttagatgtaccatgtcatacttcttcaacagataactaatgtatttgccttgagttaagtatatccctgtttcatcacgatacacctctattcaaagaaatgaagttgtcccagatcctttaaggcaaaagttttgttcaatttctgaatgaaattgttcacttcaacagtgttgttgctagtcacaatgatatcgtccacatagattagaacaagtaggattacttgctctgttgagtagatgaatagagagttgtcagccttggagtttctgaacttccagctgttgagagtgagtttcaatctgtcgaactaggcacgaggtgcctgttttaatccatacaaggatttgttcagcttgcatacatactcgggtttatctttgtcttcaaggcctggtggctgcaccatgtagacatcttcttccaatgttccattaaggaaagcattgttgacatcaagttgtttaacttcccaatttctggacacagcaagagttaatacaactcgaattgtagctgacttaactaccagactgaaggtctcactaaagtcaattccaggcctctgatggaacccctttgcaactagcttggccttaagtcttccaagggttccatctgcattctatttttccctgtatacccatttgtttccaaccaaattgtaccctgacagtcgaggcaccaacacccatgtcttgtttcttttgagagcaacaatttctttgttcatagcatcattccattctttagatttgagtgccttctcaatgcagctaggtacaccaaggctcgggttccatttggtatgaccaaggtagactttaggtttatagatcccagccttggcacgggtcaccatggggtgagatgaaactggttgttgcactactggttcagcaagttcttgttcgtgcatttcttgctcaacaactggtgcagataaactttcagaataattagtgtgtgtgtgtgtgtgttaccaatattaatgtgttcattacctttagttgtgttgctggttgatgctgcttccgagggaactttgagagtgagaggttgcaccagcaggagtcaaatcagcagg

SEQ ID NO: 236617 - DNA, 940 bp, Cannabis indica
cctttcgcttgctttactcttaaaaagtgggtgcaagcgcggtgtccctaagcacgagattctttggctgaagttcctttataagactacatgatgtttccctcattacggtcttttagatcgaattattactaaattttattttgactaaaaatcagttcagggtcctatttgtactattttggaaaatacatggtccattttgtcatttaacaaaacagagagtccaattgataattttagcaaaacacatgatccaaaataatatatacctattttttttatgtcaatgtttgttataattataatatcaaagtcttaactttttaaaaaatattgaataatttaattatagtatcaacaatagacattttgatattacagtttatgaagcctgttgagaaaatataaacttatttttgacattataaattattaaaataatttcaaaattttacaaaaataatgatgaaactataattagatagtaaaaatatttgaatatatatttttaaactcaaatattaagaaataaaatattataattaacacccctcaaatatttattttctagctctctctctcttaacggtggttttacccacaaaacgaataaagtgttttgttgttctcttactcaactttctcctgccaatgcaacttggatacccaaagatttgctcttattaaagcgctttctttcaaatctcatggctgtaaccaaaaggaaaaagaaaggagagagtgtttcttccaataaataaagaaagaaagagctattgttcaaaggcagattgttcttgttcctacacaagatgtttgcatatagtcatttcaaatttgatttaataaataatataaaaaaccgttaaccaaatctcaacatactaatcctcttttcttttttatataatagctttgttcctttattatttttttt

SEQ ID NO: 236618 - DNA, 670 bp, Cannabis indica
tttcatggtccaatatgggattcaaagagtatatgggctttaagaaactacaaattgttgatctctctttcaatcattttaatggaacactctcatcagattacttcaccaattggagtgccattaatacaatcaccccaagcggagataagtcaaggtcaatgtacatggatgaagatgaagttagttactaccaagagtcggtaactgtgactaataagggattcgaaatggagtttgtgaggatcttaaccatcttctcctgtatcgatctttcaaacaacaatttacaaggagaaattccaaaatctgttggggatcttcggtcattgattattctaaatctatccaacaatttgagaatttgaaacaacttgaatcattggatctctccaacaacaagctctctggaagaattcctcaagaattggcaactctatcatttctcgcgtatctcaaccttagtaaaaaccaacttagtgggatgataccacatgacacacaaatgagtacatttctaaaatcttcatttatggaaatgttgaattatgtggtttgccattgttaaaggaatgtgaagacagtaatgatgtcacaccaagtacgactcttgatgatcatgaatctcaatttgatggaatgtttggatatgcatgtggatttcttggtg

SEQ ID NO: 236619 - DNA, 894 bp, Cannabis indica
gggctatgccatattcatgttacaggagaataccgtatttagtgggagattgtatcccaaagccaggacttgaatacaatgacttgggatacattctgaatttgtggaagacttcatacatgtaatatccgcttttcttgaagggtaattaattttttttatacttagtttattttgtttgctaatggagataatttatcattttgaatatttatgagtttagttgagtatatgattttttgtttgtgacaataaaaatttcttttatttttattttattttgagagtgtgtataatgttagataaataattaaattattggagataatttaatatttaattatttgtgaatagtattataggtatattaataataataatatggctaaatatattgtatcggattatttaattttattattattattattattattattattattattattattatagaatatggagtaggtacactattatatatatatatctatattttattacttttttaaaattttaagttattgatctaggatattaagattagagtttgggaatatatatatatacgatacttatgagatacttttagggtttagaacgcataaagaaattgaagggaggaggttgtgagcagagagagagaccgatagagtttcatgtgaaacttagagagagaaagagaaattttaattctgaaacacttagagaatttctgggtttgtttgatcgctttgaatagcttttctacgatctaaggaagctaatggtcatgaccaaacgagctaagagcacaggttttgaaatccaccattttcatgaacattcaagcacgttcttgagcaatctcgggtttgagttgtttcttggttaaaataagattgtgtttaa

SEQ ID NO: 236620 - DNA, 1208 bp, Cannabis indica
atttaatgaccaaaaaataaagatgatactgctgatcatatggataaaagtgacgtcctagtatatattttaccttatcataccatattacaaaagaaaatttacataatgaatcaaaaatttaataaaaaaattacaaaaaaaatatgtcaacagagacaaattttcattagtaaaaataatattacctttttttttgttgctttatagtttatttacatatagttgtattaatagttgttgaggttatttttctagtttttttattatttttttttatggttgatttatagttatcttaatgttgatttcttgtttttttttcttgtttttttttttaattttttactgagcaaagtgtatttttataattttaaaactttataagagtatttttataataaaaaatttaagccgtaaaattgtatataaaatataaaaaaaaatgtatttttaaaaattctcttattataaaagagatttttacaaaaatactgaattttaaacagaaatgtataattttactgctacgcggaaattttttacaaaaatactttttttataaaacaacctataacaaccgtaaactaacaaaacagaataattaaaaataacagtaaaacaacaataaaaactaaacacagtacacaatatttttcaagaaaaattccagtccacaataaaaaaaaaaaaaaaaattcatggtgaaaacacttcaatacaaaatatatttagataacaagtaataattacatataaatttttactttcatatttgtataaaaaaattagtaaatcacgcataaaaataatattgagtaataattaattggtttaaaataactggttttgaaaaaccttttcgtcgggtcatcgtaaccgagggctatacagaaaatacaatctttctctcaattcttttctctctgtttttgttcttttctgttattgatcatctgtacgttatttgcactactacaatttagccttttagtgacactatttagtgacatgcacaaaagtgcaggtcactaaatagataggagtgatttttagtgacatgcacaattagactctaaatgtttagtgttagtctcctgcaatgtgtgtcactgaaaatatggagtgtcactaaagattaaaatctattttttttttatttttattaatttgaaaaattaagacttatagtgacacgccaagcgtga

SEQ ID NO: 236621 - DNA, 7101 bp, Cannabis indica
acgaggatttcgttcgttcgttcgttcgttctttctactgttataacttaaaacttaatatatatatatatacttaaaacgaaacaaaacctctgtttcgttctataaatataataataatattaataataatattaataaatactttattattaatagttatcttattattttttagccactaaaaaatttttatttttaggatatttggccaatttcgagtaccctaaaatacccagatatttctaaaatcaacttatcccaataatctcatcaatatttctaactaaaactgttgtgacatttttggcctccaatcgggtctccagggtcgccaaacttgaaaatatttttatttcacaaataactcatattatatccacgtatttcaaataaatccccgtaattaataaattacgcttatatatccacttatcgagtgttcagggtcatcgaacctgaaaatattttattccacatatagctcatattacattcacacatgttatataaatctctgtaatttacaaattgcgcttatttactcacttatagcaaaatttacattttatgctgaaataaattagtaggatcataatcccacttattacctgatgaactcataatataaatataaatcctaattatttatcattagatttattgggatattacagtattctactaaataaaatttctagtattcttctctcaaaatattcttctacattttctttaagagatttctgaagtagtgatagtgtgtattatgggtcatactgaagatattactgttatgagttaggtatcattcaagtgtaaaggtaactaaacaatctatcattcataattgtaagttaagttgtagagtcgtaagtcgtgaagattcttgtgagaacattacttaaattatctttatatttgatgatgcttagcatatagcaggaacccttatattggacactctaatatgcatataagcataactaaatatttaataattttatttttcttttatttagtactaataatcaatttttttaaacagccttagatctgattaaaaacatgggagtaaaagccattattggaccggtaaagtcaacacatgcaagctttgtggttgaccttggagaaaaggctaaagttccaataatatcatactcatcagcaacatgctcttctcttggcgtaaggagctcatattttttccaagttacccaaaaccaacaaatatctcaagccaaagccataagttcgattgttgaagcttatggatggaaacaagtggttcccatatacataaacaacgcatatggagaagcctttattcctttcctcaatgatgccttagaagatatagatcattgttgtatgccttataggagtatcatttcttcttcggcttccaatgaccagattctcaaagagctttacaagttaatgactatgcaaactagagtcttcgttgttcacactgatatttctttaggcactaggatctttgctcaggccaaggagattggaatgatgagacaaggctatgtttggatcgtcacaaatgtgatgactaactatcttagttcgttaaaatctcatgtgattgattcaatgcaaggtgtgattggtataaagacttatgttccggagacaaacacacttaaagactttagagatcgatggaaaaagtcattaaggactactagtgctttttattatgacaatgacttagttgctgaactcaatgtttatggattatgggcttatgattctgttcaagcgttagccattgctgttgaaaatgcttattataataatagtaatgagaaggaaaccttttccttattgagaaataagaatgtaactgttactacttctagtttccaaattggggtctctgaaatcggtccaaaacttcacaaagcactattagaagtgagattcaagggtttaacaggtgacttcagacttgtaaatgggaagttacaatactctagtactgccaatacaacttttgagataaccaatatcgttaatagagaagaagttaaaaggattggattttggagacatgaatttggactaacgaaaaatttggaaacgaataaaaaaagtgttaatagaggcgttgaatcggtggtatggcctggaaaatctagtattattcccaagggttgggaggtttccacaaatcgaaaaaagttgagaataggtgtacctgtgaaaaaaggtttccaagagtttgttggtgtaaaatatgattcggtgactaacaactccattgtcactggcttttgcatagatatttttgaagcggttatgaaagcattgccctatagcgttgattatgatttcattccatttcaaatccatgatggcaagagctctagtacttacgatgagttgatagatcaagtcttttacagggtacgtatccattaattacttataattactctttaattaagatacattagctagtgatttatatatacttatatatttgtgtatggttgacttaagcataaattggtaaatacctatactattttgatattgtattatgcaaattttattgattgaactctctattttattaaataacaattcagactcttcgtttcttcaagatggtacaaaagagtaccttgagctcaatttttgtcatactaaaacttaattgtaacttgacctggaggggtttaaaatagttacactttcgcatctgttcgtgctagaaattagttagattaataaaattaataaaaattgagcttagggtacaatcagtatctattatgaaacataggatctaaaataatatataatgttaaatttaatattttacagagattcgatgctgtggttggcgatacaactattagagctaacaggtccttgtacgtagacttcacattgccatacacagaatctggtgtctctttcatcgtgccaattagggatagaagaagaaaaagtgcatgggttttcttgaaacctctaacattagatctctgggttacaagtgcttgctttttcatcttcataggtttcgtggtttggattcttgaacaccgaattaatgacgattttcggggacccccatctcatcaaataagtagaagctttttattttccttatcaacaatagtctttgcccacagtaagtacatatttgatcactatatatattattagaataaactaatcccccaaaaacatatatatatatgtacaatacaatttcgtcattaataataatctgttttacagaagagaaaattgtaaacaacttggcaagattcgtagtaatcatatggctttttcgtggtgttaattcttactcaaagttacacagctagtctaacatcacaccttacagtccaacaactccaaccaacagttactggtgtagaccaactcatcaagaacaatgagacagttggctacattgatggctcttttgttcatgggattttgagaaatcttggttttagtgagtctcaactcaagatttacgagtctcctgaagaatgtgaccaactattttccaagaaaaagtctgatggaggtatagcagctgcttttgatgaattcccttatacaaagttacttcttgccaaatattgctccaaatatactatggttgaaccaagctttaaaaccggtggatttggctttgtaagtaacactcaaattcttatactactaactttaatgaatgaaaaaaaaaaattgataaaaaatgtttcttttttcatcttgcattatttcatgaaattgtaagtaacattctattactttaaaatatacccttattaatttatttagcattaatatataaattattataagtatctttgtactaatatgatccttcttacatatatgtttttttttatatatatttttactaattaagttataaatcatttatgtatgcatttagttaactaaattttgaatgtgccgctaaccattatgatgtcttcagatcgaattgccaaggtaaattttttttaaaaaaattatgtgtcttataatatcaccaaccactcatcacaaagtactataactactttacaggtctttccaaaagggtcacctctggtgtgtgacgtttcaagggcaatcctaaccgtgactgaagatatgacaatgaagaacatagaaaataaatggtttggaagccaaaccagttgtcctgacccaaacacacagatctcttccaacaaacttgggctcgaaagcttttggggcctatttctcatagttaccattgcttcattctcagctcttattatcaatgttaccacttttatttacgagcacaggcaagtttttctgctaagtactagtactattgatcatgatgaaattgaagtgtcaatatggagaagaatttgtgtagtgatgatgagaatattattcaatctaaaagactttatgagttctagtacttttagaaaaaatgtgatctcggtatgtggtggtgaagataaaagagcacaagatcatatagcgaatgtagttgtagctgatcatgatcatgatgagggcttacctgagtgctctaacgttacaagcccttcatcaagttgttcaaaccatgcataagagttgaaatatttatcttcactcctcatgaacaataagaaattattaatgcatgaaatttttaattatagatgatcaagaactccttagtagcttgttgttcattatgttcttcttgttaaaataaagtttcatggctcacatgtatagttacagttaattgatttaaatattttttttgaaaaataaattcaaatgtgattattatttaggcttctctttacaagaagattactcctaggttagctaaaatatgtatgaatgatagtttcaattcttttatgttagattgaattccctcataagcaaaagtcagtataataaattcaatggacctcattacactcaattattttgtttataactaaatcaagactcagatctcctaactaaatcccagctggcataactaactccagctgagcttaaacgcatctaattaacaagaccaaagggatataactgttggaaatacttgtacatgatcatattacatttcatgtaaattatattttaacataaataataattacctataacatgttatctaaaaccttagagttatatatatatgagtttcagaatacttacagtggttgttgcacagcagaatatgactccttctgttcaatggtctaacccttattcctttctatcgcaaggtattatcaatcattgaactcgaatctccatagaactaggatcaaagaaacaatttctacatagtctttctcagtgatctatgtgttataatagaactgtgtggacaagtgttacaacactatatggctaccccaaaatttagagagaagaataaagagagtatatggaaatttaagagagaaaggagagagttttccaaatttctgagactgaaaactgagttgtaggagtggggttaataactcgtgcccgagtggggttagtttttcctctgtaacagttagaaacctcatccctcatcattcccatgtttctcctcctccaccttcttctctgttctgctactcccacgatcccacttaaccatctccatttgctagttacctagatctatcctcacgatcctcatctcatgatggcctttctctgcaactcatctcctatatatacccaattatggagtctttttgctccatatctttgattcttcttctcacttactaaacctacaaattttatggaatctattatcaattacatgaactttgccttagctttgtctgaaaaggaaagggtcgttcatactttttctgaggcaaatttacgagatcctaaccaaaccccgaaattcttccttgtagcccggtgtctctcaaattcactcaaccctaagaccttcattaaacgaatgggaaatttctggtcgaacaaatataggtttgaagttgtagtttcagaaatgcattaagacttgttcttgatcactcttggttgtgcaggggatgtttacaaggttctatcaggtgaaccatggcactttaataaccaactggttttgcttcacacccaactgttctacataatgtcactaaggctaatttgtccaaagtccagttttgggttcaaacacatcgtcttcctttccttagtaagtctcgagctcttgttaaaaaaattagtgaatgggtgggtgagtatattgatgtttatgaagactctttccatgaaggttagggccctttcatccgtattcaggcttggattgatgttaaccaaccacttatgataggaaaacggtaaacctacctaaggttcgagatgagcattgtcgtgagttttggtatgaaaatattcctatcttttgctaccggtgtggcatactgggacacccctttgagagatgtgcttattttcttaaattgattggcaatggtattgatcctgatctcccttatggtcctaaaatgatggggggaaaacttctaaattctggttatgatcgctatcgatatgatttttcaaaggctaatgtctaccctttcctcaaacgcctctctaagaaagccattggacaggcgattcttgctattaattacaatcaaaacttggctattggtactattcctcacccacatccttttccaaatgctgaatcatcttcccaagctttatctaataccaattccctggaaactatctttgaattcccatcacctttttcttcttattacccatcacaaattccttctttggccaatgaaaatattgatgtcattactattactccatcagccacatcaaatctccttccatttccaccaaccattctctccactttattgctacttatcaacctactaatgtcagttttaccaattctcatgtcactttagcatcaagcctgagaggtcaaagcaatgtttttggttcctcgactactccaaacaaagggaaagccattgtttcatgtgaagaagaccatgattttggggtgaacagtagaattttcaagaggcatgttgtaactgttggaaatatttt

SEQ ID NO: 236622 - DNA, 1221 bp, Cannabis indica
atttcgcacgttctgaatattgatcccaactttcggccagtccaacaaaagcgaaagctactggacaaagaacgagcattagccctgaaggaagaagtagagaagttgcgcaacaacaattttataattgaagctttctacccagcttgggtcgcaaatctcgtattagtgcccaagctaaacaagaaatggcgagtctgtattgatttcacaaacctaaaaaaagcatgccccaaagactgttttccacttccaaggatcgaccagcttgtaaatgcaacagcggggcataaaatattaagcttcatggacgcttattcaggctacaatcaaatcaaaatgcacccaccagaccaagaacatacaagtttccgaacagatatgggtctatattgctacaaagtaatgtcgtttggtctagaaaatgctggagcgacataccaatgattggtaaacaaaatgtttaaagactttatcagacaaaatatggaagtgtacatggatgacatgctcgtcaaatccaggaaggctgggggcacatagacaacatagatgaatgcttcaaagtcctcagaaaatacaatatgaaactaaatccctcaaagtgttcctttggagtcagctcgggaaaggttctaggcttcatcgtcaatgccggagggaattgaagccaatccagagaagattcaagccctccttccaaggaagtgcaaagtttgacatgtcggatcgctgcactcagcaggttttttttttcaaaatcaatagataagtttgtcccattcttcaatatcctacagggaaacaagtggacataggaatgtgaaaaagctttccaagagagaaaggcacaacttgcaaaacctctcgtactctcaaaacctctagacggagaagaacttggaatatacctagctgtcacgaaatatgtcgtaacttccgtgctaatcagagaagagaaaagcatacaacacccagtctattacatcagtaaaagactcattgaggccgaaggcggatacccttgatagataaactcgcttactgccttattctagcaaccagaaatttaaggccttattttcaagctcatctatttcgggtgtacactgaccaaccgttacgccaaatactgcaaaagctagatgcctctggacaggtactcaagtaggcgatggagttgggccattacgaaattactttccaaccccgaacaacaat

SEQ ID NO: 236623 - DNA, 1000 bp, Cannabis indica
cttaatgagagtagcctactattcttattcttgattaagaagagagaaagactttcaaaaggctaaatctatttctatatcattatatagtatatataggctaggttaattttattattcataataataaaataatatataataataataatataagatgataagaaactagtttaagaaatatcttaatttaccacatataaatgaccttttaattaatttatttgttgatccaaaatttggtcaactgactcgaagtcgtgaaaaataagtaaaagttgataggaaagcaaagatagtaaaggtgacaccaatatttattttggaggtccaagcccaatttcaatggtaatggtttactccctttttagttgtattttttgtatactaaagtttagaccagacctggtgagcttcttgagatataagatcataaggcagaccaagtgagcttcttgagatataaatgtatttcagtaaagtttctgcgtacaagaaaattgtgaaccactctcaagttgatggaagtttaatatttgtagcaaaaaggaaatctaccatcattaattgcttcatcttccttaattttcgagagttggatgaggttggatcttaggtgctggaggtggttcttctaacttggattccacctctaggagggtagcagaggtgtttgctaccctcgagggacctatgcccctattcgatgttgtgtttttgcatttccatcttatgaggcatgtcttgtctcatgatcgaaccctaagtgttagggttaatagataaagttactagagtagcttgatgaagcttacttctttgtactctggctatatgcctcccatgtctagctctggggtgaggttgcatgctacctttatccacacttgggaagggaaacctcattcagttgatagacttggttgaattgcagtgattgatcatcttgttgggttttatgccctaaaaaaaactctacttcaatgtaatccagattatt

SEQ ID NO: 236624 - DNA, 1386 bp, Cannabis indica
atcactaggtctatgcaaatttctaatcactcaacttgaaatataggaatgtgtcgcaccagaatcaattaaaacagtcaataaagtaccagcaatagagaactggcctgtcacgatggaaaggaaagcatcccaattgaatggccatgctcctccattggccaaccaagcatagtagatggcatcaaagcatatgccatcatagaaggcaatatcttcatccactttctactcttagtctgtcacttggctctcaaaagactgaacttgaccttctagcttaggaatgctaagggtcttctcatcaagcgattgacgaagagagtcttcaactttggaagtctttttttgagaaacgataaggtctttcttcaaactgtcctcttgagccttagcattattagctactccttaaagtttagaaacactactctccaagttggtgatagcttcctctaagtcagccaccttactctttgcattaggggcttgcttcttcgtaactaaaagtttctctacaagttcaaaatatttcttgtgctaattgtccatggtgtaagcataaccgacacaagcctaaaagaaaagaattctgaaaactataaatgtaaggaactaagcttaaaagaagataagaaaagattatttgccacaaagatatcagtgaaacatctttggccaatgacatgtggaggcttggaagtaaccaacttccttaaaggaatgttctcaaccttagacctgatccagccatctccaccaaataggagccatgtgccttgtgcacgcaacttgtccaccaactctaagtggctggggtttgaatcactagtattagcctccttcagagaaatttcaattggagaagtaggagacttctcgttgacctcaataacttttgacttccctttgctagaatcttggacaggaggattagctttagtcataattactttgtctcttttcctaaacttcttctttggaggagcacaagaagcagcagggataacttgcatgactttcctaattgaaggttcatcctccttcggtacagttgtctttctctttgaatagtttgccatacaagcaaggaaactcatgttgtttgcagaaaggaaaaagcaagtggtaggtacaacaagaaaaaaaaaaatgaaaaacaagatcatatgttatgactgcagcaaatagagcatcaacgacctattgattccccaattttctctgacaaactactaccagagttaacttctttgtcacctcattcaagaaacacaattaatatccctaaatgtttggatcattttgaatggaatcctccccttcagagatgttcttatcttctaacatcactctaaatccaatgacagcttcactttgtccgtc

SEQ ID NO: 236625 - DNA, 1139 bp, Cannabis indica
cttgtttagttaacttggagaaggttttagcaagatgtgaagacacgaacttagttctcaattgggagaaatgccatttcatggttcaagaaggaattgttttgggtcataaagtttctaacaagggcattgaagtggatagagcgaaagttgaagttattgagaagctgccacctcctactactgtcaaaggaattcgaagttttttggggcatgcaggtttttataggaggtttattaaagatttctcaaaaatctccaagcctctttgctctttacttgagcagaatagatcttttgagttcaccaaagactgtcatgaagcttttgtgactttgaaaaaagctcttgtatccgctcccattattgtagctcccgattggtcacttccttttgagctaatgtgtgatgctagtgattttgcagttggtgctgttcttggtcaaagaagagagaaggtgttccactcaatttattatgcaagcagaacactagctgacgcccaattgaactacactactacagagaaggagttattggctgtggtttttgcctttgacaagtttcgagcttaccttgttggaaccaaagtggtggtgtacacggatcattccgcaatcaagtatctcattgccaagaaggacgccaaaccgagactgattcgttgggtgttgcttcttcaagaatttgatttggagattcgggataaaaaaggagctgagaatcaagtggctgatcacctttctagactagaaggtgatgatgagataaagaaagttgagcagccaattaaagagatgttccccgatgaagctttattgatggtgagcttagtaaaccaagactccactccttggtatgctgattttgccaactacttagtgagtgggaggactccatctgatttaaaagggcaaccgctcaagaagttcttccatgatgtgaggtattattattgggatgaacctttcctttataagtagtgtgctgatcgtgtaataaggtgttgtgtgccgcaagaagaggttcaaaacattcttgagcattgtcactcatcgccttatggagggcattttggaggccaaagaacagctgcaaaagtacttcaatcggggtactattggccttccatgttcaag

SEQ ID NO: 236626 - DNA, 906 bp, Cannabis indica
tgagcatgagatcatcgccactagactcttggttagcataatcttttgcttgcattgtgaggacaactgaccagcgtgcatctaatggatcgctcatgtgaaatatttgagtggcttgtgacaccattataaacctatcagacttatggcctatttgattcaagtccactaatttgaatctaaattcattgtctttaaccccgttatcacttctaacttaatcacaaagaaaaatagggattcaaaaactactgtaatctaattctcaattttttttgaattataccgtaaaaggacatatcacattcaatagtgtttttgtcttttaaacttgatatttgaaaagtcttagcagctatcataacatagttattttgtgtttttttagatttttcacgatcttgagtataaaattgagtactatttatatagaatgattggtatttaagtacatcacacgaaagatctcgtaatatgtataatagtgtgttggatatgttgcttcggttttcacacattttcgcatatacctaacatgcacaagtgaattagggatcgtacaagtgtatcaatatgatatgtaacaaaataataaatgcatacaacctttttatgtaaccatgcatgtactgaaatttcgataatgttcatcttgtaccaattttttattccttgacttagtcggattagtggtcttgatccaattaaaatgttcccttgaacatccagtaaagcattcacattttagtttcaattgaatattttgtaatgttaagtgtgaaaagttaacttaaacttactcaatgtacgattagaccttgtcaatattttgcaaaacaagcagatccgttttgtcacaatcagctcgactcacaccgcaaacaaaaacacccctactccctctac

SEQ ID NO: 236627 - DNA, 1296 bp, Cannabis indica
ttcgttttttttttcatttttgaagctttcaaagcaactatgcaagtcttaagcaaaaatttagtgatgtttcatcccagaatacaaaccagaagcttggagggctgctccagattttgaaattggcttgccaacagggtaatattctgaacttgtttgaataaactgcttcccagatgatagcagagtttcgtcagatttgaaagaaatttgattctctcccaacttcagatccttggccaacagagcatccctacatttcttcaacaacccatcagtagtttcagctgtagtatcaataaaggagctaaagaactcgaaaagaaaacctacagccaagcttgacctataagcaggacttgaagtgccatcttcaggaacaatggtagctctaaccaatttacaagcttcataaaaagcatcaacagttagtaattttccagctaaatattcttctgcctttctagctctgattgcatgtttagtaccataagcaccataagccaactgacagcgactcactaaaactccaccagaagttttacaaggagaaacttcagccaagaaggcagcattcaggtaaggcaatgcatttccaaggggtctaggtgcggctcgataggtttcaaacagtaagacagaatctttttgctgagaaacttttccggttgatccccagttcggaattttaatgcttagaagtatactcttaaaatctagaggtggcctttgaagaaactcttccaatgtgaaagtttcacatctggtaccactcatcacctctaccatggaatccacagctagaagaatggttgcaatgtctgaaggaaaatgcttcctttgtgccatcaccaaatttcctcctatactagctgtatttctaataaatctgctagcaattttctccatatgattggaaatcttattgaacaccatctcacctcttgagggaaatccagcttgtttagaatcctttagaacttcaattacttttgaaattgttacagcagctccaaatttgaatccctctgtatccatttgaattgttgagagttcaggtatgccttttagatcaatgtattgttcatagtgctctaattccttgtaataaccagaccctgtgttcccaatcactaattttgtttcagtcccttctccaacatcaatacaactgagcaagttttgaagctcttgaagactacaaggacggagccaactatctgttttagaatccaaagacatgacagacctgatttcctctttcaggaattcaggaaatgtacaaatctcattgtt

SEQ ID NO: 236628 - DNA, 644 bp, Cannabis indica
ggagcaaaggaatggattggacccaagttggaggggcctgctccatgatccggaagcaaagtgtttcccaagttttggttcgagcctagaaatagccccgcagcatcagagtaattggttgggttgttgtggaatgagaaatcttgttgcaagacttgtccccgagggtgattgactggtatcaagttggtggtggatgggttaagtgtaggggcattggggagggacactatggatgttaagttaagaagaaagggattggggaggagtccaaaagggccatggttttgacgggttgttcctcgcaggacattttcataggggaggggtgggggttgggtagactcatctgaggctgtcatgtactcggtgcaggagggataagagtgtcctaggcggccacagtagtagcagtggtcaggtatgtcctcatatttcaattctaaccaggttggggaagctaggccaggaaacatgattggtatgccacggggtaagggtttggtaacatcaaacatgatacgaactcaaaggtaagagccccaggtttcaagcaaagagggctaatgaacttcaaggagagtgccagcaatttgccccaacaacttagcaagggagatagaccttcgagagaaagggatatt

SEQ ID NO: 236629 - DNA, 1149 bp, Cannabis indica
ttggcaccaagttttccttgtcaccaatggtgttgcttgccagaagggcaagtgcttctattgtcacattctcttctctagggatttgccttattgtatagcctttgagccaacttagaaagtattggatctttctcaaataggctatcgttctttcaccttgaattatgtattcacccagggcttgatttacgactagctgagagtcgttgtatatgtccaggtggtcagcctgtacttcatgtgccagcttaaggctatcgatcagggcttcatattcagccttgttgttagaggctttgaagataaacttgattgtctcgtgtagttgttgcccccaagtgcaatgagggcaatgcttgcactggacagttggtcagtacagcttccattttccatgttgatgctttaggttcttggtgatgctcttggtcttccttcctttctcgctcttgctcttcttccgaatctcaagatattttaggagataggcttgtacattttatccatgaggtttgtaagggcttggccttttatgcccattctcggttgatatgtgttcttaaactgcccaagctcaatggcccacttcagtagtcagccaaatgcttcaagtttttgcaaaacttaccgcaatggttggtcgatgtacacccttattgggtgagcttggaagtacgaccttagctttcttgttgctaagagtaagatgtatgtcagcttctccatgagtgggtatcgactttcatcgtcgattagtcttttgttgatgtagtgtactggatgttgtatattgtcttcttctcttgttaagattgcactcacagcatgctctgtgatagcaaggtacacacccaactcttcattgtctaaaggttttgataggacaggaggttgacctaactatttctttagctcttggaatgctttctcacactcccctgtccactcaaatttttggtttcctcattgtatgttgaataagggcacgcttttgtccgtcgatttggacacaaatctgcttggtgcagcaatacttcccattaggctttgtacttctttgattgttattgtcgactttatgtccaagaaggcttggatcttgttcgagtttgcttctgttcccctggcattgactatgaagccaag

SEQ ID NO: 236630 - DNA, 854 bp, Cannabis indica
tttaatgaattttaatgattttttttttaattttctttgagattttagttttttttcaaaaaatatatatgtaatggatacccgatgtattggggcggatataaaaagtgaatttagaaagcgaatatggggtgcggtatggataaatttagtaagctttaatattaataatagcttttgtttttttttttttggacacataagctttttttcttttttattgtgataattaataatagctagttaaatatttacaaacaaatattttgtttggaaagtgtggtttataagtagacatgatatggttaaatattattgacagttagattaaaattaagaaaggtaaagtggataatagatgtgctaaaattggattttttaaccgtctatgatatattatttataaaatctgcattgagtaatcaaaaattatattcatcattaattcattgcaaaaaaaaaaatattatatataaaatctttcatgagtaatcaaaacttattttaattattaaattcattgcaaaaaaaaaatatatttataaatatgtcaagaatgggattcgaacccatgccctttcggaccagtacctgaaactggcgccttagaccaactcggccatcttgacttatgttatgtgaagccacatttacattataatacttttaacattatacatctcggaaaaatttaacaaatatttattatggtatttcactcagaaaaagaatatatttatatttattatagtatcatgaaactatttaaacaatagcctgaccagatgggatcataattgatgcagccgtgaataatctgatatttatatatataatataggaaaattctataa

SEQ ID NO: 236631 - DNA, 954 bp, Cannabis indica
ttttattgctgaaattaattattgaagagcatgataatatgatgtggttgtggtattgaatttgtgatgcatgttcttggttgttagggttgtcttgagcatgctttcagctttaacttcataagtttgtatgggttaggtttggacagaaattagaggatttgattagtgtgattttcttttgttgagctctgatatttattgtttgaagttggagtgtaagttcttgttaatggaaatttgcttgagatgtagctcaagctttgaagctttggtccgatgttgttgattaatgttggaattgatgttgttagctctctattgtgatgattttatctgtaagaagttaattttgggtatggttttattaaggttcgaatatatggtaaagtgggcatgtttagaaattaaaatctggtgttctgggtttttcgaacccagtgaccgcggccataaaacctagcagagagccatctttttcccgattttgttttggccataacttttggctcgggactccgttttggatgttctttatatcgctgaaaagctcgttccaagatctatatgattatatgtattttgaatgccatgattatattttatgaaagtggaattagggattaaccctatttgtgaaatcccgagttgtgtgactaggattaccggcacctaataaggagcgcccaggggtttggaatctctattattaccagacaacaggtaagataatagttttcacgtagagtatgcgcggtggcacttatgttgaatacgatataagtgagtaattgcaaccggattagggttgttaccctaatatgagcggttaatagcctagggttattaccctagttatatatgttatgtaatactatggcatgtcggatatatgtatatattgggattatgaattatgcgcttaaggcataattaaactagactcggtaagct

SEQ ID NO: 236632 - DNA, 766 bp, Cannabis indica
ttgaaattgtcttgaatttggaattctaaacttgttgtttatttagagttaatttgtatgttgggccaagttagtcttatgtgtaaactttcttgccaattttatgagtttgagcatacttgtttttctttgaaaattatggcataagttatgtaattttaaactctagtggtgtatgtatgtttagcttgtgtatcttgaggtaaattttacttagtggattggaattctcttcatacattagaaatcaaataagacactaaactaagtacatatagagtataacgtgatggcgcgattgtatgttacatgattgttagatgaaattataagttagggttattagcttaagtttaaattgtgaataaacatgcaaaaatatattacgtgaataaaagagaagagttatgcgagtaaggcataactaggttagactaggtaataaatcttattaaggccttatctgtaaaagagacgggtgatcatgtaacacgtatgtttatattatatagatattagatgcaatgacatcattatatatgagaaaatgtgatatacggtttggtagcacagttatatatgcaggggcgtaatgtgtaaaatgtgattattataattgttcatactgtattattgttctatcttgttgggccttgactcacgggtgctctattatgcagacaagggtattgcagtgtcaagtcagccatgagttcaagagttttaaagacgaattatacatatttcggctaagctagaccacgag

SEQ ID NO: 236633 - DNA, 1576 bp, Cannabis indica
gtcaaacaacttacagatacgatattgtatttgaaactgggaacgtataacacattttctaacacaagatctttagtaataccaatagtgccactttgatgtgtcataatatggttattatttggcaagatcaatctggtagggtcagtattgcaaataaattggaaaagattgatatcatggagatatgtctagtagctcatgtgtcaagaatccagaatccttttatgggaaaattagacatggatgaaagcacgatacctgtattacctgttgtatttccagtgtcaatattagccataccaggttgttgtgttgcaagaaaattcagaagctgctggtactgtgtagcagtgagctgaggcaagagagcttggttgtccacagtcgttttattgttgtcagtactggtctgaatttgatttgctgcagcatcctttgagttgttgttcttgttgtagcttggtggataaccatgaattttataacacttctgaatggtgtgtccaagtatgttgcaattggtgcaaaacagtctgtttttcttgggatgatacgatttgttacctgcagtatcctttttgttgttgttgctggttttgtctccttgaaagggaaaagccatactcgggttaggttcagcatcagtattggtgttaactttttggttttcttcttgggaaacaagatgaaagaccctgttaacttcaggtagcggatccataagcaatatactgctacgaacttgggaaaaagagtctgaaagacccattagaaaagacatgatatactccatatggtggtgttcttgaaatttcttgacaccaccacaggtgcaaccattgcaaacacaagtaggtctgtaattggaaagttgttcccatatggttttgagcttggtaaaatacatgttgatagtctgattgtcctgccttagattcatcaatttttttctcaagttgtatatgtgaggaccatttctttgttgaaaatgaatttttagatcaatccatatggcagcaacagattcatcatataaaatgctggaagaaaactctttagaaacagagtttaaaatccaagaaattactatgttattatttctaagccatgcattatacatagcaacatcattcggcataggtttagggatagtaccttccaagaaacctagtttgttcttaacagaaatgactaattgcatagccctactccaagacatgtaattgtcttgtccagtgagcaattgagagactaagatgttacctgggttgtctccatgatgcaggtagtatggatcgcttggatcttcgaggggattcctctgttggataacttgttgctggttttgtatgatctaattagcagaatttccaatcctagcttcagcgatatgacttccatcctctggtatgctcgacatcgaagaaggaaggggagaacagatgaaagaagaacgccgacactaaaaaagtcacacgggagagaagtcggagaagaagcacggctatggcagcggaagagaaagggatcaggggaaagcttgactttcccgctctgatacaatcttacaaaa

SEQ ID NO: 236634 - DNA, 1779 bp, Cannabis indica
gccaatcctattctcatcccgaagccaaacggaacttggaaaaattgtattaatttctcagatctgaataaggcgtgcccaaaagattgttttctactacttaggatcgaccagttagtggatgcaactgttggacatgagcttatgtcatttatggacgcatattctagatataaccagataaaaatgtatgtcctagatcaagaacatacaagctttgtaaccaacataggactctactgttataaagtcatgtcgtttggactaaagaatgttggggcaacgtattagcgatcggtaaacaaaatgttcgcaaaccaaattgggcaaaacatggaggtttatgttaatgatatgttagtaaaatcaataaaagtagggatcataccacaaacctcgtggaattcttcaagatattaaagaagtataacatgaagctaaacccaaaaaaatgttcctttggagtttccataagaaagtttttaggattcatagtgaacgcgaggggtatcaaagccaatcccgaaaaaatcaaggcattaatagaaatgccatcaccaaaaaagcctaaggaagtacaagccctaacaggaagaatggctgcacttaacagattcatttcaaagtcaactgataagtgtgcgctgttcttcaatatattgcgaggcaacaaaaagttcgagtggacaaaagagtgtgaagaggcatttcagaacataaaaaggcatctagtgatgcctctagttttggcaaaaccaataactggagagaggatgtttctctttttggccatctcgaaagatgcgattagtgcagccatagtgcgagaagagggtaagcaacgacaacctatttactatgtaagtaaaaggttactagggaaagaattcaaatatccccctctagaaaaactcgctttgtacctagtccacgcgtctcgtaaattacgaccatacttctaggcgcaccccataaaagtgttaaccgatcagcccttgagacaagttttataaaaaccagatgcttctggaagattaataaaatggtcaattgaactggggtagttcgacataacataccatcctcgaacatccatcaagggccaagccttggccaatttcttgatagaaggtataactccagaagaaattctacctatttaaggagatgcggaaacctagaagttatacgtggatggtgcatccaacgagtagggttcgggtgcaggggtaacattaatatcaccaaaaggctttaagtttcactatgcactgagatttcaatttgatccttcaaataacgaggctgagtatgaagccttgatcgccagcttaaaaatagctgaggcattgaaagtcaaaaacgtcatctgccatagtgattcacaggttagtgtgaaccaggtccttggggaatactaggccaaaggcttaaaaatggcaaagtatttagagaaagttcagaagaacttggaaagattcgattactttaaaatcgaatagattccaagagaacaaaactccaacgcaaagcccttagcaaaattggcctcgcagaacaacttggatgaatttaacttagttccgctagagtactaagcgagccatgcatatgtgaagcgaaagacgtcgagataatagaaagctctcctaaatggataactcttattattagttacttacttgacaggcaacttccaaatgaaaataatgaggtgcaaaaactattgtattcagtgcctcgctacacaataattgaaggcaaactatatagatgagg

SEQ ID NO: 236635 - DNA, 1707 bp, Cannabis indica
gtgtgacaagattgaaacaacaccttactcaaactagaaaagatgttaaaccatgtccggaggttcccaaagaagtaaaggatgaatttgtggagcacttgaaacaaaatactttggcaaagcatttgagtcaaatgaattttgaaaagatgattgggtcgggtactggtcagacattagaaatcgaggcataatcaatattttagtcaataattccaagggcactgtgtttcttaaaagtattgatggttcttcatttagtaaggatgtaccgaagttatttaaaatgttggatgatgtcattgaagaaatttgagagcatctaattgttcaagtagtcactgataatgctagtgcctacaaagcgacgggcacattattaatggagaaaagaaagcatctatattggactccatgtgcagcacattgtcttgatttgatgcttaaaaaaattggtgaattgcaacaacaccaaagtgccttgtccaaaggaaaaagattgagcaagttccttcacaatcatcaatggttgttaaacttgacaaggaaatattgcaaaagagatattataagacctgctgccactagatttgtaactgcatttcttacattgcaacgcatatatcaagtgaagcaacctttggaagctatgtttacttctgaagagtgggcaacttgtccttgggcatctaaagctgatggaaaggaggcaagacacaagattttgaaagacacatatttttgggcgagtgtatcttatgccattacgaccacaaaacctttggttgaagtgttgaggctagttgatggtgatatagagccaactatgggttatatgtacaatgctatggatacaacaaaagaaaaatagcaataactttgggtggagaaaaaaaaggatgacaaagagatattggaaatcataaataagaaattggaatttcaattgcatagccatttgcatgccgttgcgtacattttgaatccccgttgtcattattcacaaggattttctaaccaccgagagatcaagttgggtttatttcattgtatggacagatttataccggaccctgaagagagaatgaaagctgaccttcaatgtagcaatttttacaacaaggaagggttctttggactcaccttagctcaacaaacatttcaaaaacgatcagcaggtaattaaatgtctaaatctatttctaatatttttttaaaatgtatagtagtatgaataataaagataagtaattattctttcttttagtggaatggtggactcaatatggagatcaaacgctagagttacgaaaaatttgccatcaaagtattgggtcttacttgcttggcatcaggatgcgagcagaattggagtactttcaatcatattcataaaaaaaaaaaaagaaatcggttgactaccttaagaatgcattcattagcatacagaatgtgaaacaaaagattgaaacacagatttttgaagatgaattcagcaactcaatcaaatgatcgatgatcgatcgatgagttgccatctaatgatgaatggcttgttagtgaaagtgaagatgaaaatgggacaaggccaaggaataaggatacccaacttggagaattggaatggactcatttcactgacaattcaaaccagtcagaaagaagtttaaaagggggttcggtaaactctaattcttgttttaattt

SEQ ID NO: 236636 - DNA, 460 bp, Cannabis indica
acacatttttctataatcatattattcttcataatattttttataatcaaattattttgaacatctcataccaaacgcttccttatattattatttatttaactaaaatgtactggatccaatattcagtaccaataataatatatcaccctattagtttggcttataatactctctgtgtataatttaataaaataacttttatgaaatatcaataattaatcgtaagggactacttatagttagtgctaaatactattagtaccttataacatgcgcgcatgcatagttattttataaaagaaattttaaaggacacttaccaaacatcacaagaggtgacatactgctatatattggtacgatttagtattagctagatctcatatattttgatttaataaataatataaaaattattactacttacaacgcaccacatcaatattaattttgggca

SEQ ID NO: 236637 - DNA, 1267 bp, Cannabis indica
ttatcaagtttgttaaaatttagcgagttatcagaggatgcagggttgattttgagagatggacttgtgacacagtgttagtgagccgacacgagcaagagccagaaggcaaactcgtggttttgggtgattggtagatcattgcccacgtgaaaaaagcttagaggagcaagtatgcagtgggtaagtggggccttttgcatgaagtcgtggtgtgcgaaagggtcggagggccaatatggaaaacttcgcaaagtgattatgtgcaagagtgcacttggtgttgtattaggtgcagttggcttgtgagtctcatccaggtgggacacatcaaattttaccatgcgataggagtgtcttgctcgattgccatcaagaggatggtgtgccatggagttggcatgtgtattttccggagggacttgcctagagggacttagcttcagtggaagcgtgttctgtaggtgtcgttgggtacggttggtttgcgaatctcaccccaaggggtgcaccatacttagtccttgtcaaaaggatattaatgcattggacattggcgagtgaactactatcataggatgtgttagcttcagggtcagtgttgcaagtgctacttggttgactggagggacattgtgatggactcggagaagttcatgttgggggaagtattctagtgtggaggcactactccatgggtggttctgaatagcgatagtggcataggttctttgatcaagtctaagagtgggcgagggagttcgtcaccaagagggtaattctacggagatagagggataagtgtagacttagtattcgtatgaagcttggagtaagcttaggagtcgagatcaagaagattggcctgcagtccgtcgatgagggcatcaacatgttgaagtgaaggagaatgtaacgtgcgtgtcaatgtggcacgttacaagctaggtgatgcccacaagttggccaagtggtggtcaactggtggcgcatgttgatgtgcatgttggtggcatgttgatgcttagtttgtacggtagtggcctttttgtaaatatcttcaatattgtccagattgcgatgggacttggtattcgttatttatttaggtctacgaatacaatggtgcaatcagatgtgagaaaatttgtgatttggtatatggtttaagcatatgtctacagagcaaaaatcatgtatgttcctggtagaaggctaaaagcttagaatgctctttaatgggggagtacttggtgtcagctctcca

SEQ ID NO: 236638 - DNA, 1137 bp, Cannabis indica
attgtctcggccaaagggccattccctaataaaaataaatataaaaagggagataaataaaccaagtctacatgttaggagacttggatagatcttcttcttcctcctcgacctggccgtcctcttcttccatcttggtcttctcgcaaagagctaaagtttcctctcccttctcctccaagaagctggtatccatgttagggttctaaagccaggctcggtatacaacgcgaataccaactttatcgcaccgttctacagtctcgatttctttcttgacaagtttttcaacaagcttctcctcaaactcattgacttggactttgagggccttcttggcctcctcttttgccttctcggcttcctgctttgctttccctgcttcctccttcgctttctcagcttcttgcttgaggcggataatcttctgttgggcgttgtctcgctgctgacacacatccttgcattaggataataatctatgagtctcgccctcctaatacttgagccgctcagagagtagttaattagaagcaaaataagcaaaagaggcctagagaattgtaaacaaataagtataaaagaggtataaaaagataatatatttatattaataaagccgacataggatgaagtgacagtccaagttccttgaaagaatctcctttgggctcctcagattgagaaaatcccaatctgggggaaggagagtttgaagtttgcgcgaacaggcaaccccatgtgccaggggaaattcagacccagcttccccagctgcgaccgaaagagtctcgatggcctaactcgaagaagcagcagcgggggttgcctcgggatgaggaacattggcgtcgagaacaattgaaggaggaactttctcttggatctcgttgtccgaaacctcgagatcaataggttcagtcgataatttcttcttatgagcgatggttttcctttggttcttgggaggaacaacctcggtagaagtagggactccagggttagatgtccttttcttccccttgcggtccagaatgacttcataacccatgtctgcaaaacaagacggggtgttacaatcattataaaaaaaccgattaaaaaggggaagagcataatattctacctaagggattt

SEQ ID NO: 236639 - DNA, 1569 bp, Cannabis indica
cttacacaagtataatgcactttggctatctgtatagacagtagcttttcctttgaacaaattcatctcttctagcaaaccttgtatccataacccttccttaattgcctctgttgcagctatatactcagattcagtggaagataaagctaccacaggttgaatctgagatttccaacttacacaattgcctgaaatgagaaatgtgtaagctgtagtagacttccttgagtctttatcccctgcaaaatctgcatccacaaagccttccacctgaattttgtcttggtttttcttgaagcataaaccaaccttggtagtgatgttgatgtacctgagcatccatttcattgcagcccaatggagtttcccaggatttcccatgtatttgctcagcacacttgctgcatatgctaggtctggtcttgtacagaccatagcatacatcacagatcccatagcatttgagtatggtatttcttccatctcttgcctttctttatcagtattaggagactgtttattagatagttgaaactgacttgacagtggcattgttgccttcttagaaccattcatttggaatttttcaattaccttttccaaataatccttttgactgagaaataacagatttttgctcctatctctcttgatgttaattcccagaattttacttgcagcccctaaatctttcatgtcaaactcagatttcagaatttccttcattccttcaacctttttcttttctttgctaatcagtagcatatcatctacatagagtagaaggtattcagcttgtaatatttcagtgcctttgtagtacaagcatgtatcatgcatgctccttgtgaatccatgttgtgtaatgaagctattgaatcttttattccattgtcttggagcttgttttaacccatacaaggatttcttcaagagacacacatgatcatttttgcctttttctttgtaaccttcgggttgttccatgtagatagtctcttctaagtctccatgcaagaatgcagtggttacatccatttgctccaattctaaatcaaactgagtaaccaaggccaacattatccttattgtcttgtatttcacaactggtgcaaagatttcattaaaatcaattccttctttttgactaaaaccttttgccacgagtctagccttaaaccttggcatttcatcatctctaaaacctggtttgtgcttgaaaatccacttgcaactgatcacccttttttcttttggtcttggaaccactatccaagtcttgttctttttcaatgaccccatctcattatccatagccttgttccaatgctttgcttctttacttgaaatggcttctaaataggtctttggctcagtttttacaagttctgtagctgtgacaaaagcatatgccagcatatctgtgaaagcagaaaatccatatctttgagtaggttttgaaaccctcctatctctatctctaaccaattggtagtcttgaggatctgttacatcttcctgatcggttccacctgatctatatttccaatttgtccctcagtgtct

SEQ ID NO: 236640 - DNA, 1292 bp, Cannabis indica
aaaaactattttttctctaatcataacaaaattacactaaaaaatattcctcattattatattaattttttaaaaggtgcttctacaatgcactcttccaaataaaggtcttaataaaataataataataaaataatccaaagaaatgtagaaaaatttatttaggctattttgactgttgtgttagttttatggtactaaatcagatacacaatggaataaaaattaactgattatcattgtactatagtctcaaggatctccagatgtatatatactaatccaaaatattaattgcatgaaataaataaataccccttgatgactatcagggtatcctcaaaacttctcgtatgttggatccaataaatttcacactatagtcttctagatcgatcgaccacagacaaggagtagtatgagctactaggataaagtttatatgaagctcttgtataaatctcaacacatgagcaagaactatttttttgtgatagagagaaaatgttttactggtaaaactctttttaggctttcaaaaaagttacatgaaaattctattccaaaaacttatgttcggaactttgttatacagtatatttaaataaactcaataaaagttttatttaattaattatttaaattcaaatctatttattaaataatatttaattatttgaataaattatataaccgatctgattatatatatttacttctaataaccaattgagggaatctctcaatcacttaagagaatatctcaactactttttaaattcaaatatctatccactgaattaattaattaattaatccaaaaagacaaaactaatagggacaccctacatatgtggggcgcatgtagtgtgtctgggtacggtacatgtggcccctcctatgtcttgttattaagacaagaattgtgccttttcttttatcctaacaatttttatctttttctctaattaattaatttgaaaaataaattatttattacaaaaataaataattactattttgctaatttaaaatagatttttctgaacttctatatacaatatttatcacaccgcttgatagtgtttcaaggtggcgatccagagaccatgaacctataattctaagttccaataaattagatttatttattgaatctcattaatcaaataatcttgtttattaattgcatgattactccactataaatatggaattgaactcttagtaattatagaattatatttactgagttttactccagtatccaatgatataattaattccattaa

SEQ ID NO: 236641 - DNA, 838 bp, Cannabis indica
gatgcacgtggtggagcacctaggaccctttgggcgaacttggtgtatgtgccttctttgtgaatcatcaatatcttgagcaaaaattcatgcacctttactttggattttttgaaggataacaaacttaattagcctattattattcattgtgctctatcaatatcttcatataataaaatttgtttgatttacctattaatgaatacctctattttcctatacaaaaagaaagagtataggaattgttattccatccttccaaactaacgaaacattacaaaagaatactaccctccttttggaaaaatgctaaaggacatttatagtgcttaacacttttataaggtattattttattattgttgcaattcaatatcagatttcatttattttaatttaataaaaattatagagaactactaatcaattataaaacgtcatcttatagtatagtagtacttgacactttgataccccataacaatactcctccttactattattcaaccctcttcatttttcgtaatctatccatccttcatcttctccctcctttttaccaaatatagtgttagtattttatgtaaaactataaaacaaatatccgttctcttagacatttatacccacctttgaattaattgctatttaaaaaaaaagttcctttctattttattaatttccaatacaatctcttcgatattttgtgtaatgccttcctctgtttcttatgatattaatatacccatagaatattttatttgaaaatgaaagccagaattaattaagatgaaaattcattaaaaagaatatagagattggagagattgacaag

SEQ ID NO: 236642 - DNA, 1147 bp, Cannabis indica
cagcctttattctttgccaactccaaagccgcgacctcaccacaaacttgcaattgcaataaaacataatgataaaaattaatacaaatatatcataaagttactttttaggccaaatataacataaatttcacatcttcattagatatatatctcattatattaatattttaattaattttattactatatttaggttttattatttttataaaaaaaattcaaattttatatctaatctttccttgtaaaatctaaaataaatgtgaatgtcagaaacattggtgttggctttcttaacagacctaaaacttctagaacgaggagagtcattttaaagctgctatactgtaaatgtagaacagaaaaataggcagcatctcatagttctacacgctaaatttgttatttgtatttttttttttttgattaaaattttataaataatttaaacttacttaacgtgtttggataggcaatttattattggaaatgaaagtacatcaacaagtatatacatcgaaatttgaattttaatcaaagtgcataaaacaaaacgtgcagtacattatgggatatatacatgatgcattcatgtagttattttatatttatttatttattttttttcaatttttatctttatatattaaaaagaactttttttttttaggaagatcaaagactaaagaacaaaagctgagactaagatcttcaaggagaggaacttaaatggttccaagttatctctttgtccgttccaagggctgctcgggcaaggccgtgagctgtggtgtttatagaccgagggatgtaatggacgaaagcacctggaaaagatgacaaagaggagattatcattgcaacaagacccgagagggctgaacgatctggagagaacttctgaatacgatgcaccaaattctggcagtcggaggcaataacagcaataggaaaatggactgcttgacaccaaagtaacgctcggttgagagcttcagcttcatcataaattggagggaggcctggatgtgaaggagccataaaggtggcaatgacattaccacgggaattagttacagcagcaccgtacccatgcttgttggaagagtgagaaagggctacatccacagaaagctgaaaacat

SEQ ID NO: 236643 - DNA, 1153 bp, Cannabis indica
  modified_base (41)..(41): a, c, t, g, unknown or other
aatgagctcaaccagccacgagacgagacaagaaaaacagngacacagatcaaaaaggatgtacacatccaactagaacaaacccgaaaaacaaaccaaaacgtgaccggaatcgccaaagagcttcgcaaactgcatagggcaggaatcaacaacgccacaaactcagtgacagttgtggctgtcctctttgcaacggtggcttttgccgctattttcactgtccctggaggcgacgatgactccggaatggcggtgatggtgaacaccacatcgtttaagattttctttatattcaatgcaattgcattgttcacctcattggctgttgtgttagtacaaataacgctggttagaggggagaccaaggccgagagaagagttattgaagtgataaacaagttgatgtggttggcctcggtgtgcacctcagtggccttcatttcttcggcgtatatagtggttggtagatgcaatagatgggctgcgattctcgtaactgtgattggggctgtgacgatggtgggtgtgcttggcaccatgacatattacgttgttaagtctaagcgttttcgtaaagtgaggaagaaggagaaaaggattggaggatcacaccattgtcatcatcatcactcggattctgagactgaagttaatcctatctatgctatttgattaataattgttagtgataattgataattcacaagtgcttatttttgacaattatttgtgttgatttattattcgtatacatagagttattatatcttatatatatatgagttcggttaagatagacctcataaaatatacccattgatagagttttcatttttaacccatcatcataatctaatagttgaaaattgttgactaggcttagtttattttttgacttttcaaacttttgaaaggctcacctgctcatgaacctctatttaaaattcatttaaataattaaaaattaaattaataaaatttattactctgattccttttaattctcttttaattctttaatcttccattcacattccttatttattgtttggtacatttaatgctagtattttagaattatttttggatgacgtacataaatattgggtcacaaattattaaatttatactgtaaatagttttttttttt

SEQ ID NO: 236644 - DNA, 1014 bp, Cannabis indica
caaatacctgggagttcctcattttgtggaagagttaccaacatatctttccattaccttatccaaaatgtatcttctaagatgaatatctggtatgataaattttactcaagggcaggaaaggaaacactaatcaaagcaatcatacagcccattctctcctttgccatgtcctatttcaagatcccaaaatctatttgtcagactatccaacgtttggtatcaaaattttggtggggttatacttcaaatattaggaaaatccactggaagaaagggtctgctctctcggtctctaaattctttagaggtttaggttttagaaccctcactcatcataatcaagcccttctagccaagcaggcttggagagtttggtcaaatccggactctcttcttcattccattctcaaagcccgatattttaagaactctgattttttgcttggccccaatggttacaactcatccttcatctggagaagcctcctttggggtcgtcaacttcttaagaagggacttgtttggaaaataggtagtggcaatgacatacccatatctgcttcaaattggatacctggaatctctcaccccactcttcttcatccaatagacccttctctttccgttgtctcctttttcatcaatcctaatagcacctggattaatgttgcaaagttgtagcactaccttcccatgtaccaggctaaatctgttttccaaatccctcttattcccaaccctgcagatactctcatttggggttttcatcaatctggcattctcactgtcaattcagcataccatcttgcttcctcttttgcaaatgttcactgtgcctcctcctccgatcctaatccacttaagaattggtggaaaaccctctggacactccctatccccccaaaaattaagcacttcacttagaaagcgttcaaccacattttgccttgtgatttaaacctgtttcacaagaatgtcctacatgaccccttttgtcatttctgtggaggc

SEQ ID NO: 236645 - DNA, 1459 bp, Cannabis indica
tatggtcttgaacagaagtactgcgcctatgccaaatacgccaacaaataacaataaattcctccaattcgtagttactcaaaattattaagatttataaaacactgaaaaaatatattaagatttataaaaagagaactcccctagctcatttttcatatttagaaaactactacaatgttagagcttttctctataaattggagcttctgacacttgcctatttctgtaataccatctcatgagaaataaaactcgaagtagacgtagctccattactgtcgcgatacagggagtgaactaatataaatttgctgtgtctcttataattacttaacatctatttcattctcgccaatctagcaagcggatgtagcttagaagtctagtccatattttaaagtctaacataaactctctcttagaggttaataataggggaaaaattaagatttcttgttcctaaatctatagctatcgacattatcttttttctctggataggcccgctgccttccttgggcttgaggtgtggcttggttggggttgtattttgttattgcaatttgatttttgctactgcaattagtcttgtttctgtgacatagtcttgagtgttttagtattgcctatgtgacatagttttgaacatttttgccttgtctctgtgacacaattttgagtgttttagtcttgtatgtatgacatgattttattttgttttgtttcgttgttggttcaattttgttcttcgatgactcaccatcaaatcgttgttagtggttgggaataacaagttctttgcgactgaaggggttgttagtagtgcaattacgtaccttacacaatagttgagtgcttaagctacaaggttgaatgaacctactgcaataattttttctattatgtcttttgagcggcggatgaaacaaaatataagtgttcttaaggttaattgtgatgttgcaatttttattttattttatttttgtcaaacgatatgataatcaagtagttgattatttggtttgtttttctaattttaattctagtcgtatctctaacaaaaagatattccgattgaattgcagactattattttatccattgatcacctttaataaaattttattatttaataataataaaaaaattaacctcaattaacatgtaatagaatttcaaaaaatctcggataaatatttagaataccttaataattaactttaaacaacattatattacttattaatttgtataatagaattactagaaatatcaataggttataatagaaagagaaatgctaaataatattaatattgttcaacatcttcttaagtaggttagttgagcgggttgaaaatagattcaacctgcccaattaaatcgaataacccgaccaacccgtctttcgatttttttttactttttagttttttattatatataacataaa

SEQ ID NO: 236646 - DNA, 1727 bp, Cannabis indica
ggttttgatttgattgatgttgtcacttttgtgactaattttttcttttattttctttttattatataatttctcattaatttatatatataatttttatttgattgatgttgttaccttgtgacaaatttatttatttatttaattttttttttgatgaaatgagaatttcattaaatttagcattctgaatacataatatccagcagatctactggagcattagacacacagatgctacgttcagataaagaccgagacaacctagcaacaacatgtgctagtcggtttgctgaacgttttacaaaatgaattttgaaagaaggaatagaagataaaagaatttggcaatcatgaacaagaacaccaaaaaccgaattaagaggaatactgcttcgaatagcttggacagaaagtagactatcagtctcgagctcaacaatgtgccagttatgactgttaatccagcttaaggcttccttgatgccaatgatttctgcaacttcagttgtaaaggtcctaggattacagccagctttgtcgtcaataagaatccccgagttgtttcttgtaaccatgccataaccatatctgttctcactagcaaacgtagcaggatcaacatttatcttgattgtgtttgtatccagtttagtccattgctcagccccatctccattattatggaaattaatggaagataaggaattgttatactgagctttaatccaatgatcaagagatattcgtgctgaagctaaaacatttgcaaccgtgagagctttgtttttccagacaatagactttcttgctttccaaagagaccaataaaccatagccatctggaaaacacaatcagcatcaagtttgtgaaaaatgttatctaaccaggttggaaaggagtcatcaagagcaattccagaaggtagacccatagaattccaacagcatgaagcaaaatggcaagaaagaagagcatgagatatagtttctggagcagaatggcaaactggacaagtggaggggatatccacatgtttaattctgagattcaagcaagttggaaaaaccccagatgcagcccaccagagaagattcttgacctttggtgggatcttgagttgccataggtttcgccaaaaccctgaattgttaacacctgaccttgaatccttgttatcctaaagcatgcagtaggcacttttgacagagaagttcccagaatgttcaccagaccatgaccaaaaatcacctgaagccgaaaagctcaatggaatactaagaataagatcagcatcacggtggttgaacatatcctgcacaagttcaatgtcccaggttctagcatcaacagagaaaagagaactcacagtatgaccaactagacccacatgagaggaagtgacatatggattagtggaatgaggcagccaaggttggtgtaagatgttgaccgtcagaccggtaccaatggttcgtcttgccccccaaacgaactaaggattgagcttgccaaatactcctccaaacaaagcttggattccttccaagatcagccaataaatagtcatcatatgggaagtaacgagccttgtagattctagtaaccaaagaatttgggtgtgtcaaaaatctccaaccttgcttagcaagcataggaagattgaaatcatggagaagacaaaaacccaagccgccttcatgttttggttgagagagtcgattcc

SEQ ID NO: 236647 - DNA, 1262 bp, Cannabis indica
gtggttaaaggttggatcggtcaaagtaaaatcaaaaacaacaacaacggatgaatcaattttatcaacagaaacaggctgtaatttgactgattcatctacaccgttacgaccaagaacaacataatgaaaatacaacaacaaaatccagaaaaaagcagataaagctaccaaacaacaaagccgattatgctgattcttccccgtccctttcttcatttgctaggacggaacactcgtcgtcgaacgacgtctcattagatcaccaaatcttccccaattcacggatcacattaaaagtttcaatttttattgttcttttgcatcaattaacaacaacccaaaaaattcacatccaaaatttacatcaacaactgattccaagcttacaaacaaagtttctactgttacaaatctacaataatcaatacatttataatgaaactaagctaaatacatcaaatcaagaaccgaaataattggttcttgttcgagatagctcaatccgtaatgtaagaaactaacacagaatcaacgagaattgaatcaaagaaaaatgatgcagaggatacttacggagacatttcggttcgcctcataacaatccgagaatttttcctctggtttttggttagagagagaaagaagaagaagaagaagaaagtgaagcgaagggagtcgaggtaggtggtgggggttgagtcgttgatggcctgaggctgggcggcgactgtcgacgatgggagaagagaagaaggggacgagaagagaagaaggggacgagcggctgtgagcggttcaagagtttcagacaattagtttagggttttgttcttttgttttagttttagttataaatttaaaaaaataaataaataaaaaatagcgggtacgggttggacccgccccttttaagctaacccgtacccgcccgccaaacagcgggttaatactcaacccaacccaattttagcgggtttttaatgggcggtttccatgcgggcggattctaatgggttaggcggttctcacggtttagcggtttttatgtgcaaccctaatagaagctacagatttcgtatctatgattagcattcccactcaattgaactaccatgtccttaatctatatgtcacaagaagatccattggtcgactttaacgaacagattgaagaacataaataatacaactgaactaaaacctaaccatctcaggattgagatcatttgacctaagatcaacaaggtgatattgaattg

SEQ ID NO: 236648 - DNA, 1069 bp, Cannabis indica
cagaatattttaagaatataagaatattttgttaaattgatggtattagtagggttagttttatgaatatatataaatattaatattatttattgtagattaatttaaacatatattaatattcatattatttgttttaagttaattgaatttatatcaattttaaattaatatataaatatcaatatattatttgtaacattattattttttattgttatttttaatattgagagtatacttaactttagagtaaatactcatttggtaccctatgtttaattgtaatacaaacttagtacctcatattttcaataatgatatttgaataccttataatttaaaattatacccatttggtacccctaaacttagatttggtcaacaatttttttgtatagactagagtgtgcttatttacatataattattataattaagtaattataattaattactaccaattattatctaaaaaaatatcctaccaattaatatataaatatcaatatattatttgtaacattattattttttattgttatttttaatattgagagtatacttaactttattatttttaaactctatatttattttccttaaattttaaaaacttttagtgttatttttttttttaaaaaaaacaaagtaattaacaagtgacttcctttaatttataaaattttaaaaatacaaaaaataaaaataaaaattaaaaaaataactaattatgcgtccaacgtacataataaaaacctaatataaagtaagtatgtcttttattgttttgtggatgctgatttttgtaacatttattctattttatttaacaaaatttttcccttttaataaaaaaaaaaagaaaaaataagaattattacataaaaaaaggtaattaatatttgcaccccaaataattataagtacatcgcatgtttaagttgaccccatttaataaattaaaatattattacaattatagtctttgaatcaaaagtacaccccactccacctacctttactatttttattccctttttctttcatcaatttttttctcaatctc

SEQ ID NO: 236649 - DNA, 1067 bp, Cannabis indica
gttgttaaatggtatgtaagttgtgttgagattaaagaaagatgataatgtagtttgagagggattcagtctttgcttctaagtgctaagattgctttttttatgaatgaaagccaatgaaagcagtgcttgaatcttcaattgcttgcttgtatcttctgcaattattatgtagacaatggaagaatgttttataattttaattaagaaatatgtgtgtttctttctctcttttccaaagaaacaaacataccaaagtgaaataactaacgcaaacgacaagaaaattctatttatataagaatggtgttgaatttcgtaatatattcttaatttatgtcaatttttatttttattttaatattaagagttagtcccgcattaacaagatgaatgagttactctttctattgctaattgattttgaaataaaatttacttcatcttatcactaaaaaaaattagaatgattatttttttatggtaaaaaggagaggaggagatatcagttgtgacttctctctttgggtgtaattatgacaactttaatttcgctcacgaatgttcgtcaaaaccttctaaagtgtattgtatgcacctactacgataaaaagtgtcacatgaatttcaaccaagcaccacgtgtacggatgcccttaaaataatgtctcatatttaagattcttaaaggagccaaatttgaattcatgatctctattttaaaaaagggacattattccatttactattattttttattttttttatttttatattttggattattttagtagttgttttagtagttgttatatgagttattatgtaaatttgaattgcaatttaaatttctctcttaattattattagttgtacatacatgctaattcatctaaataaaagttgatttctttaacttttttctttaataaatttattcattcttattaaaaaaaatatattattgatatatagaaaacgacaataaaactcaaaaacgacatactgttaataaaatctgtttccagtcttaaccctgatcaatcccaaaatgtttggccccaaaa

SEQ ID NO: 236650 - DNA, 1149 bp, Cannabis indica
ggaaggaccatatcaagtggttgaaattctagaatcaggagcatacaaactgggacggtatgatgaaaacatgaaactcgttctagtaccaaggtattgaaatggggaacatttgagaaaatactaccagtaacagtgccaggtcggatgaccattctaagtacaaaatctaagaacatttactcttaagtaaaggtacgatattcattgaaaaaaaagataacaaagcacggtaaatctgggatcaaaagctgcccagtcagccagttgtctaaaaaatgaaaaacatatttcatgtttaaaaaccgcttggtcaatcatttttctcaaaagaaggcctataagctgaatagacatatatataaaaaaaggaagaaataaatattcaaacaacaagagtctgaggctcttggtacggatcgccttggtctgagggggccagaggatcaacactctaggcagcagggattttgttcctttggtcagctggagctgtggaggcagtcgcctcggggttttctttggccacctgagctgcgtagaaatcaagatacatgctcttggaatcgccacggtaataaaagtttccttcaggattggccttccaaaaatcatagaaaacctcaagagcagctgtctctaggctctccacctccttcttgagctcctcctccatggtctgcttaatcctgatctccttctcaagctcctcctccctagtttgtttattcttgacatcttcctccagtttggaaagaagagtccgaagacactccctctcatttttaagattattgacctccttggacaaagaaacattatcagccttcagctgatcggtctaaagcatatcttgcagctctttggtcagctcctcaaccttggtgttgctagcaagaagcctcttgttcacctcccaaagctcattccttacttccccaggctagctcctcgtgtcctcagtttccattctggccatatccacctacctctacagtgtgttggtggtggcaaggttcttggcagcagctgatttggctatggaataggcatatgacatcttcacattgacctgcacgacaaacatgttagggtttgggctacataaaagagaatgaaataaaaaagaagatatttacccgagtagct

SEQ ID NO: 236651 - DNA, 1665 bp, Cannabis indica
aaaggaatagggtgtttttaagtgagcgtgggagtgctgtttgaggattgttagtagcttttagttgtctaaagttttctggggggctagtttttgctatgtgtcggcttggcgataagaaattttgcagctcatagtttggcaaagcatgtccttcggttagacgatgagctatcctggttcgaggagatgcagccgaccgattagtgggttgtctacgttattaatcatgtgtgattttgatcaccgacgtaaaaaaaaaaaaaataggtgccttttcgaggcctcttgtataattctgtctcaacgattactcaataggtaattaagataaacttgaatattagagtccaacttattaatgttgctagacttaataaagctgaaaaagatgtcattaatatgataaacaatatgtaatttagttgattgctatttagacagtgtgtattatttaatggttgttggaataattttttttcttttatttcaaaaaaaaaaaaaaaaataagagggcaaaataataattattcgaacccttcgttttatatatatcaattgttattctgatatatcaggtgcaaattgtaatttctctcttttgtctttaatttaatcaattagatagtcttttaaatatacactcaaataaagaatggggccattgggggagaaaattcttggaacatgcatggtagctacatgaggagagaaatatattaaattatattagtatatatataataaatgtatatagtatatactccctagctagctagttcttcagaatattttttttattattgaaacgcttatatatacattatattatattgtataatttgatactcgaaatgtagagctttctatgtacacgtactctcctacaccttttatgatcacttataattgagttagccgtttagttcttgagaaataatattatactatatacaaagataagaattatagaaaatttcagtagatctttttataaaagggttattttggtagattttttatttatttcggcatttaaaaaagttttttagtgtaattttttttttataattgtatgtattgtaattatttaagatcacttataaattttaaaaaaatttcgaatagtttacaatgtaaattatactacgcgtataagaaaaacagttacgcgtacaataaaatatgtacattttatttttgacactgtaaactattcataattaattttttaaaaatttataaaatattttaaataataaaaataaattaaaaatctctcatgtatatcaaaataaatagagaatcgtactaaaatacgtctctaataagatttacggcagacttacccataaatacatacatatatatacgtagatataatatatttgtatatgtgacgaagacgtatatctatatatatttatatttatatggagtgggagctgggcgacgttgcatgcatgagatgcaatattgcaagcattagatcacgcggacgtaatataaatatatatatctaataatcacatatatattttattatattacatattaatcgatggagggtttttcttataatacaaaaaaaaaacaatctacgaattctttatatattaaaagtgcctatctaacgacaattcttggtttaacgattcttggttt

SEQ ID NO: 236652 - DNA, 778 bp, Cannabis indica
gaatgtattgatgcactatttacttatttcgatatcgagaatgatttttagtctatttttttttatataagttatagttatttaaaataccttacaaaattttgagaaattcgaaataatttataatataaaaaagagtgtcgaaacagactatctcacacatgtaaaataaaatagtcatgcatgcaacatgctgtttgaattatgttttggcgttttaaatattttcgaatttcttaaaattttataagatgtcttacataactataatatacaattttttttactgattttaaaaaatattacattttactttaaataaagactcaaaaatatattttttataacccactaaattttaggacataatattgacttaggacccgtttgacacaacttttgaaaaaactaaaagctattttttgaaaaagttgtgataaaaatgtgtttggtaaatagtcaaaaaataactttttgaagaattttggagaagttacagctaaaagctgaagctgcaccaactcaacacttttagaaaaagttgtttttattaaaagactataataattttttttgtactaaaaccatatttacttgtttattacataaaaaaattaaaataaactaattataataaaataaataattattaaatctctttttttttttaaaaaaaaaacaatttatattttattttaatattaacaaacaaaatcaacctagaacttttctcagattttctaggtttagaatttatcaacctagaacttttcttata

SEQ ID NO: 236653 - DNA, 882 bp, Cannabis indica
tttttgagctcaatgtagaacctgatgaaattgtcactcataacttcattggtgttgttcccggtgaaatctggtgtgatatgtctatgtcattttcgttgcattatatttcagtttttatcagctccacaagtttgctagtgaagaattagttggaattagaatcctgtcattttgtagtcatcataacttatattttctattcattggccttcatatttgatcacacatatgatttgttccattgttgcatttttaaaggaaaagtaatattaaaatctaattataagtttataattgaaaccgatttcttttaaattttctgtattgctgttctttttatgttttcatctagtttttagttcttatttttatttgattggtagaattggttttttttgttgtatccttttgttaatctggtttttagttcagatgatatatatttttagattttgtaagtttctaaatcataattatcataaataattttgattgttgagtgtatttacctagtttgttgatttttcgatatttgttgtcgaattttgttgttgtgtatgatcactattaattctgatttaagttttctagctaaagaattatgtattcattgatttgcagattatcgttaccggagaactaattggcgaagtcaccggggctggagaaggcaatcagcgatggtgatatgtgttttgattatgtcattttcaatgtaatcagttaagattgctggtttttgagttcgaattgtcatttttaatcgttggaaaacaatgtgattctaacagagaagaaatcagagaaaattgtggagagagaatctaattttaattgttttgaaaaatttatgggtttttttaagaaaaatctatttat

SEQ ID NO: 236654 - DNA, 739 bp, Cannabis indica
tatacaggtaataaattataatagaaaccaaatgaaaatttcataataataataatataaatgatattatccaaaggtgaaaactaaaaaggtgctagcaaaagttactctacttgctctgttcttagttgactcataaacaagagattatttcacagaataataatcataatatatttctacagtttgacctattaaataatatacaaactcggtcacaataaataatctaatcacaagccctattattttgatcattttcatcatcaccatcgtcaacagaaattaacaagtccaataattatgtatgtttcaattatttactattgggacaaattacacaaaaaaaaaatagaagttgatttaaatttgcttttgtacagatcatatgttttagtaaccagttctcactcacacatgaaaggcacatggtcactacatgagttgactctctcttctccaacaagtaggcctatcccacttctcaactgtctcataccatttcattactcaaacattaaaaatgacattttcttactatggtaatgtttggttgaacttagcttccaactagcaacaaaaatgcttttcaagattcataagcccaaacaaaaacagcttttaaaagcccctatatatcttagtatgaaaaatgcaatgaaagctttctattccaatagtaatcccattaggaaaaaaatagttgattatgattatggtatctatcttatacatagaa

SEQ ID NO: 236655 - DNA, 1337 bp, Cannabis indica
tcaagatgaaactcaccaaaaaaaccagaagtttgtagaatattgaaagcttaaggcaccattttatactcaaagtctagtaataagaaggccaaaggttgggaaatctaacggttgggagtgaggcggaagatgaaaagacggttcataatgactctcgaaaccatacaacagccaaaatcaaaggacgtgtttttccaaaagggaattatgatgaaaatgccctctgtaattattaaaaagcactttttattaaaaataactttttaaggggcaattgttatacctgaaattcggctaccattttaatagaggacacgtgttaagacaaggggaatatggatcaatgaaatctcttttaatggaataactcattaattgggtaaataacatagtatacttgcaactcgctgactataaggtcttatgcgaggtaaaggtatacaaactgttgcctcaggtattaatgagaaaccaaacgtcattggatgcataaagcgagacatcaactttgttacacctaggaagaaaaaagtgatacatatcgattgagaagacacttagcgtataatatacaaactaagtataatagttgggcagactcatgacctaataagtgaggtgcttatatcgctataggaaggcgcactcctgtgactttcaccaatcaactttagacatctttcagtaagacttatagtcttgacgagtcagaagctaacattcaaatgactactgaggtactctttgtaaataagaactgcaattatcagaatgaagcatcaagcctttaagcaaagaaccagtaaggtgtacatcatcgacctcggaaaggtaggggagaaagctcatgcttgctatcaaggtcattggaaccaagttcctgtcgagacatcccagaatggtacaattacagacgtatttaaacacaccatcattttgacccagtaaaagcaggaaaattatagttgtgtgatattcaaataataaccgcatttacactacgtgatatgtaatcaaaccccacgattttagggaataaacgttgtaaagattacaatcaactttgtaattaatttcccactatgtgattataaatagtggcaagttagatcaaaaatggaacgaaaaaaatcatacaaaaaaggccctaaaagaatcatcagaaatctaataagattgactcgtgaactatgcagaattttaactgcaaaaccacgtaaaaactcccttgtgctcacacttttttctttactgcttttatttttctgtgtgagattgtcactattaggctcatatttggttaacaaaatctgctttaacagtttggtgctttc

SEQ ID NO: 236656 - DNA, 1578 bp, Cannabis indica
aaccacatttgcagcagtccaacttttttgctgccaaacaaagtcattcttggcatgccaaatggcccagctgaccatagtcgcctcctccaactcgccttctcttcctcggcattgcagcaccagcagctgattgctgaaatcatcatccatattgctgccaacatccacacttggcaaggtccagcaagcacgagcatgaccacacccaactaacgcatgaaaaatagtttcaactatagtgagacacaacgggcatgttaggttaactggaacgtatcttttttccaattggacacaagttggtaacgagcctgaagccaccttccataaaaagttgctgactttaaggggaacttttaaactccataaatccttccaaaaacccatagctccattaacaggccaagctcttttttcttcttgtaagaacatgtaggcactcttaaccgagtagtgccctaatcgttcaaaccgccagcttcaatagtcagatattgcattagaactcaattgtatagaaaaaaatcagctcttgatttagagaagctactattcatcacttaaaaaaggttaaaatagctcattttatagaggtggttttttgacacttttaaactgtattaattttagctgatcaaatgagaatgctcgttcaattagttgctaacaaggtactgctattgaatttttgtttgttaatttgtgccttctaaattggattgaaactaattctgttcttgattgttgttcactcattcttagttaattattagatgaattaatattaattttttaaagttttgtataaatttgatgtgttttctctaagtttgtaagtttgtgcttaaaagataattttgtgatagactgagatctttgagccaattttttataatattttcatcattttctcaaagagcttatgaaacctaaaatgatcgagctcgttcccaacttttcaaatgttaaatcatctcatttgaagtccaaatgcgttactgagcaaggccgaagtagtaaaagagcgacgaaaaaatagcctgtagcgctatagtgccaatcctgagaaaaaaaataaaacgaagaaaaaaaaatttagcacatgggtgatatcgagaagtcatgtatggcactatagtattgtgtctttggcgttatagcgccgtacgagtatttttgaatttaaatcctaattttaaatggattctttctatctttttggatctatataaagaatgatataattcgaattttgagacgggtggagagatacaaatgagcaatcttgagattaagaaaatacaataaagagcaagaatctgttttgatgctccagagagggtagcattagatttggaagaactctgccatttccacagcatcgcaaagagacctctcgtgttctcaatctaatctcctcgtgttcttctcatttgtattcaatttcatcttactattaactgcatagtatacaattggttagtagtatagatacatatacttcacatcacatgtgagagcatatttatattattattatatagacaatagatgtatgttgtcatttcttcacct

SEQ ID NO: 236657 - DNA, 3033 bp, Cannabis indica
aaataattaattgaaatttaaggaaatgtttacttcatacaattattttaagataaagaaattaaagggcacaatggaagttttgtagtataactttagttttatttccatattgagaaaaaaatagtctattttttatgattatacatattgtaattatttaggactacttgtaatttttttaaaattctgaatagtttacaagactgaaaataaaggtcaaacaattacttactacacgtaaaaaaaaaataatcgtgtagaaaaaaaaatatctaaatcttattttcgactttgtaaatataagatattacaaattttaaaaaaaaaattacaggtggtcgagatatcaaaacaaataaaaaatttactaaaacactcgtttaaagaggtgtgttataaaattattttatatctgtattgttattcgtgtaattaaatatcgattgttataaattttagtttaataactattataaaaaattattaatcattcacaatatggcaccttatagtaatagtgtctgacatcaataatatttaatagcaatactcatattataattaagtaaattaaataccaaatcttcttggctaaaaacattaaatcacaatttaatgtaagattataaatttgtgtcccaaaataagaggttaatattacttactttatttatttatttatttttcttttgaagaaacttactttattaataagcttgtatataaggaaagaaacactataattatcttcaatcttttactacaattaacactaatttagtaagttttttgcttactatttatacaaaaaccaacaattaaaagctattaaaccacaagtatattacactaaactaactccacctaattattaaactttttttttccttaaaaaaatcaaaacaaaacatttcaagatgttttaccttttatttttccacatattaagctaaaactttcaacttaagtcatatatcacacatcatttaccaaactattaatataaaaaaaatgtaaacaaatttaccaaactattaataaaataagctcctttatttatgtgaccataaatttatcttgattaacaaaacatcattataaaagaaaagttacaattataagagttaaaaattccatactatttggagataattccttaacaaaatagaactctttgtaatctaacttacaaagatcaaacaaccatataatcacaattatgttaatcattgttgattattttacaaaattaagtatgtaactattttcaataacaaaattaatcattgttagtatttttaaaacatttaagtcgatactatagattattatcgcgagcagagcttattaaattaaaattaaaatttcattttggtaaaaattacaaaataaaaactatacaaaaagaccacactatataccaattagatgaatatatacatatattatatatagtcatactttgaatgataatcatccaatttggataaaaagatgaacttttttttgtgaagcttagtttgctaatgatgtttaattaactcaatgccccacaacaacaacacatgtttaattaaattataatagccctactaccataattgcctcttgcatgctttaacaattttataaactttgactaaaaattaataaacatgcaaaaacaataaacctaccctaccatcctctaatgtatgattaatatttggtaataaaatactatggcaaaaaaaaataataataacacttatgaatagtccaaaaatgataggtgacctttcataaaattgaacattaactaaccttattagaagctaagctaagaattgagtattgaaaaatttataacacaaaaaccaaattcaagtggattgttgtgctttgtttgaggtacaagtcatatgggtgtgtaccctttatcaaacatcccattgttaaggacaatgaccttcaattttttattttttttttttgttcaaattcacatttaaattcacattcaattggttcctctaatataattctactgcaaaaaatagtacaatattaaggtctttatgttttagaaggggaccccacttttttgatgttgactactaaacccttcttcattaccctacacttgtcaaaccatgcatctctcttctttttaaaaaaattatgataaaaaatttattattataatcttttgccaaaatatatgacagttcaaaaaacaaattgagtgtttggtatgttttataatacttttgaataatcttgctaaaaataccttgaaatttttttaatatgcatgataaattatatatcagaaattttatttcggtattataaattatttaaaatttttaaaaaataatattatagctataacatgaataacactatgaaaaaataataaaaaaaaaatattactcatgtcaattttaatataaaagttcactaagaactaaaagagaaaataaattaaatgaaaattatgatgtgatagatttttatgtggtgttgttttgtttctaaaagtttctactagttaattatattttctctctttctctatactttggtgcattttttttttttaatttttcatttgtcgtttcttgataatgtgaaatcaaaatcatatcttgttctaagtgatgttgactactcaaagaacattttggatagaagattacatagcaaaaagtccaaacccatatgtttatgggcccttccatatgggcctatttcataactactttttggcccatcaatggtacaaaataaatgtatctcaccatgtgattctattaaattgtttaactaccccttttattttttaccctcaaatacttctcaaagagttgttcacacttcacactttctaatcctatttattttggcatccaaccaagttcataagtatgattttttctagataaaattaaaaaaaaaataccaaaacaatgaaaaaaaaataatataaaaatacagttcgtatagaatttttaacatttttttgtgattttttaaattttatttaca

SEQ ID NO: 236658 - DNA, 946 bp, Cannabis indica
gtgtaagtataccttatcgctgattatcatgtcagtctaaatccagtgaattgaaaaatcatgggaattaaacttttgaacatataatcatgattatatttcactgtgctgacgacactataatcatgaaaaatatatacatatttatacatattctagagttaattaaatttatacattaaacataatcatcaaataaatcatgtgaaccatgcaacataaaagcgatttctgatcttttattaattattagtaaatcttattctattgaaatgggttttatttagggcacaaaacccaacatggccttgtgcccaagttgatattttgtcaacctttccattttaattataggttttcaagaaaacttctaagaatcttcttcgtttttagaaaatattgagattcaactatttctggagaccaaatggaatttcttaaggggaaaagggggaccgagtgcctaggttgacacctggggctgggcccaagcgtcgattgacatattgtcaacctgggctatttccgatcaagttcaccaaaaattattccaggaatttttttagtcattagaaataatgaaaattcaagcacactctgggagaaaaccacaaactcgagcccctagaaatgggacctagcgcccaggttaacttggtgctgggcccagtgcccaggttgacaatcaacttgggacgctacctttaatttctcaatgtcaaattcaacgcgaccattgaatttggaatggtaaaaatagggtaggagacctcgtcctcaagttcaaaagccttagatgtatcaaaacgagatcttgggagctcaaaaatagggtacccagcgcccaggttgacaaatggcctagtgcgctggttctgcttattcgtctagttttttacaactaagatccatgaattcagagaagtcaaattcacaactttgcatt

SEQ ID NO: 236659 - DNA, 1153 bp, Cannabis indica
gtttatgactcaattattatgccatgaaaagttggagaattgcatatacatgaatatttttgagaaatttcgccataaactaattttttaacttatttttttttcaaatttcagtttaggttgattcagtggtttctccgtttctatgtgtgttgttatacggattttggtgacgatgtaggtttcttcgttagttactatatgtagggatttctgtatggaattctgtagaaataataaaaaaaaaaaaaaaactgtttttaagtgtaaaaataatagaaaaaaatcttttttttacaatttaaaaattgaatattaataatttgtaatttgaataattattatatatgttttttaaactcaagagcttaaaaatatatattttcttaaaaaaaaccttaatatagaactagtgaattacatagacacacttcaaaactttacatataatttgttcaaaaaaaaaaaacttaatatatactgtacatatatatatatatatttttgagaaaaaatatactctacatatatatatgaatagaaatttttatggagagaggtgtataatttcagttgcgtgtatcgaatctagaaataaattaacgtagtggcctaaactatttatttatagcaattttcttattatcattatccacgcaagagtagttatataaatatatatatataaaaaaaaaaagagttatttgcggcaaaaccctctaaagtagggaggtttttgcaactaaccctcaattctaaaattattgcggtaaaactccttaaactcaagttctgctagaagttagccatttttgtccatttttggctgttaactgccatggtggaatgtgtacacgtggcacaattttattggtccacgtaaataaatattaaaaaaaaattaaaaaatcaattattttaaaaaaaaaattaaaaaaattattttctttaaaaattaaaaatttaaattaaaatacaattttataaaataaaataaaaaaaaaaaataaactaactccttcttcttcttcttcttcgtcttcttcttcttctctgctaaaaacgacacacacacacactcccgcctcccctggacacacacacactccctctcacaaattcagtccgcccagccacacctcaccgtcctcat

SEQ ID NO: 236660 - DNA, 579 bp, Cannabis indica
ctcagcaacatatcgcctcaaaacaaaaagacaaccatagcatctactcaaaaggaaggatggagagctcccactgctggaagttattgcattaattgtgatgcaagtgtgaagcatacagaggctaagatcggattgggagtgattataaggtcacatactggtgcggttatagcaacaaaaactcagcaattgaatgggattttttcggttgaattagcagagactcttgcccttagaatggggattcagctggcaataaaaacagaagcaataccatatactatccaaacagattgccttcggatagtaaatcacatcacaaaagcagctcaagccaaaacagattggggaatgatgcttgaggaggttcgagattcagaggagttcattcactgctcagcagtaaatcacaccagaagacaggggaatctagtggctcactctttggccaaattggcttgtaattcaaatgttaataagttgtggttggggagttaccccgattgtgcatctgcctatataatggcggatttgcctaactctttgtagtttgtttgattgaatatacatctttca

SEQ ID NO: 236661 - DNA, 571 bp, Cannabis indica
ataatcaatagctaataaaatgtcactatcttatgatgaaggattcctatagtaaaattttcctgatattatatatcactcataatttagtaatgtaaatatattttttaagtcaaaaatatattaacctaattagatttttaaaaaacaaatgcaagtctactccactttcaaaaagaacaaaaaaaaaaaaatctattttctaatactattattaacggagtcatgtgagttttttttcttttttttttaaaaaaaaaaaaaagttaaacaatattactagtagttggacaaaggagtgacagaaattatgagataatttcattccacgtgtcaaattttttcttcatttttaggtttaattctattttaacaattcaactttttgattagatacatataagtgtatttcagtcaatgtacacacttaaaagtcatatacatcaagggttaagaaaatgtccctatattatgagaacaaaacaaggtacctgccatagaattattctataaatatattggccctgttaatttttgagcaggcttggtggtcattgcatataatatagaa

SEQ ID NO: 236662 - DNA, 968 bp, Cannabis indica
ttgttaatgatgctaattgtttagttaaacttgctttgattaaaggtaatcatatgttaaggcgcttggaatattaattactatcaacttctttcctttttgagtgtttttctttccaattttcctttaaaagttttattgaagaaagtttttcataaaagaaattcaaattcagcttaattacgagaaaaaaaaaatgaagtcccacaaggattttggaatacttttttcagtgcttatatttctttaagtgggaagttatgcattttaactgtttaagaaattaataatcttttaagatatatctatattattttactatatattattaataataaaaaggtagataatggtatttgattttcgtttcttatctttttaaccatgataatttcaaaacttattgatggggtaatatttcacataatttctttctactcattgtacacaagggttggaaacttaattgatatttattctttacaattattttttgtagacattctagtttttcaggagtatctttttctcatgttagtcgtaactttaatgttgagactcatagatttagctaagcatgcgcttaagatagacaataaattttcttgaatggaagaaatccctgcctactgtgtaacttttgttacatttgttatttacttttatcggttaactaaaaaaaaaaaaattagtttgtaatgtttgtatggttagtttggttttgtaaagttaatgtggttataagattaattagtattgtgttaacatatcttgtttttatatttgcttccaaattatatattttattaacacttcgtttgaaaaattatttatatttttgcccctttaaaataataagaaaagaaaattgtattaaaaaatgtgacagataattaagaagcattttgtcccttaaactaattgtttgttagaacatttctaataaagtgctaaaaagatagtatatt

SEQ ID NO: 236663 - DNA, 697 bp, Cannabis indica
ggagtatgtgattggtaccttgatcgtacgtcaatcttctgtgggacggtggctcgagttcagcgggcagcataacttcataactgcatgccattgcaaatggtgtctgaaaggttgctgttttttccgttgtacgatatgaccatagaacttcgaggagttcttcaggccattttcctttggcatcttcgagtttcttttttagtgtatccttcaaggttttgttgactgcttcaacttgaccgtttgcttgaggatgtgccagtgtggagaaacttttgatgataccatggttcgtacagaactcagtgaaagattggctgtcgaactgcttgccgttgtccgagactattttgtacggtagtccgaaccagcgtatgatgttcttcactataaattcttgaaccttctttaatgtgatagtcgcgagtggttcggcttcagtccacttagtaaagtagtcagctgctaccacttcgtactacaccccgcctttaccgttaggtaactgttcgattaggtcaattcccaagttggcaaagggccacgaactttgcatctgtgtcagctcgttgggcggagctcttggtatctttgaaaatctctggcatttgtcgcacttcttgacataggctctcgaatcttcaatcatcgttggccagaagtagccttgacttagaattttctttgagaagct

SEQ ID NO: 236664 - DNA, 966 bp, Cannabis indica
ggtacgggtctcgggttccaagtccgggtcggagtccgagtcccggatcccgagtctaggtccgggtccaagaccgggtccgggtccggggtcaggaccaggtccgggtcccaggtccgggtccgggtccaggtttgagtgcaggtccgggtctgggtctaggtccggggtccaggtcggggtccgaggtccaggtcgggatccaggtccgggtctggggtctaggtcggggtccaggtccgggtccagggtccgaggtcctggtccgggtccaggtccgagtttgggccggggtccgagtccgggccggggtccgggtccgggtctgcggtccgggccggggtcctgggtccaaggtctaggttcgggtacgggtctgggtcggagattggtgttgaccacaaattctttgtaaatattataatacaagctaatacggaccatttattatgtattaaataatacaacatatagtgtattaaaaattttagtcgtaataattaatacaatacattgcctaatctaaatatagtattatttattatttaatacaatacgacgcttatacggcgtaccaaacgagcccataatgatttatttatcaaattttagagtgttgaaatgaccatattaatatttttctatatatagataaaagtaatttaacaaaaatatatataacagtgatgcacccatttaaaagggatgtactggtacaccctctacttattttggcatttaaaaaaaaaactagtctaatttttttcatattcatgtacgttatatctatttaagatatcctacaaaattttgtagaaattcagaataatttacaatatagaaaacaatattcaaatagtctatttagtcacgcgtgcaacagatagagatgtatcgatgtatcccttctaagggagtgcattataaattttcctatataacaaaattaatatttattagtaatat

SEQ ID NO: 236665 - DNA, 946 bp, Cannabis indica
agttgtggtgtttggaatagggacacaaaaaatgcataatcaatagagatgttgtgttcaaggaacatgagatggctgtgaaaaacgctgtaatcaataataaacaaaatgatcatgatgtgacaggtttggaaattcaaagtaatagggaagaagatgacaaatacagattaggttgatacacaagatcacactcaatcagaaacagatatggaagcaaatgaagatgaaacatcaccagctgattcacaagattaccaacttgttagagacagagaaagaagacaaataaagccaccaaaaagatttggctttgctgattgcacaacctttgctcttgcattagcagaggaagttgataacacagtaccaagcacatttcaagaagttgtcaactcaaagaataagatgaaatggcttgctgcaattgatgaagaatgagttccctgcaaaagaataaaacatggaaaaactgtcacaaggccaccaggacagaagttaattagctgcaaatggattttaaaagaaaggaaggtttcccaggtgaggaagttagattcaaagccagattagtggctaaggggtttaatcaaagagaaggtgttgatttcagtgacaccttctctccagtggttagacaaacatccataaatcatgatgactaaggtggtaagtatgatctagaaatggaccaaatggatgtgaagataatattttggcatggcatacttgaagaataaatttacatggaagagcctgatggatacaaaagcatcaaacctaaataggtatgcctccaacaaaaatcactttatgggctcaagcaagccccaagacaatggaatctaaggtttcatgaattcatggtcagtattgggtatagcagaagtgattatgacccttgtgtgtactacaacaatgaacaaatttggttactattgtatgt

SEQ ID NO: 236666 - DNA, 1861 bp, Cannabis indica
gggggcaaaaaagtaaacttaaaaagaaaaaaaataaatttaatgggattagaacccttatcttctaacccatattctaagtagcttaactattacactaaagttaatattatgcttataaatatcatcttttattacaaatacatgttataactaattaaattacatatatatttttttcttgatttttttttcaggagcgactgccccgcctcggttatatgggggtccgcccctggttacagtgatgcagagaactagctagatgaataaaacctaagatgtgtccaattaggaccttttgctctcatgcaagccaaacattatgttgttgaaataataatattcaaagcacttgttgttggtaagtatatgcacaacaaacaaattgtggagacaaccttggagtacaattcttaacaaaatttagtgaatctagaatttatgtatccacatcatctttgtgtacgtaaattagcattgaataaagatttgtattttagcatgtgtttgtgtgggagctcaattttttttttttattttaacaaaaagaagattttattaaaaaaaacagagtagatacaagccaaaggcaagctacagcaacatcaaccacaaaagaacagactaccaattattaactaaacttaaagcatagttatctcttttttttggaaacaagccttgtggagccctaacactaggcttaatcacattttgatcttcatgctgagaataatagagcatcaaatatgtaaccattcattttcttctaaatcaagtaaagagcagcaacaatgattgcatttagatttgcaaaactcagccttggggaatagattcttttgctgaagctcgtagaggtccttcgaccagttaaaactccccacccaactctctaaaagcccaactctctttttagtaaagaagcaatccataacaagtgattgtgagactccgggactacctcacatataggacataagatcgacgggattgagaaaaatttaagtaaatgatctctagtaagaagttgatcattaaagcttttccaataaatgaatctatattttgggacaataagcttgtgccaaacagttgcatggtaagaaactttagtagccccaatcaaagcattatagaaactattaacattgaatttaccttcaataatagcctggttcaacatgttctcatttgtcaaatttttgatcttcaacatcttcttaaagtaccaactcatatcatgtttcatggggaagcaccacacatatattctgacccttaaggtaaatgaaattagtccatttaatcgaaaggttatcttgtttactagaaacaacccacaaatacttagcaatcatagcagtgttccatttcttaccctcttggaacccaatgcctccaaactgtttaggaggacaaactttttctcaagaagggagatgaagtttgctcctattttcattcaaaccccataagaaatctctacatctcttatcaatggcaacaataatcttctgaggtaaaatgaagaggctcatccacaaatttttaatgccaagaaaaacataatagattagttgggcactgttgggctttgtgccctaaataaaatctatttcagtataatcagatttactaattaataaagatcagaattattttatgttgcatggttcacatgatttatttcatgattatatttaatgtataaattctattaagtccagaacatatataaaaaaatatatatatttgttcataatataatcatgattgtatgtttaaaatttaacttccatgatttgtcagttcactggatttagactggcatgataatcagtgataaggtatactt

SEQ ID NO: 236667 - DNA, 552 bp, Cannabis indica
tgcatgatcgactcctcttccctattacataacacgcattgcagctgaacagggacatgttttgtttgaagctgaacacgagtagggagacagccatgtacagctttccaagcaaagtgcaaaaccttcggaggggctctagttttccaaaagacacgccagaaacttgattccatagcagcagacaattggccagagaattggccatctcatataacaaaatccctcaaaacccacctccaaattagagctaaacaatgctagggctagggaacacacagtgagaacccaacaggaagatatttctagttgccacaggcgcttcttgcaagaaatatccgaaggcagacgctagttcttgtgagaagcagcttggccagaaccacccagcgtgtcctttatttctgtggcaaagcctttgtttttacataacgtcacaatttcttttgaattaggtgacttggatttccaaattatgcctcccaaaccacgtacgtccaaaactcctcaagatcccagagtcacctacgaggctaagttaatagaatcgaa

SEQ ID NO: 236668 - DNA, 716 bp, Cannabis indica
agaatgtttgtgtcgatcctagtcccacaccaagtactaataaggatactcgtagcaaggttgggaattttattcgagaaacaaatttataggttttggcgactgatgtgttacctgaattaaacactatgatgtcgacaactgacattgtaacacaaatgccatttcatgataatttttgtgatggtccagaccttaaatggtatcttgaaagagataatgatgtaagagacgaccaagatacagaggtccctgctgatgtagctttgaacctgatgccactaacgtaccaaatacctaggcaaccaacatagagaaaaaggccccgttgagaagatcaccaaatacctggtactaatagtagttgtctagatggaaccagtaatgctagaggaaccacaaatgttagaggtcctagtgatgctagagggacgactgacggtaaaggtcctagtgatgctagagggaccaatgatactggatgtagcaatctattttcttctttgacaagttatggtaaattcaaggagaaaatttttataagagaagacattgaggataatagtcattatacatatatgggtggcatactaggtggggagtaacatctaggaaagttttttcagagataaagttcatttgaagatggttgttggcttgtatgcaatgaagaaatggtttaattacttcgttaggaagtttggtacagttgtttg

SEQ ID NO: 236669 - DNA, 867 bp, Cannabis indica
atcccactcaaacatcacaaccttaaaccctaaaaatagaaaccccaaagcaacaacactaaacaatctaaacaaaaagcaaaaagaaatcaagaaagcacataccaagagaccctgactgcaataggctttaaggaagaaaagctctcactaaaacaagaaacccaaccccagaggaaatgagaggcatgtcctaatgctccagccaacacccgttagaaactattaccttcaagcccgctcaaaactaaggccacaaatagagcatcgacgggcaccaaactctccaccgtcatctgaagggagcctcaaaagttcagatctgcaaggcactagggcatcgtcgaatatgggaccagacctgacagggcacgaagaaggcgaagagaatacagatgcaaggcgagaacggagagaacgaagccaaagagaaaactcaaaacggcagaggaaaagtctttaaatgaccgaatcaagaatgaagccaaagagaaaactcgaaacggcagaggacaagtctttaaatgaccgaatcaacgactcggataccctgagaagtgtatcacaggtcgagagatttcaaaacctcatttttatgtagagattttcaaacgactcttcatttataattttgtttttgaggcaggataagttcatgtcataatatggtgtagggtattgattttttttttaaaaaaaaaaaaagaaaaaaaaataaaaataattttaaaaacttgagccaaacaccattaaattctttaaaatgacaaatttttttttccattcttacttttaactgaaaatacaatttaaaagcctctatgttttcgtaatattattttctaaaacaatgctagatacctatat

SEQ ID NO: 236670 - DNA, 959 bp, Cannabis indica
accgcaaccgaaccattacgacgcaaacagtccggattgaccaaaccaccgaaacggttttcccggttacggtttacaatagttctgattgtagtagtccggatttaaactacggtttctcggtttatatgaacaaccctttgaagatgtcatttttacctaatttagtatcatttattgctttacttctatgaccaaaaatttaaataaggttattatatatcatttttattttcaaactttgatgcataactctatgtatagattttttttaactcaatctatttatagttttaattttaaaattttaactaaaaaaaatactagaaggattattaggtgtttaataatggattttgaaaatttttacatgttcatggtatttgacaaatttttttacttttaattgttgacaattcaataaacaccatgtcatattcttaatgaccaaaaatttattgggtatcatgaccacattattgtgtttttcaacgtacttaggtgatgtttgattcggtaaagtagaatagtaattgtaatagtaatagtatggaatgcaataaaaattaagaagtgtaataagaattaattgttatgtttgtgtttgttgttggaatgaatattaaaataggtagtaaattgataaacttattcctgctttagtaagaaaatacataaaataaaggtaaaatattcattttaaataattgtaacaggaattcacgagatatagcagtgtaaaagttatgtaatagtgattacaataaaatattattacaagagtttaaaggcaaaataaatatgagaattgtaattataattccattacaatgttgattataacaaatcaaacatgtcattaatgtttcatgcatgtcaatgcattgaattatcatcatagttcagtcaagtcaataaaaattttgcaaattatgaaaatattcaaggttagttttaat

SEQ ID NO: 236671 - DNA, 1538 bp, Cannabis indica
atcaaacctttcgctgatttgacaaagccaaaatcatgagtacaaagtaagaaaaaaggaactacttttgcattatttcctccattttagaaagtttgaaaaattcttaagctttttcgctaagaatcactatcgaatttgcgtgaggacttgcatcccatccctgtccttgacattttttctacgagtttcctccgacttcatcttctcaaagtgatccttgctacattcgaagatttacagacggagcaactagtcattgccccaagccctaacttcaaacagtaacgtgctttcttcctttacatgcttgttacattgtgtttatttgctgcttaaatttgtttgtatcgttgccatctcatctggtttttgtagtttttagggttaaactgtatttaggtccatactagggttcagacaatacataggttttttttttcctgaatctccaactcaccatcttcgggtttgataaaattctttccagggattgggactgctttctgcttacagcaatgtctcactctggtttaggaatttatcgtctagaagatttagaatttgagttccctacagaatcagccatcccgtatagacccaaccattcaaaatccacctctaaattagggttgaatgaggctagggttagggaacacgtagtgaaaactcacgaggaagagaatgctaaacactacaggtgtttcttgcaagaaatctctgaaggcaaacgccgattcttgcgagatgcagcctggccagaacctcccaacatgtcctttattcctttagtaaagcctttgtttttacccaacatcacgattgattttgaaccaggtgacttgaattttgaaataatgcctcccaagccatgtatatcaaagactccccaggaccccagtgtcacttttgatgctgagctgatagaattgaaggtgcgatctatctcaggctacacgggcgatatgatgaagacctgtgggatcaaacttgggcaatcatgccaagttagatcagcacgagaggctgagtttagttgtttccctcctgcgtgtttttcaagcagtaccccaaggaccagtggtgagactagtaccagtggttcgactggtatgggcgcttggatccttgagcatatcactgtaggagccacacttcctcttcgagactacttcaaggactacataaatcaccttggagtttccccattccagctgactcccatctcctataggattctagctagtttgaaagtcttgtaccaaattcttaactgggggtgtcccacaccagtagagattgagtatcttcactcagttaaggccgttcagttgaggaagaacgccgcagtggacttctactacctcggtactcattctagcgagcctaatatcattgtggacttgccaaataaagtatcctttaaggacaactttttctggacatctggtctttccacatcgacacaaccacctttcgcaaacttcgcaagggtttgttttcctcttgctcaattatatcaatccttgttttttcaa

SEQ ID NO: 236672 - DNA, 941 bp, Cannabis indica
agattatgtaaagttataatatattctagataaactcgactccaacaccaactacaggttcaagtgccgatttcgggtctgggtttgggtacgggttgcgattcccatgtccggttctggatctaggttcgggtttggatctgggtcccgggtttgggttcagatccgagtccggttcaggtctggtccctagttcgagtctcgggtctgggttcgggtatcggtcctgggtcctgggtcctgggttcgagtccaggtctcaggcccaagtctcgggcttgattctgggtccaggtcctaagtctagggcagggtcctggttcgggtcccagttccaggtccgagttcgggtcctagcttgggttcgggtttcgagtctcgggttcaagttcgggttcgggtgttgggtccgggtctaggccctagttctgagtctaagtttgggttcgggttcgagttcggtcccaagtccggtttggatcccgagcggtaggtccgatctgagtccggattcggggtccaagtcttgaattaagttttttttttaatatatagaaattggattggatcagatcggatctgaaaaaaattaggcgaggcagagcggatttgatccgagatccaataagtatccgaatattttagatcagaattaatctgtcggatagaaaattcaacccgctccaattaattagatctttcttgacgtacttaaattatatgaaggcacccaataggtttagctcgaggcgactttttaaatctaaagagaactattaggtgaccaagaatcggcatccattaattaaattaacttaatacatatgtatatggcgaacgtttactattttctgatgaataataatgaggagattatatactatatacatataataaacaaacgaaattagaaattacggagaggagagagagagagagag

SEQ ID NO: 236673 - DNA, 701 bp, Cannabis indica
gaagttagtgccctgactaacatcaagtagctaaccttggagaccttgaaaaatttcatcaagaggttcaaggaggaggcttccgaaatgaagaaagttgataaagaacaatagttagccctgttgcaagctggtatccagacggggactcccttctagaatgaactccaacaggaaggtgcgaccagcctttaagattttgaaaaaaaaaaaagctcagaaatacgttaatttggaagaggcccaaataatagcttttggagggtattaccctactggaggccctgggtatgcttctgcgatgcaagttcccagggggggtgcttcatgccacccctcaaacctatgggatgcccagtgtacaattacaaatgccattagggtattctcaaaatgtggcaccaactcactctaattatgggttgcacaataatggccctactccaggagcatgtttacggtaccccgctcagtctgcttcacttgcggcaagtgcagctacagctctccaaacctcccagagcaaaaggtcatctaaaggaagaactcgaagtgagaacaagaagacaaagaggacatccggatacaacccttagtataccctagtatactaaagttggtggatactacaagaacatgtgtacgtggctacaagataaaaacattcactactgaaggccacctctttttttcgagatagt

SEQ ID NO: 236674 - DNA, 1641 bp, Cannabis indica
aaaattattttcagaatttatttttaaatcaaaatattaaaaatatattataaaatttaaataatgttatattttttaaataataatattaggtgtataaatataaattcgacacattaacataaaaactgtctatactaataattaagtgtgaaaaatagatgatatgataaattttgtcattatttgagagggtttaattgggaaaaaagaaaaaaaaaactcttttatttataattgaattttaactaataataataataaattgaggagttccacgtgtgtaggcggatggtgaacacgcaatagactgtggtaaaggacaatgcaacggctaaattaaattaaaattaagtgcggagaagaagaaaagaaagaaggcgtgttataacgtttaagcttattgggaatagtaattaattatttaattaataaaaaatgacaaccccaatattgaccgtttcaaattaagctttgactttgttggttttatcttttaaaaatgtaaaataaaaatgtgatggttatgttatggcgtgtttgtttggattgaaaaagatagagtcgttgtttgtttaggggtttgggaggataaaatagtaactttatcagtgaatgaattcattagttccaagtacgtatctgtcagcctttaacaaattcaaaatcactgggctgtgtttctgttgattaattggtactcctttgaaaaaaaatatacaaaaaaattatgataagtcttattcaacctgaaaaagaaatattaaacaattaattgaaacaggtataaaacttgttgaaattaattcacttttactaatgataacaagtataaattatgggaaattgctaattcaaatgcatctctctagtaccctcaattttaaaatgtgcagtattgtcacaaggtcacttcttaatatattttatagaaaagggacaaaaatttaatatatttttgtattttttttaataattttaattaaaaaatattattattttattacattaatttatatttaataaatttaaattataaaatgttattaaaataattaaataagtagtaaaataattatatcataaataataaaaatgactttttatttatttatttttaactattttaataactattcttgaatatagctattacaagattccacctctataagtgcctatctctaattctaatcatagttaccctataattacacgaagacagacatgttaaaaaggtaccaaaattgaaattaggcattaaatagaatacataagtcacaaagattgaaagtgtgaagtaaatagtttccatagttgttgcttcattttcctctgtgtatatactctttgattagaaggtaaccaaaacatatatacatacatataatacatatattttggctgaaagaaggtaaccaaaacattgataatgtaaaaagctgcacacattcaaatatgatatttaaattaattgtttctcacgttattcaaactagtgcagtaaatatccataaagttttttgacatgtataaatatagcttaacacaaaaaaatatatgtttaggtataatatagtgtgacacacgaaaaaatacgagacttaaacacgacacgaaaattgtaattttctttcagtt

SEQ ID NO: 236675 - DNA, 1368 bp, Cannabis indica
tttttaacttttttttctaatttttcataaaataacccttttgaaaaaaaaaagccattattacacaaaaattaaaaacccataatatttataattttgtctaaaagttaattattgggcactagtgtttaagaatgtgtgatatttattgaaaatatataaaaaaacaattgtatagtgtttaaaaggaaattagtttagaggttcctgagctgagtgggtcctaggcgtaggcctagctcatcttagcacaaggttggccttggagttaacgcatggtacttgaatgtgtttttttagggaagtttacaataatatacatttttgcatttaatttacaataataatgttactactgttactacatcaaccaaatctgacgcatctgacgttttttaatttttttttatttattttcttacgtttttaaaagtagttttttggttactaatagtgttgataaaaaacaaattagttatttttatatcatataattttagatacattttggttacctttaaaatttatttgtatatatctttgtaattaattagttatttttaaattatattatggtagattaaaatttaaaacacatttaggtaaccttaaaaatatttttgtaaactaatgaattaccatttaatatatcaagctctacaatatttttatatactttttttgttattttaaaagttaattagttatcatataatataatataattcaattaacataatcgtaaaattaatgttaactaattaagatttaaaaaaattataaaacagtaactaatcactatattaaatcacagcaatttacatctcaacaagctatttttctgtcactactttgattatatacactttatgttctcataatccaatctatgtattcatcatttgccttttttaggagggaaagctctaatccttagcaaactgagttgtttgattttctgtacagccgtggaagttagccactgttggtggttccataaagcttcattcctggccttccatatgtgatacacaaggttggcaatgattgtgctcaccatgcttttccttgctgcattaaatctctttgaatgatggcaggcttgcagcaatttggcaatgtcctctgctgttgttttccattgcaggaagtgatctttagtttgctgcagacaacttaagctataatcgcatttaaaaaataaatgctcagtggtctcatcttctttgccacacaggacacaagttgtgtcaatactttgatatctacttactctctcctttgtgtttagccttttccaaaacactagccatagtataaatctatgcttgggaataatgagcctatcccaaactagattacaccatg

SEQ ID NO: 236676 - DNA, 1927 bp, Cannabis indica
aagaaaaaaaaaataaaacaaaagccaaacttaggtcataaaagatcttttgcatggaccgcaaacgcccatgtgtgcatagggtggtggcatcaaccgagtccacaggcaatagaaaatcgtggcttgcatggccacataagatttttatggatgaaaaccaaaagttaaactcaagaaaacaataaaacaaaataaaacaaagtcaaacatggtcgaaaaaaatgcattcgtgtttttcactgtggtgctttctagaggataaagtccatttaatttttttcctctcatcaccaccattgaacctctacaaactttcatgatttctttctcaattttaacaagaaatccttgatcatctaacataccaacatagatcaaatttcttttgagatcaggtactagtcgggcgtcttttaacacattttcaacaccatcataagtttcaaccttatggttccaattcccatcatgttacaagacttgttatctctaagatacacagtcccatagtttccagatgtaaattcttcgaaccaagatttatttggtgtcatatggaataaacacccagaatctaagatccattagattcaaattctcagaggttactagcaaagcactagctgagtcataaccgtcactactcactgttgcatctccttcagatatcttgaatcacacttcttatgcctctccacacacgcctttttgagatgccctattttcttacaaatccagcatctaagatttttctagtcatcagactgtgatttggatcttgattttacttttgaaccattgtgactttctcttttctcacttctaccccttgtatacaatccatcaccactttcggaattctttgactcactcctctggtttagctctttcaaattcaaggctgactgcacatcatcgagtgtgatcgactctcttccatacaacattatatctttgatgtgagcaaaagactttggtaaggaactgagcaacaaaaaggcttgatcttcatcttcattggtgacaccaatgtttttaagatcgagaatcaacttgttaaactcatcaattcgctctccaacagatttgtcttccatcatcttgaatgaatacaaggtctatttcacatataatctattcaccaataatttagtcatatacaaactttcaagtttcagccacacacctgtggctaaatcttcttttgcaacctttcacagaattttatctccaagattcaaaatgatcgcactatgagcctttgcaagagtctctttcttgtctttttgagacatcgaatcaggaaaagacttctctcctagaagagcctcatacaacccttggtgaaccaacaaagccttcatcttcatcctccataatccaaagtcattcataccagtaaacttttcaacatcgtatttcgcggcagccatgattacaaaccttgctctgatatcagtttattatgcgaaatggaaacaatcaataacttacgattcaatttacagtaccaacaaacatgcaacacaatcaagaaacaatatatcaagagatctcaagattcaaataatgaaataagtattaaaatagaaaagaataataccaagtttaacgagtttaagccatgtgcaatgctctacatctcagttgcaacaacaccagccatatctatattgatatcagtgtttacaaggttacaagaatcttcacaaacttctcagagattacaagaagaagtttctctctctagttcagaatatctctctcaaccttacactatcacgagtttcactcaagcaaatctagtctgattctccataggttataaagatttacaactataaatagatttttattgttgccaaaaatatatccccaaaatcatcctgacacatttacatcgtcttaaatgatccaactcatc

SEQ ID NO: 236677 - DNA, 1539 bp, Cannabis indica
cgcacctttcgacagacaccattatttacgttcaaaatatcgttcttaaaacaaactcggattcgaacgtgtttaagttgtttcgaaaatcaaaggaggttgcgtttaagtttatgggaccccaattatcaattttgacatgaagaaacagagtaaagagctttgaaacaaaaaatcacagttttggttccatatttggcggtgtaccgtgtttggagaagacgatctcaaacggccattttgagaaaaaaaaatatcagttgtatttggcttctttgtggttctgggatccttgggaacattttccaatcaaaaagacgcatcaaaacgaactatggaaagagtttggagctcgtcggcgccggcgccgaagaagacgactacgccgacgaccacgatctgagtagatctgaggtgtttttcccatcttttttttgtatatgtttcaattctacatattattttagggtttttggtgaattttgataaatttatgaatttatttggaattatttggtttatttcctaaataaattataaaaatacttaggttgctcacaaaaatttaaatttattttccatgattggttatggattacaaactattacaaaattaatagattagatttttggtcaattttgtatttttcatgaattatttgtgttatttctaaatttaattgtgaaaaataccttggttgtacaaaaaattgaaagttaatttttagggcttattacatactataaactgtgttacaatggttaaatttggtttttgatcatttttgtagttttcataaattgatttatttaatacttaaaataattatgaaaaatagttaagtgatgctaaaacaataaaatatattttttgtaatgttatttactatctaaatacgaaacaaaaagagttttctaatttattggttgctgtaggtatttattataattatttgtgactaattaactatttaattgggtttcaaatagaataaatagtaaaaattgtgttcagtgtttggagaaccttcaatataatgctaaaatataattatagtgtctggaattaattggagactatgttgtggtattttgttatttttggttagttattgagaattttatacatttttaacacataaatttatacataatcatgtgtagtattttgtacatatttctaagtagattggatatgatttttgatctgtataaatgattgagaaatatgatagcttctgatttcggtaatgaattacataattatatattttgttaataaatggtattttattaaaatttcacataagaagtgtttgtatgagttcatgttttactttgaaaatgttcgtttgagtacatcatatgtgtttgtgtgaatcaaaatgacaaattattatgtatggtgtggaatgcaaatgtaattggcttatgtgttacgtatttttacgtagatttttgtatgagtacagagattcatacttgaatgtattttgagagtattgctgtgttaatgaatgtttaggatcttgttctcaa

SEQ ID NO: 236678 - DNA, 828 bp, Cannabis indica
ttattttagattggatttttacaatatgatgattagataagttaaagcgacttatacattaattgtttttttttttgtttatttgatatggaatggaatttaactaaacaagaactaagagtcaatgacacaatgacacgtttattacacagtattcaaaattagaataaattaatagaaaaatgtaatagaataaatgaagaattatcgaaatcaatatttgtaatatgctgcttactaaaattatttgaaaatagaataataattatttactaaattagaatgtcttttttttttaatactaaattagaatgcttaaattgactaaattatgctttaagttaaactatattatatgattgttattttgtaagacatattttaaaagacaaaattatttttatatatttaatattaaaaaagaaaataaaaataaataaaagtcattactaacattccttaaaataattagtaggggaagtatttcatttattttattccttatttaatcaagttttggataagtatgtttttttttaatttttatttaatcaacttttatatttttttaaattttaatcaaataagtaaatgaatgtaagaaaatgactatttaatgttaattctcattatttaataataaatataccgttaaaagagacatcttccttttaaatagaggaccaacataacattgagagtctaaataatctcacaagaaaatacacaattcaattagtaaaccatttaacacaatgtaaaccaaacaatagttaaaaatcccagtaaatatttacaatcttcaaccactaaaccaaaacaaaaaaa

SEQ ID NO: 236679 - DNA, 2761 bp, Cannabis indica
cgcctaagatagttagggtgttacactacagttctatgaccgaaagtattgcaactgatgtaatggggtctgcctcagctggcgatttgtggcgtgcgttggagagcctctatggagcctactccaaatcaaaaatggatgacactcgcaccttgattcaaaccgtgagaaaaggatcaacacccatgacagagtatcttcgacaaaagaagaattgggctgacatactcgcccttgccggtgacccgtatcctgaagcacacttaattgctaacgctctttcgggtcttgatgttgaatatttgtctattgttgttcagattgaagctaggccctagaccacttggcaagagcttcaagatatgctcctcagcttcgatagcaaaatcgagaggcttgaaactctcaacactggaaacaaagcttcaggtgctgttcctcaagccaatgttgcagccaaatccaactctggtggtcgcggacgtggggctcaacatcaaagtcacagctacaatggtggtggcagattcaccaacaatcgtggtggcgctggaagatcgagaggaagaggacgaactaatggtctgaaacccacttgccaagtctgtgggaagtacggacactccgctgttgtcttctacaaccgctttgatgagagttttatgggaactgatcccaacaatcctcagcagaaaggaaaacctggacagaatagccacaatgccttcataactacccctgaaatccttgagagtgatgcgtggtttgccgatagcggagccagcaaccacatcacttctgaaggatctaatctcagccagaaacaagaatattctggtaaggaaatagttgttgtgggcaatggcaacaagcttcgaatctctcacattggtaatggtatttggaatgctcaaaatggtgattatttgaaattaaaggagatgttgcttgtgcctaaaatctcaaaaaatttaattagtgtatcaaaactgactgcggataatgatgtactaattgagttacactctaattattgtttggtgaaggacgaggtaacaaggagagtgctgctccacgaagtgcttaaagacggcctataccagcttggtcagcctcatttctttccaattccagcaggttcatcttcttcaaagtctgcaagtttccaatcctttgttgtgttggctgttaccagtcccaagtatgcgtctgtagctcaatctcaaagtgaaaataatactatgtctaaagccgatgtgtggcatagaagattgggtcatccctctcttcgtgtgttgagtcaagtcctagagtctagtcatgtagctcttcccgaaaatgaaattaaccacttttgtgatgcttgtcattcggcaaagcgcatgcacttccttttaatttgtctcaaaacaaagctaaaactgtacttgaacttatacatacggatttatggggtccagcccccattaattccaacaccaatcacatgtattatatacactttgtggacgattatagcaggtatacctggctatatccactcaagttaaaggccgatgcactaagtgcctttgtagagttcaaagctttagttgaaaataagtttgacaccaaaatcaagtgcattagaattgattggggtggtgaatatcaacccttcactaatttggtcaaaactcatggaattgagtttcaacactcatgtccacacacatccgcacaaaatggtcgtgctgagagaaagcatcgacatattgtcgagatgggacttactcttcttacacaagcaagcatgcccttgaaatattggacatatgcctttgctactgctgtatatctcattaatcgccttccaacacctgtccttttaaacatctcaccatttgaagtattgtttggcagaaaaccagattacaaactgttgaaagtctttggtgtagcatgcttcccttgcatccgtccctatcaatcgcacaagttccagtttcactccataaaatgcgtcaacttagggtataataatgcacacaaaggctataagtgtctcacgcccactggtaaaatttacatttatcgaaatgtagtgttcaatgaattagagtttctctttaaatccgggtttctcaataattaccaaacaccttcacctgtcattatccatagttccacttggtcatccttgcttgtgccatacactgatgtttctgcagattctcacaaatccacatcaacagatgagactgaccaacgcacaccagcacacagagcagtaccctcctcgccttcctcttcgggacaccaaaattctgatgctgaatttgatgaagagtagctttatgatcttgataactttgatccaaatggtggcacacttgaatccacacaagcttcagtaccttctatatctcctgcaccgggcactcatttatctccatcacaccagcagacgcaacccgctgctcaaccgaaaccccaagtcactcatcccatggtcacaagagcaaaggcatgtatatttaaaccacgcatttttctcagtcatgctttaaatattggctatactggtgaaccaagcagtgttgaagatgctcttaaacatcctggctggtctaatgctatggacaatgaagttcaagccttgaagagaaataatacctgaattcttgtaccaccctcaaagcactacaatctggttggcaataaatgggtgttctgagagaaactaaatgctgatggtacactcgaacggctcaaggcgaga

SEQ ID NO: 236680 - DNA, 854 bp, Cannabis indica
aaataaaaataaataaaagtcattactaacattcttttaaataattagtaggggaagtatttcatttattttatttcttatttaatcaagttttggataagtattttttttatttcttatttaatcaacttctctatttttttaaattttaataaaataagtaaataaatgtaagaaaatgactatttattgttaattcccattacttaataataaatataccattaaaagagacatcttccttttaaatagactagaaacataacattgaaagtctagacaatctcacaagaaaatacaaaactcaattagtaaaccatttttttttgaacaaaagtaggaactttattacttcaaatcatccaaaaccaaagatgaaattacaaaaggtaaagacaaactagtaaaaatacgatcagcctcagcaagagaggatcgcgccaaatgatgcgcaaccctattagcagatcgcttaacaaaactcaaagagatattaccaatctcggcgcataacgccttacattctaaaataatatggtcatacggagagaccatacttttattgctttgaatatcactaatcactctcaaacaatctgactccagaatgacccccacccaaccattggactttatccaactcaaagcttccttaaacccgagagcttccacctcatgaggctgcaacagaccagcctttaacactgttcttgcttgaagaaccatcccagccgcacatctagccactaaacccatgccaaaccgagcttcgggggtgaacaaagcgccataccatttctcacacaacacacttgactgcacaggaaagagtttttttttcgaactgttaaatt

SEQ ID NO: 236681 - DNA, 639 bp, Cannabis indica
ggttcaatctgtaacttttgcaaaacacagggtccaaaatagtatttacctgagatttaattacatggatgagtgaaaacatgaattaacaaaaaggaatccaatccttcttaacatattatgtatttgctctcttaagggttaatcttagtactgaatgattttgagcttaaatatataataagattatagatcaattattcacaggtgaagtaatagtacttgaggaataaaaagtaaattagaagggtacaatggtaaattcttccattctaatttatgaccaatttattggaggatggaaaacataagaaaatatttctgtaaaagtatatctataacataaagaggtcaaatttgacttcatagtggaggaatatcataattataaattaactaatataactaaagagtttaactatttagtttaaatttattggaacttaatgttataggttcatataatccttgagacatctcaatcagaatctgacaaagattaatacaagtagtaggcgaaagggacttatatgattagtaaaatatattactatgcagtatgcataattattggacaattataagtatttaattaattgaaatacatgaatataatgaattataaattaatttattttt

SEQ ID NO: 236682 - DNA, 438 bp, Cannabis indica
atatatatataaaaaaaacaaataaatttaaagtgtagaatagaatttatccacaaacagaagaaaatccaaacctgtatctaataggattatgaaatcatcttttttggcctttttattacattatattatcagttacaagactataaaaggaataaatggatatttttattaatacttttttatataagatttattaattatgatatatgaccatatttgactaagacagctggtgcttactgtattatcatgattaccatgagtgtaatagttgtgtttgagttataattactaatattatttattgttactttcaaaaataatatatatatataaaaatatttaaatattttcgatatcagcaaataataattagaaaaaatatcatatatattgagtaatagaaaaaaattctaagaaattcaaaactatttt

SEQ ID NO: 236683 - DNA, 1294 bp, Cannabis indica
aaaaattataaaaaattactaattaattataagacgtgttaacacctctgctattacttagttagcatgattaggtgttagttaaagatgttacagttagttaaatcttttctgttataactgtttctttaacagtttgatcttgtaataattgtgtatataaactgtggttcacatcaataatatgcaagtcttttagcttcattttctttctttcttcaattctgtgcactgcacctttattgctttacatggtatcagaagtctctgactcacgtccatgtcgtcttcaacctcgactcctagccatgccacagctccaatggcttttgccattgctccaatggctactgctgtcaacaccgctactcctcaaccttcttagaaccctttctctcattctcttacatcatgtcttactatcaaattagatcaacaaaatttcctttcttagaaatctcaagttgtgcctactatcattggcgatgatctcgatgagatcctttcactggtattccacctccagagcgattagtcacaggtgctctcaacccaaaatttcagcaatggagaaagaaagatcaactccttctttcatggattcgttcatccatgtttgagagtgttcttgcttctgtggctaactatcctacctcgtctgctatgtggcgtgctcttgaacaaaaatatgcatctcagatgaaagctcgacgactacagctaaaaggacaattctcaaatgttcaaaaaaggagtctcactatctctgaatacattgataaaagttctttccatttttgattctcttgctgttacaggatctcctctcaatgatcaagatcttatgtttcaacttctaaatggccttggccctgagtttgaccctattatctcaagaatcacattaagaagtgatgctctctcaattgaggaagttcaagctctgcttctctctcatgaaataagcagaatcgaacatcacagcaccatggctaatcttgctgtaaagatgcaagccaatcttgctcttgggtcaggccgtggaaatggttctcgaccatttttcaatcaaagaactggttcaactgagtatccaaatcaaccctttggccatggcaggggtcttccttgtttcaatccaacaaagatcatatgccaagtatgcatgaaaattggtcacacagctacagtgtgtcactatcgatttgacaaaaattaggttcctccaaagttaaactagacccagaatcgtgcctttctcactgaggttcagtttgattatgatccacaggcc

SEQ ID NO: 236684 - DNA, 1317 bp, Cannabis indica
cagtatgaaaagcataacataaaacgtaataatatcccggtcctactctatccccgatcataacctggcgtccatacacccgatcataaccctatccccgtgccccactcagtactgaatctagaacgtccgtacgacaataccattgaccataatgtcagcctatacacaatataccggtcctactctatccatattgatgtgacaacatcgatcagtatttcagccaatatacatttatcagtaatcaatacaactttacgtatattattactcctatcaatgtattataacagacataatcaacaagtatgctaaagatgtaataacataagcatgacattatactaatcttaccttgattttgaattcaagtgtgctgtccaacctgagtggaagaactgctcggcgaattacaggctcctaaatcacatcgattacaacatagataagtcacacgctaaatcactttccggggacttaaagttgaaactaaaagtttccctatcgataagtaacatggacataccctaaatatcataaaaatgggaaaaactaaggttcccaaaactgccccaaccggaattccagttctgtggggtttcttggggaccaaccgaaattctggatcctacaggtcccactgaaccgtaattctggttcagtgcagaaaaacttcaaaatttcataactccctcaaatcaaccccaaatcaaacaaaacctttcagacctgttctatacatcccaaagaacatattcaaagcaataaaacaccatatcatgctcagaatcgaaaacaaccatttgagagaaaagtttgagcacttaagctcaaactttgaacaaacctcacaaccagccatcagtgcatgcttaaatcaacatatctaacaagatttaaacttcagaaacatacttcaaacaacaacagtagctacagaactgaaatactcaaactcatgcaaaactcttaacttgaaacttaagaaaaccaaagggaaagttggtatgagcgtaccttggcttggactcacttagagctgctagaaatcataggatttgaagaacaaaattcagaaccctagcttgttctatagggttcgaacaagagagagttttgagagagagagcttcatttccaactttgcattttatataaaataatgaattaaatgaaaataggttgttttattaaataaatatcagctcaaaatcaaattaaaaatctaattattaagttaaaacaaagtccactaaaggacaaaacacaaatgggcaaaaagaccatttttccctttccacactaaaaatcata

SEQ ID NO: 236685 - DNA, 1592 bp, Cannabis indica
tactttctacacggtacccctagttagcgtagttgcaacaacataactcttttgagttgagcgttttctgtcttactttgtgatgtatcgtgtagagttcttacggggagactagcatgactcctgctccggctctcgtttgcatgtgttccatccctacatgggtagtttagctcatctttaaaatcatcgtggatggttttagcttctgcttgagtttccattccaggagcaataggcgtctcttcccgaaccatgagcattgtctaaaccgagacattgtagcatctccttacacttttcagtcacctctgacttaccccaacacatctgttgttgtagaggaactccatacataagtgtcgtattgaagttgttgctactaaattccactacgactgggcgtcctagtattgggttgtatgtcgtggggcagtccactactacaaaaagtacaatgcttgaaggcacaaatattattttctcctttatgagtgacacgtagctggattttctccattgacatcaaggcatccccattaaagccttgcaactagatagggcaaggtgacaagtccgccttagtgatcccactcgcctaaaaggaaaatttgaacaatatgttcacagagctttcgttatccaccaagatcttgaaaactctcttgtttgttatctgggcttcaatgaccaaatggtaataatggggaaaatgcacttgttgggcgtcctcttctgtgaaagtgatcggcagactcattgtctgaagatgctgggtcggtgattgtactaatgcacatgttttcccctctctttctaactccctcaggtaccttttctaggagtttttggtgcctctcgcaaggtgcagtccactagatatcgttgttacatttccattaactggtggtggagctagccttaggggatataggtttcctggtcctggagccacaatagttaccgcaaccaaagttggaggagcagggagtgttggaagcttcattcctaggactttagggtgaccaaccccctgcggaggatttatggtaccttgctgtccgggaacaaacatttgttcatgaacaaccccttgtcggagatatatgacggggattcagaaccatttccccagatggcctgctctaaccatttctatttcatctttcaggtgcttgtaatcatcagtggagtgtcccacttctccatgataatcacacctttggttcgggtctctcttgaaatttccccctgagatgtctgtgggtgtttccataatggaccatattgttggtcactttataaagaattctcgcgagtgtccaccaatctagagtattcagtgtatcttggctcatattctttcttggctttcttggaatattgctctgagatcgactcatgtcttgtttaggaacatcctctttcgattgtccaagagccacattacatccgatttgtgttagctttgtacccaaagaaatgggtttgagtaggtgcatgcaccaacatggggggtcccataaatcataagagtatatagagttctgggaacaagagtggatgaggaaaatttgagagtggaggtttct

SEQ ID NO: 236686 - DNA, 1145 bp, Cannabis indica
gaagcaaacaatacttggattgtagttcctctacctcctggacaacatgtcattagcaataaatgggtatatcgaatcaaatataacccagatggatctgtcgaaagatgcaaagctcgccttgtcgccaaaggctacactcaacaacctagagttgactattttgaaacttacgctcccgtagccaaattcaacaccctcaaactattatttgcccttgcaacaataaaaaattggcacctccaccatatggacatcaacaatgccttccttcatggtgatctccatgaagatgtctatatgacattaccacaaggttacactcctaaagaacccattcccaaaaatgcagtctgcaaattgcaaaagagcctatacggactcaaacaagcttcaaggcaatggtatgccaaactcagtcaaacactactccaacaaaacttcaaacaatccaaaaatgaccatagtctattcattcgaacaaaaactggcattttccttgccttactcatctatgtagatgacatagtggtagccaccaacagtcttgatgaactccatcactttaccacaactcttgactcacattttaaactcaaagaccttggaccattacatttttttcttggcctcgaaattgccagatgcaacaaaggcatttctgtatcccaacgacccttcacacttcaattattacaagaagctggctgtcttgctatcaaaccagtttctactcccatggagaccaacatcaaactcaataataaaactggaaaattgcttaccaatcccacacaatacagaagtctaattggcaaacttatctatctcactattatacggccagacatatctttttcagtcaacaaattaagccaatattttcaaaatccaagggaacctcatcttcatgcagctaccagaatttttcaatacttgaaaaacactcctggtcaaggactcttctttcatgcttccactccagaacctattcatctacaagcattcgctgatgctgattgggctgcctgcattgacaccagacgttcaatttcagggtattgtgtttttcttcctctgtctaaatcctaatattaagaaggtctaaatttaaagggtttttttctattttaagctaaaattac

SEQ ID NO: 236687 - DNA, 1021 bp, Cannabis indica
ctctaatgaagtgaaactttatgtctatatgtttagacctctcatgtatcataggatttttaatcaagtggagagcactttaattatcacaatataaagttatattgctagagttcaagccaagttctactgtcaaacctttcaaccaaagtgcttctttgaaagcttcagcaactgccatgtattctgcctctgttgttgaaaggacaactaccttttgcaggttatatttccagctgactgctccaccaaaaacagtgaacaccagtccagttagagatcttttagtgtctatgttggcagcatagtcactgtcaacatatcctgcaacttcttcagcaacttgtgtttgattgttgtagattattcccaggtttagtgtgcctttaatgaacatgagtatccattttacagctgtccaatgagcatttccaggattagccatgaatctgctcactacacttagagcataagccaggcccggtctggtgcagaccatggcatatatcaagctcccaacaatactggtataaggcacttgctccatgagcttcttttcagcaaaggtttggggattctgagattgagagagcttgaagtgagggaccagaggtgtagatacagcctttgagttgtccatcccaaacttttcaagtgttttcttcaagtattcagtttgtgatagatcattccgctctggctttgatcaatttctatccccaagattttctggccttgctaaggtctttcatgtcaaattcctcactgagcttgcccttaatcttcttgatctcactcttctcttttccaataatcagtatgtcatcaacatataagagcaaatacagaagttgattcatatacacacagggatcgtactgacttttagtgaaaccaatactagtgataaagatgtgaaacctgatatttcattgccttggtgcttgctttaaaccatatagggaccttttctgaatctccattttattacaatatagggaccttttgagcaaccatatag

SEQ ID NO: 236688 - DNA, 1304 bp, Cannabis indica
tttgaattggcaaaataataattatttatttttgtaataaataaataatttttaaattatttaaataagaaaaagacaaatattattgaaacaaaatttgtgaggacaaaagataaaattttaaggttgttgagatattttttccataaaaacaatcttatacacttattagaggtatattttaaacttgctactttattatttggatttaatatacaaatttaaagatttattaaaatatggtacaataataatcagatgacataaaaccgtaatttatttagtaccataaaatcaacagacatgctactgaatgtgtaattcaacatcaggggtctcatgtattttgatttaataaataacataataaccacccacaacacaccacatggctaagatgttgagcaccttatacctaaatagtaaatagcaacgcttatattatatttatatggagtggtggcggtggacctcttaattggggtggagaagtgtcattattggtggtggagcccgtccaaaaccgtcgtcctcacgcaccaaaagtgtggcataattcatcggctgaagtcattcgtgaaagctgggttgcacaggacccatgtttttgggacaaatctctttcttatttcttttaatttaaattacgctatttggtaataaaatacgaaacttgctaataaaagtcaccagtatgggctgaagtcattgaaaattttgtcatttaatcaaataaacaaaagctgtgatattcactgatttcgttctccaaacgagagaacaactgtcatttgatgtgtcaaccgatctgtatgcctaacatatcgcttccggcttcctcacttttaattaccactttgccgtcaacaacaacaaaataatttacatatatagcccattaccaaataaaatgaccatcgtctctcatctttaaaaaaaaattacaatttacgtcagttccatatgtaatagattcaattaaaaatacttaaattatttgaaacttgtattagcataaatacttgaataatttgaaaattttaattagcatagatttctcaaaaacttttatgaaaaataatttaacaatgagtttttagcagctaaaatttctcaactattatttaacttgcatttaatcctttaaacttatattttaacaggaaattttccaaactactaacccagtagcaaatttaaagtgtcattaagttaaatgtcaccatagattgcttatacatatagtatttttgtattatgtgatatatttatattggtacactgaatattataatttaaaaatt

SEQ ID NO: 236689 - DNA, 855 bp, Cannabis indica
aatattatatttgagaatttgacgtaattattttcttatgaaagagggtaaaattgataattacaataacataatatgctaccccctaagtgattgataattgagacttttgatcacttgttacatgatagaacatttaaagacaaaatatgaaatgaaaatttcttttattcaaataatccgtgccctaaggcgtacacagaaattaataaaatataaagaaaaataaaaaggaacctaacgatccccagtttactgatagtatccgcacaggtggtcagcattccatgcccttaggattcttgttccatctagtgtttttaatttgtaagttccatccttaattttgtctgtaacttcatacgggcctttctagtttggtcctaagacccccactttgggctccttagaggtagagaacactcttcttaaaataatgtcgctgtttttgaatcttctactcttgactttatagttgaaattcctaaaaaatttcttttgatacatctggaattggaactgtgattgttcttgaagcttctcaattaaccaaggaaaaatttcccaccattttaattcaaaggtgaagagtcgtacatttaatgttagcgatcttgttttgagaagagtattcccaacttcgtaagaactgagagtgggggtactaagcccaaattaggaaggcccctatgacatactcgagaaggtgggtcaaggtactttccaattgaaaaggatggatggatcgagggccccccacgcttggaacgcagatcacttacgtcgatactactagtaggcgaagaagactaggctttgatgacatctcaattgttttgtgtaaaaatctatgta

SEQ ID NO: 236690 - DNA, 509 bp, Cannabis indica
aactatatttttataagtttttttttttttttacatttttcggttgattatgaaaaaaatccctttacctctttctttgctagtaacaaaaatatttagtaactaaattgttactacacaattgtttttaaggaagaaagggacttctaaaggttcattcatggcttcttttattacttggttcactcttatggacccattaaatttagtaaattatgaaaaaaaatattgataagaagaacaatgataaaagatcttaaagtgttaaacactttatatcattattagtgtaattaaatattaagtcttttatatatgatatgataaaattagttactaaattacatcaataataataaatcatgtactaaaatatgttactcacaccaatgatttaataagaaagtatctctaaaataaagataaaatctaagaaagtagaaaaatagaaaacattatgatttctttgattttgatatgattattgtaaccttagacatcacaatctt

SEQ ID NO: 236691 - DNA, 717 bp, Cannabis indica
tgccattggtttacattgtttttattgaaacaaaaagaaattgaaggggcagttgtatctgctgtaagaacagtaggagcagaaatagctgctgtagtaatagtatgggcagtaagatcggctggagtgggttcttgatgaagcaagaacaatttgccacatttctcagctttcccaatcaccacattcattgtaggatcctgaataatacagcaattgttatgaaacaacactgagttagaagtattcagcatgtaatcagttatggaaaaaaggttaagctgaaattggggtacaaaaagaacattctgtagtgttatttttgagtttattttgacagtaccaatattgtggacagggagagattgtccatttggtaaggacacaaatttagggaatggtgtactagaaaaagatgaaaaacatttgaaattacaacacatgtggtgagttgcaccactatccataatccaagaagttgagtgagaatttgtacctgccatattggatgaagcaggtgctggtgcatgttgttctgcattagagttgttgctcaattgttggctcaacaaagaaattaattgttggcattgagatgttagatcagtaggacccgaggtgttgtcatggtcatttttctgattggtgacagcagcgagattagatttagccttgcttttgtcttgctttcttttgtccccataaccaggaggaaat

SEQ ID NO: 236692 - DNA, 1250 bp, Cannabis indica
gctccccagactttgatatctaccaaatcacgcccctcaaactttgacatatactaaatcacgccccctaaacttttatccatgttagacttttttttactaaaattagacaaaagtccttaaatccaaacatcttaatagttcaggaagcatttttaacaaccttaaaactttaggggcatgctttggtacatgtcaaagttcaggaggtaaaaatcataattagccttagaacttttattttttttctcatatttttgtaaatagccatttttccaaagcatgatattcagtttttgttttttttttttgataaaagattagaaaattttatttacaccccataaaattataaatacaccccaatattttaaaaaatatatatcaacttatattaatttttaaaaattacttctaaatattttttaaaaatattatttttcacattatttcctcttaatatcaataattattttaattttatattcacatttttttcaaaaaaaaattatgtattatttttttatattttttttatgataaagtttcatataattttttatttcaatttttttaatcttaatatttaaaatagattttatttttattttaagaatatgagaatgaagaaaaaaaaattaaaatattagtataaattaaatatttatatatattttttatattgatggtgcgttgttcaacgaggagggaaggcatgggtttggttggattgttcgggatcattagggtcgggtcgtggctgggattacaggactgtagattgaacaagttctttcaaagattgctaaagttgtagctctcaagaaagtactttcgtggttgaagcgcaatttcctgagtgttagtattatcgaatctcattgtctagtattggtacaagcggttagaaatttgaatatttagccatccacttttagtggtgtcgttgaagattgtaaacaacttgtatattcttttaggaatttttttttacgttttatcaaacgatctgttaatcgaactgctcaccttataactaaaactatgagatcgtacttttcttttagaagtttaatctctcttttgatgttgctgatattgtatagcgaagttagtctattaaataaaatttacagttcaaaaaattcatatttaatataaaataaaaattatcaaaataaagtatacttataacttgatgatgtgaaataactcccaaaaagattttcaatattctactatgcttttta

SEQ ID NO: 236693 - DNA, 1528 bp, Cannabis indica
tagaatctgacagtttgctctcaattcaagctattcacaatcattctcatttaagttctgttatgagtattattgtttaggattattgtcaatttttattactttctttgtctcgtgttaaaattcgttttgtaaaacagatagcaaaccgacaaacacatactgttgctaggctagttcgagtctattgtgatcgtagcatttatgagtcgaacactccgactactatgttgaatatcttatattcagaatgctaaatttaattaaattgctatttcttcaaaaaaaaaaatgtttacttcctaataatattttcataaaattaatgtaaaaaattataagttcaaaagaacttttaaagatatattttgatgagcttttatattagatatatatagtatttttttttcttaaaataatgcaaattaataatatattcacttcacttctaaatataatttaaacataaataaataaataatcacctacacaaccaaattcaaataaaactaaggaataactcttaatgtagtttattagttgaagttaactacttatataaacactttgatggtaaaccgaaaaattataaattttattgtaattagtggtctatctaccaatattttaaatttagaaatagtcatagtattaggcatttattaattattaattaaaatatattactattattatttttcaaaattaattaaaattatttttatataggtatttcattgtaaaaaaaaaatatttacttaggaactttgttttaattttcttatactagtagtgaactacaacaaaattgatcatttaaatacctttggtaccaatttatttacataagtaggtaattgtaacaaatgaaactagccaccgagttttgccataattatcttttaaattaatttgttctacaaaatattttattgagtgaagtttgctcacaaatcacatcttcttatttaaaaaacatattatttttttaaataacaaacaccacaacaacaatcaacccatataataaccagcccccaattctacgtgtgggattcacttaaaataattgcaaactttttttatttaaactaataaaaatacacttcaactcaaaaaaaaaaaaaactaaaaaaatacacatatactaccataacatgtaccattcattcatttcattctactggccaaaaaaacttccccatgtgatagggtagaaagaaagggaccctatatataatcttcgggacgagagtcattttatgttgtacatgcatgccatgattttatgtttatgttgtacatgcgcatgccatgctctgtttttgctggtagacttgtaatttctaataatgaaatcagcataaataaatgattattattatacatacatataatgctacaaaactctggagactatcaacactcttcctaaaaaaattctcaacgctcgaattatcactctaaaaacacacgaaacaaaaaaaaaaaacgaataagtataaagaaaaagaaaaaaaaaaaaaac

SEQ ID NO: 236694 - DNA, 2714 bp, Cannabis indica
tccccaaaatcgttcgtctgagttggtacagggctatatcaactggaagtccagttggacagtattgggaaaggtcaatttttgtattttggcctataatttttactcgagtgtctattttggacattctatatactgttttaaagcttgtgaaaagacaatatggtatgtaatttatatctaaaatgtgtaagttattttagggtattttaccatgtcgtttggtaaaaaaaaaactagattctaaacaagtataagaaagtttttttttagaatagacacttaattaccagttttatgttactgtgatatagggctttcgatcattgaacactttttccacttaagttgaccatcacacttgattacaaaattaaggtaaggttagtataacagatgcacatatgcacatgtttagtatacatgtattatgatttgtcaattagataacatatcaattatagcggtattggtgtacatagagttgaacctagatacctggcccatttatttatttttcaaaagatgggtgtataacatatcctatccaggatattgaacaatatgattgaatatattttgttacattagattagatcgatattaattattaataagatacttaagtattgttatatcttctctaatcatatcacaacattgactgtaggtcaattcgatcttaattcttagtgattaatattctgctaattgtattatttaagtcttgactaaattactcgttattggcttaccctacagactaggtcatacttaaatacttaccctacagactagctcatactagctcatcatcatatacacaacgttgattgtaagtcaagtcgatcttaattctgagtaaatattattctactaattgtagtatttaagtcttgatttactcgttatcgacttaccctacagattagcttatacttacatattaaatatttaatagtataattaagtggagtatttattatagacataaaatctatagcttttatttaagaggtgaaatgatggctttcttatagttaggttcaagtgttaaatgataaattatttatttctgtaattaagtttatgaatatatcatttataagaaatttaggccgagttagagataaaatacattatgatgggtaaaatggtaatttacacccgttttattagtaacaatggataatggttataacaatggataacatatttaaacttgtgtaaaacgttttatgaatttaagagcctaaatttgagtataatagagtcacgagaaattaataaactagtaagattatttgtttgaaaataaatttacggtaacttattagagcttgagttcatggatccataattctcatcttttaccaaaaataaacttagtagtcttaaaatttttgaagaagctttagaatgaaagaatttagagtacctggtgtatgtttttagttttattcttctctattttagaatatttgaaatgcgtgtttttattttaagaattttgagctataattcaactttattgcacctcttctctttctgagagtggaaagaaaaataatattttggcgtaacgtggttgttaattatgggaaggaaaacggaaacataaagcaaccaagggagtcaaaaattctttttgacactttgggttaaaagaatatatatgcatgcaccaaacctatgttttgcatggagagtgagagtgactcgtccgtacgcatatcatatgtggaccattctcaagaatcatgtggagttttaagttgttaattatatataaatgactctatacaaatatgaaataataataataataataaaaggggtagttagaatcagtttcaagaatcaaaagaaaaataataaaatgccatatcatgatcatctttgcatatgttccaaaatccccatatatcttgaccataaaactacatcgatccaacgatcatggttggcaagacggtgcgttataaactcattcatcatataaataaggctaaagtctatagctttttcttaaaaagatactataggaggatttacatatacaaagttatattttttaataaaatgtcataattgacggaaagctgtttatatggaagaatcataatcttctaatcattaaaaatacccatcgtttgcatacatttgtggaattgttttgctatttaaacttataaaataatggtttgaaaaagatagtaaattttttgaatcaatgagtcaaaaaggatgggaaacgaagacatatatgcacatataatcaattccccttaagaacccctttaatgaaagcaaatacaaaagatcgaagaggtatatattcttctctctttctcactcatggaattgtcgatctgatctggtacccttgttaggggtagtgtaccatgcatgaagattaaagaattggacccaataagattttcattgattaccacaacaatctaccaacactttgaattcttatttcttcaacatgttacatacatatgcttttacataagtttgaaaaattttagcagggagaagcatgaaccttatctaacaatatataataatctgggtgtacagtattttggtcctctatttcaactttgtctatatatgtgcttctatgtatgatcttattctctcttcgagcccgtgttgccaaattttcgattttgggctcagtgctaggctaggttgtaattggg

SEQ ID NO: 236695 - DNA, 1367 bp, Cannabis indica
tcatttcacttctataaagttatcgaagctataaattccatatctattattagcactcttactcaatcgcactaccatattcccaagatgtaagtattgagttaatcctacgggtaggcttgtaacgaacaaatcaaagaacacgtgtaatacagttaaaccagaacccaatcatctcaggattaagatcattgatctaagatcaactattagagatttacttagaaaaaatattacggtaaatttacgatatcttttctattgtaaatatcagtccagtccgatatatagccaatacatccaatcttagcttactttactaataccttaaaaaatatattccatttatccaagtgtaagtaaactaatcgatgattatcacgtcgattaaatcatgtgcactgatatatcatgagacttaatgtttgaagcttatgatcatgatttatttttactatgtagacaatacaataatcatgactatccataaattttggatttaatagaatttatatattaaaactataatcataaaataatcatgtgaaccaagtaatataaagtttcacttctatatcattctttaatagtcaataagattactttgagatgagttttatttaggacataaaatttcaacaagaagagtagtggtgggattggcggtggtggaggaggtgatcaaaggtgtttgaaggaggtggtgatgtgtttgggattgggaatagagaaggagagaaagagagaaggaaataaatagaaagaaaaagatcgaagagagttttgtgggttttcatcaaggtcaccttttgccggcgtaattcagcaggctgacaaaggtttaagaaataaaataaaatgaaacactagatgtgtgtgtttcatatactgttttacttttgccggcgagcttaattacgccggtaaaagtattttcccgcatactttttggcatattttccaccacgcgagaaacttttctctattttttttgagacttttgtcagcgcattataatgccgacaaaagcaaaaaaaactgccaaatgtttgcgcttggcttttagcactctttgctggcaaaattaagttgtttcatcgacataacaaccttttatcagcgaggtattttgccggcaaaggtcttcgatcgtggataatttgggcatacatttactagcaaaacaactttgttttgctggtaaacatcacattttgccgatgcaattcatgaattgcgtcgagaaaaggtgatattcttatggtgaaagatttgaacaaagtttcctaaaataaataataaaacaatagtatcatttaatctgcaaaatatacacaatttcttaataaatcagctaacaaaattta

SEQ ID NO: 236696 - DNA, 1916 bp, Cannabis indica
cctaagggttcctctgcaaggttagtccacaaagggcgagtcaaggcctaagatcaggccgaaggcgtagtcgatggacaacaggtgaatattatgcatcctctcaactaatatggtattagagtgataattcgctttcgtttttttcttcttcttcgatcttctcaagatcaagttcttattcttcacgcaacaatggccaagcatcatactcggagctctacaaatgatgagaatgttaatacttcttctgatcccattccaaatcctaaaattacctctgctccaaaccaacaagttgtcatggaaacttgagatcgacctgctcatgaggacttatctagtccttacttcttaagcacaggagatcatttaggtcttttgcttgtttctactcctctcacaggatcaaggtttcagtcctggcattgagctattctatggttttttctgccaaaaacaagactacatttcttgatgacagtcttccaaaactaattcccttcgatcctgcactctgttttggaccagatgcaataacatggtgatgtcatggcttttgcactccgtttctccagagattgcacaaagtatcatattcttcaatcttgcatctgaaatgtggaatgatctgatcgattggttcaatcaagagaatggaccccaaattttccagttgaaggcaaagcttcatagtattcaacaaggagatcaatccatcaccttttacttcaccaaactcaaatctctttgggacaaatttaaggagttccaacctacagcaaattgcacttgtggtgctcttcaacgtctacaagaattctacaacatgtatcaagtgcttcaattcctcactggattaaacgaatcttataattcattgagagctcacattcttctcattgatcctttgatttccatttcaaatttttttccatggttgttcaagaagaacaacaaagaacacttggatctagacttcctcccatggctgttgttgtttagcctctgaattaacctagaagcaagaaacctaggccttcttactctcactgtcacaaacctggtcatcttgttgacaagtgctattttcttcgtggatttcccctggttatggtgataagaacaaatcagagaaattaaaatccactcctcaagccaattagacaggcacaattcaaggttcaaattgtgcacataactcctacattgaacctgtttagactttgtccactcctttaccagatctcactactcactatcaccttctttaccatctaattgtactgtcaatactgtatctcaaacaaatgacctatggcacaattgccttggtcatccatttgtaaaactttcgacaaaattgaataaatagattggtttttctttttaaaaaacaatctatgtttcattgttctacttgtcatcaagcctaacaaaaaaagaaaaaacaaccatttatatctcataacaatttttctgcaaacttatttgatttgttgcatatggatgtttggggaccatttcacttccctagccttgaaggctataagtatttcctcactatagttgaggacaaatcaagatttacctagacttatatgatgaaaatcaaaggagaagttcaaactctcattcctgcattttattcttctatactaactcagtttttagctaaaattaaagcaataagaactggcaatgccaatgagtttaatgtaacttccttttacaccactgcaggaactattcactatcattcttgtattgatactcaacaataaaattcaattgtggaaagaaaataccaacacattcttaatgtggctagagcactcatttttcaatctcaaattaccttggtctattggccatatgcaatggaaacaaccacttatttgataaattgaacacca

SEQ ID NO: 236697 - DNA, 816 bp, Cannabis indica
attttattacttagatctgttatttaggtttttgttctattaatttttgtatttttttttctttaaagattaggaattttagatgtttatgtccatgtttataaatttttatttaagcgtttttttagtctgtatgtattttgttatatttttattatatagcttcttaatataaagtgctaaatttaaacatattaagttggatatatatagtaattaaatgatatcattaattattttattatctataattaaattattattataaatttataatatataatttaaactaaaaaaaatgaaatattattaattttctaaaaataaaattataaaattaaataaaaaatacaaaaaaagaaaatgccttacgtaattaaaaaaaattattaattttttaaaaaaaattaaaaaattattttgagaaaattatattatttttttagaaaaatatttaatatagtggcactttttgtgtgtcactatacctctaaaaataataatgaagaataaaaaaaaagaaaaaaaagatatagtgacactttttgtgtgtagctattactttttcagtctgacaaaatttgactttaaatgcctatagtgacgcgcagtgagtgactgtaaaagggttaagtgacacgcgtgaagtgtcactaaaaattgtctttccagtcaccctcattagtgacgcgcggtgaagtgtcactaaatgattttagagtcactcaatgtgtatcactaaaacccatttttctagtagtgcactacgactacaagataaaattaccagatgtcccgagaccgaacactccaggt

SEQ ID NO: 236698 - DNA, 1005 bp, Cannabis indica
tagcgaaatgactattttatatttataattatcttcaattcctgcatctacattttccatttgtaagttagagttcaattgcataatattctgacaatatatatatattcgagtgcaggattgggtgaaagttgaagttgatgagttctatgaaatgtactgctatattggttgtatacggattcgagatcgttatattagtattcgacttttgtagtagaaatgttatttaatattttatattttgaataagccccaatttactggtgtattcctgggattgcttcggcccttgttgtactatcatgcttttaagcatgtttttattttcagtcatgcattttgtgcttgaattttatataatagatttggcttttatttgaaatataattaagggaaattaatttacaaaacaaatagtggaaacttgaacttatagttttaacatatgtaggaaaaaattatattaattcaaccaaaatatgattttttttttataattacaatgttataatatgagataagatgaatgagattccatcttcaaattaattggcaataggaggaattgtccattcatcttatatatcgcaatttatttccacatattagcaatgtgaccaactctaatgcattctcctaatgtttgggcgtggaaagtgtgggtataacgaacgaactttaagagaccacaaggccaaacgtgacatttgaaagaatcccacaaggctaaatatcgagaaatttgtgggtgtacacgtcgggaaatttatgcattttgaaacaagtcaaagacccaacactggaaactactagcacacattggccgaaaggtcccaaatggaagttaaaggggagacagcagaagtatcattctggaccgccagcactttggctcacaacggatcacaacgcctttttaaaccggtggcactttgggctcacaacagatcacactggctctgatccatgttgaaatttctgataagatgaatgaggttccat

SEQ ID NO: 236699 - DNA, 861 bp, Cannabis indica
gcatgcagcctctccgcgcgcacccatgtggtcttcagataacccagcacgtccagatcgaggtttctcggtctatatgcttgtctgagcgcgtgcagccgagcaaaatagggccatccgcgcgtgtagggtgggtgatgccaccctgattttttttttattttcaaaaattcataactaaagttcttaattccaaaccaatacaaccatgaagctcatcaaagtagaacctacacaaaactaaaattaaacctaggacaagctctagtcctagactaacttcacagctccaaattcattagaatccccattcaaacctaacctacaactctagaaaatcaaaggaaaagaaggggaaaattaccttaaagcttagaagacatacctccttgatcaactcagccaaaactcaaagaaaaatcccttgcagcagctgattttctaggtttcgaaggaggaggagaaggagagtaatggtgttatgcaattgccttagttttctaggtttcttccaaaaaaaactaatacttaaacatataattaaattacatttaccctttttcaacccaaataaatcacaaaaagacaaaaatcccatccttagggaaaagactaaattgcccctcataaatccttaaaacctaaaatccatcctaggggtattttggtcattctaattaatttgtcaaaccgacaacttaaaattctaaactactccggtataaatcaaattcaatccatcttttattatcataacatctctgaccactttgccgagtctccacggccgccgaactcgaaaataatttctttcaaaaatgtatccacgataccctcatagtccgataaaatctccgtaat

SEQ ID NO: 236700 - DNA, 628 bp, Cannabis indica
atatttatattattggacataatgctcacctttaagtatattactttacaatttgttagctatactctactaaaagttattatattaaactatatgggatctaatacttagttgaaccaataacaatattaacacataagaaggtgctaagtaccactagtaccctttagcatttctcatttatattagtttgaataagatctcatgacgatttcattatataagtattttttttttttttgaatgaattcaaaccttaattctaaatagaatttagtaattcgttaaaaaatatttaatgtataactataaaaaaaataataaattagtttgtgctctaattttaaacaaacaatatggtgatgacacataaaaaagttagaaaatgaaccattataaaacaataaatacattcaataaactcgcattggaaaatacaattgagaaaaatattcgaacttatccttttaaaaataagagtgagccgtgaataataactaccgttttgtaaaactagcgaaatgaacaatcaatgtagaatgtctatctcgggatacacggagtacacaacaaaacaatcatatgttggaaagggcagataatgcattctttaagagcttgtagctca

SEQ ID NO: 236701 - DNA, 881 bp, Cannabis indica
gtaaaataatttccaacagtccgggccatatcagtccaagcgggttaagggtctactagtgttgaatttttgaaactctattttgccgcttaggccgggtaactgaaagagacttgtaataaagtttgtaaatatttttgggatcccaactgttgtaaagtttaaattattacaagttttattttcattccgtttattgtaagagtataatttctgcgctattttggttagtaatcccgtttaggggattagggtttcgtaaataacttgggtagcgtgcctaattatttagggcgttacaatttggtatcagagcgccaaggtttttaaacttcctgtagaccggccgaacatgtacattcgtcgtcagagacaagctggactcatggtgcagtaagtattgaaggtaaatactttactgtttgtgttatcatctgtttaccgctttcgattttaggaagtatgcaagcatctagagtatgtatgtgttatgtgatgccatgctttaaatgttatttgataaagtgaatattatatgcggtaaataggtgagttagggtttaaggcattaagtgcgtaagtgtggtattggtgtttaactcgatggggttgttgattacaggggtactagtaatggaccctccgcaatcatctagaccacagggcgagcaagtagagcccagggctgcccgaaccgatccaccggcaatgcatccaccttcgcagaatctgggggataatgcaggggtttgtaatgctaatcctcctgctgactggcagtagatgtttcaagaaatgtgaagtgtcatactttgtcaagaagaagagttacaacgtttaaggcaaccggcttcccctgttgatcaagggttaccaccagc

SEQ ID NO: 236702 - DNA, 811 bp, Cannabis indica
tgagccatacataatggtatcatctgcaggtattcatctttattagtaggccagaaattcagttggttgagtattgagcttctgcatttatacaatacaagatatgtgagctatttaatccatgtctcacaattgtacaggtaaaaatacaaagcacacagtaagtaagctgattaaacaacacaaagaaaaatcacagttcttcgtcttccccttacgaatcaggttcattgtcccaccctacatctcactacttgagatctttaacacccagccatcctaacctacccttcattcacaataatataatgaactagatagattcatctcttattttccttcatcatcgtaacccatcctatgagtacctgactagtgataaccgagtatgctgtagacactaggattaaaaaaaatgctaaattccttcttctctaatttcattcattcccccttctatattgcaattgcaagtggcgtgataccatatttgttatgctaacatttcgtaatatggttttcaaacaacaaaattgatatgtttggaaaaaataaaatataatcaccctgaagagaagaaattcagcattacaataacactagagggatatacttttccctttagcttgagaaaaagtaatcagaagaatttcacaaatcgcaaaaacaagaagaagaaagagccaaaaacaaaataataataataataataacttttcaccttcagctatttccaccaaagtatatacgactcctgtagccatcgaacaccatccagaatagttaccctggaaggctgtaatgaaaaagc

SEQ ID NO: 236703 - DNA, 1588 bp, Cannabis indica
ggctattgatttgacacttaacgataaggtcctaccgaaattttagaatataacttaggttgtgacactcagtagttttgtgatccgtaattgaaagtattaggtaagttgtgcaatctcacatcatctggtgaagatattctgagactgtgtatatatataaaactacacaattgaagatctctcaaataaactgataagtattacctatattatattgttttcaagaatctatcacttaaaaactcttaaattaagtatgtttaacctgtacttttaaaataagtgactgtttgaatacaaaatacgttgtaaattacaattactctataaacatataatataaaatacaagtgaatataatattacacaataacatacaatctaatatcatacataaaatatagaattttgtgtgaaagtatgtgaaaatttccaaagttttaaatgttgtaattttactatattgagtcaaaaagaaaaagaagttgggtcgttgttagggaataaatttttaggaggtttgtgaattttagctttggtgaaggatgtaaaggtggtcatggaatggtaagtcgtttagcatcttcaaaatgtcgttctctttaatggtatattgtcgttcagcattttatggaccatctagttttgtggttctcatttggtttccaaattaggatttgtcgttttgcctttttaaggttcttcaaatatttcattgtttggataaggacgccaaatataatatgcttatatgcttttgtattggagaacatcatttatcctttttttttttttttgcaatctaatttatatctttgctttcattattgcatccctttcattatttggtatttcttttttgatggtgtcattatttgagttattttgtttttcgttctttcattccttttattctaatgtctagaactctgtctagaacattattttaaacctaaaatagatactctttataaagttgtttctaatttcttctgaggaatattccagtaacccctcgattgttagtggagaaaatatccattcaatcatatagctgcaagataagagttaatataaataaacaaataattattttgattgttattataagaacgagaaagagaaaacacaacacaataagaggtgtaactattaaattgatgtggttgtaaaaaaaattattgtcatatttaataaaatcgacaaaattaattactatagcatttttgaaatctgaatttgattttgttttggtgtgaaaaatttcaattaattttttttttatattttatagatgtataaaataaataaatatttttttatataagtatataatatattaatatttatatctattaatatatattttttagaaatttttacaccaaaaatataaattacacactttattacatataaacctacacacggttaaagcaacttttttaccttttttctatattttattacacatatcacatacacatcacatctatgcacaagtcacgtcaactcccctatcaaccaccatgcatccctcaatcacttccctctctcttttttcttttgttttcctttgattttt

SEQ ID NO: 236704 - DNA, 976 bp, Cannabis indica
acatacttagaccctaactccagtgccacagacacaaccaaacagcaggccgcagcttctccacaaagcacatccgagaaatctaatcgagacgtgtgaattcgaatcaccctacccaggtgattccttgctacaacatgtgcacatactctccaagcccactctaacatcacaattcatttttatccaatcctgaggaggtggaatccagatctccctcaaggtcggcataggacttagcaaggtagaagtatgtaactctgcaaaagaagtacaaatatggtcaatacattttaacacatcaagaggagtattattgtgtaccaattcgttgcgcattctccagatagtgccaacaacaattgaagcataaagaaagacatcttcaactcggaaacccctgtttttaagatcccaaatgaatttaacccagtcccaaacacgactaccagtatcacaaacaaggtaaatacctcacggcgaagatcgccacaagtgcatcgccacatcacaggtatcctcaatctgaaatcttcttccaatcacggatctaaccaggagagcattagaaaggatgcaccaccatagaaccttatgatgctccaaaatattactattctaaagcttatttcaaagtgattgagcaacttcacattgaggcgctcttaatttctatcggtatatatatattgcttagtttctgattttttttaagaaaaggaataactttatagaaaaggcacaaagcaattagagtaatagataatacagaataattagattaggagacagagctaaaccaggtcaccaaacttgagagacattcaaagaaagcaatacaaactagagaatgagccataacattatgagcccgattacaataagagaagaaaatatatgtgaaagaaagagaaaataagagtttcaaatttgacaagcgcaacctcctccactttagattcgtagtaagaactct

SEQ ID NO: 236705 - DNA, 711 bp, Cannabis indica
tgtctcttttaaaatttaggtaagtatataatcgttaagtgttatattgtaatgaacatgaagtctaacttcaattctatttataaacatattttttttttaaaaaaaaataaaagtattatattaacatcacgtacgtggtatttatattaatatttaaaaattttaatttttaaatatgttaaagacttttttttttgataaaaaaatacatttggaccaattaaaggtatcacgtgacactaacatatcatagttattgtcgatttcaaaattttaatttcttatcatcaattctattatgtttactgaaacttttaggagtattaaacaaacataataattgaaaggaaaaatgaatcaaatcaagagaatatgacacacacaaaatgagcatataattaaagttattcaatgtattctttcctaatgagcaaatctttcatattatgttggacctgtgctttgtaaaaattattaattcgatcttttattttgttaaatgataaaatgaattctatatttttaaaaatagtaaaataaaatgggagtgagtcgagtggctatttccaaagatggctctacaatgtgtacttctgatgttaaacttcctgaagatggcattggtagtcttgtttgtcttaagttttgggaatctgattcattaaataaaaactttagcttgtctacaatcgtttatgaacctcacag

SEQ ID NO: 236706 - DNA, 1491 bp, Cannabis indica
tttaatattgcaatttttattctaatcttcaaaactcccctttttctaactcttgttactaatttgtgaataattaaataaacatagtcctcgagggatcgacccttacttacgattatactaaaataattggaagtattggaattaaaaaaaaagtaaatttgttgtggcttacgacacacatcagatggataactggctatctaagtacacaatcactcctcctcttagttgtttcaattcaaacaaaattccacgaagccataaagtttccttgaacgcttccgtagtggccataaattctgcttatgtggtggaaagagcaaccacgaactgtaactaggcttcatgtagaattattcaagcttgttccaaatccctttagccgtcttttatgcaacaagttttcttctcacattgttggacagatacatgatgatcgtgtaataagtcatctcctccatttcactatctcatctagtttcttcttagccaataatttctcatctccaagaattttagagactttctagtgcactaggattcctttcaagctttctctccatagcgtgaagtctcctgttccatcgaatttctctattcaaatcttgccattaacaacgttaattgttttttctagaaatgcaaagaaaagaatcttgattctgtgttcttgatcgatgaccaagttctgatttgtgagaaaattacaactaatgtacggaatcaaatcaactaaaatttagtcaacaaaatattagcaatgacacgattaatcattcacaaactataatcatagataaaaataaagatgaacaaagtatctaaaatcagagaagatagagcaataaaataataaaatcaacacctagatatatactggttcaagtcctatagattgaattgatatatggctctactctagttttgaaacaccatcaaaattttctttattcattgagcaagaacatagtacattacagtcgagatcaattttttattggatcctctcaaagtgtttatctctcacactcttacctaacaatcttcttcatctacaaaagattctccatacaaaactcaaacccaatctctctcttttctctctacctctcaatctctcccttcgaattcacctctcgaaactcgtctgtttatcatcacttactataaatgataagtgttagtgctatttatagataaagaataaggatatgaaatagggatggcaattatacccgcaggtacccgccctaaatgggacgggtacgggggttgaatttcgggggcgggggcgggtatgggtttaaggattcatacccgagtcagaaacggggcaggggcgggggaatagatacccgtcccgatatgatatatgtaatatttaagttttaaaatcataattactacaagtaaaataccttcatgctttaggctttttatctattatacttttttttttactatacacactattccacttaagtttat

SEQ ID NO: 236707 - DNA, 811 bp, Cannabis indica
gtggtcagatgaagagaagtcgccatttgtgagaattgagaggaaaaaagttgagccaaagagaagaacagagcctatccaaacgaatttcgacccattactggtgcctttgccacgttcccaggtgtagggatgaccatggagtttcatatcagtgaggttgcaattacagaggacctcctggaagccttcgatcaaggaagaaaggtacagacgccctccttttttctcactttggtttccaatgttattaatgtcacctatgatacaccatggtagcagagattcggtggagaggatggtgatgagctgccaggtcttgaatcgcagactacggtttggctccccgtatagaccagttaaacgccaaacaggggagttgggcatagcaatttcaatgtcgatatggttgtgagagaaaccgagaagtcgaaccccatcgttgaatctccacaaaagagcaagcccacctttatgaccttgaacctccacacagtaggctcctcaaagcccaaacgaattcttagtctttcaataacgtcacttttgcataaagtttcacttaaaaaaatgaatttgggtttcttttgaacaacatagttctcaaggaattgacgggcccgtgggttcccaagcccacggcaattccagcttaacgtactcataacgattggtgggcctggacaccagaacccaccatattcaagttttttgaaacatcttcaacacggcccgaaccaacagcaggcccatttttgttttcagcagcaaaacgtttcctttttaactcagcttgagtcaattccacatc

SEQ ID NO: 236708 - DNA, 735 bp, Cannabis indica
tttgcttttccaagagtgtctttttactggccatactgtagttgtctgtcattaccgatttgacaaaagctaggttactcccaagtatgtagttcctcttctcgtaaatttttgcctgaaattgttatcccttatgacatgcatgccttggctaccataattctccttaaatttggttatgatgaatcttggtatgtggacgttgttgccacaaatcatgttgcttttggcactaacaacttggacacaaccactccttactttggcaccaagactctccctgttggaaatggtaagaaattgtttatttctaacattggtcgcactactatttcctcctctatagcttatcaaccattacatttatattccattcttcaagtgtcttccattaccaagaatcttgttagtgtttctaaacaaattactagcaatgatgtatttcttaaatttcataaattatattgttttgtcaatgacaaattaacagggactatcctactcaaaggaaaggctaaggatggcctataccaacttggtgaagcttccagttcctccattcagtgtcacttaacctgtaatgactgtatttcataaaatggattagtaaagacaattagcactaattattaatatttgagttatttacgtcaagagacgttgttttcattttaattacgaattcggccttgttttaactaatacggtttttataccgtttatattttaaaattt

SEQ ID NO: 236709 - DNA, 1276 bp, Cannabis indica
tttggtacttgtcaaagttcaaggggcaaaaattataattagttttttttttttaataatggaattttattaaatgtaaatttcattcaactagatcaactcgacttcaacaatattagcaacatcaaaagggagatcaaacgctaaaaaaaatacgattaacatataaacaagatgcttagtcataatatgagcagcccgattagcagactgttgcacaaaacgtaaagaaacatctttaaaagaatataaaagttgtttacaatcctcaatgacaccaccaaaaatgaatgacaaaatattcaaatttctaacagattgtaccaatacacgacaattggattcgataatattaacacacgaaaaagcgcacttcaaccatgataacacttccttgagagctaagatttcaacaatctctgaaagaacttgcccaatccgcagtccggtaatcccagtcacgacccgacccttgtgatcccgaataacctcactaaaactatgctttccctccttgtcaaacaatgcagcatcaatattcaccttaagtttttcataacctgattcagaccatagctcatccccctccgaaagataccaagtatcaaatgcatgaaacaaacttttctcttaaacttttcttcactgatcaagagtgatacaagccaaattgacaacgaactccactcgacttttcttacccttccataagagttgatttcgtgcgaaccaaattgctcaaaccaacatcaccgcatgaaaacttttttcctcacccagtcgtgagaacaaatgaaaaaactgatctccaaacaaccttgcatcaattagaatcatagccaaacccgctactcgccaataattctacgcaaaatcacaggcaactaaatagtgcaaaattgattcacttgtcccatgacaaatcgaacacaacaaagagacatacacatgtttagtcttcaactgaactctcgtaggaagacacccactatctccatacacaatttttttgcctttggaagaagttctgttgtgaaaattatattgatttataattgtgcaagtgtacacaatcacaaacaagtaatacaatgataagtaatcaaagttcatctccacagggactttttactaaataatacaaaatcaactaagagcaattccaagaatttcaaataaaaataacactaagtaacaaattaattcaagagaaaaaattcttaaccttaattctaaacttgagaaataatattttaaactaaaaataagaagctaa

SEQ ID NO: 236710 - DNA, 1481 bp, Cannabis indica
aaagatggttgcaacacactctttatgtgttgacaaaggagccccaacatctggccaaacaacttgaggcacgccagttgctaaggttgggactgggactacttttacgccctaggttccaggaagaggtcttggaactagctccacaactcgtcctccaaggccacacacttttgggactgacactgacgaatagatccacctggggagtcacgcgtggacataaaagaccctaaggagactgatcctcaagtttaacagcctagccaaactatgattgatctacaagaattgttatgatactctctcgacaagcaacacgagaattcgcaacactggtttgtggaaagctaacgaaacattgaaagccaaaaattttagcaataatagcagagagcttacttgtcccaatggatcagagaatcttatcactctggtcgtggaactaccccgacaggggtctttctgagttggtgagagagactccctgtcgaccaactagtcatgtggaagctagtgctcaaggggaaacccataatgcacaaaatgttgctaccacacttagtgaccgtgcaagcactaagaaaacaccaggtaatgaggctccccggagggaaactacctttgagtaagagtctaaaaggactcaaactcgtgggtgctaaccaatggaccctcaacctgatgtagaacgacctcagaacattgacagagacaacaagactcctccaccaagtcattatcaacactctcatgacacaaggccccaagacacaggggaaagggacctgccactcaagacaatggaggtaattgaaggctttacttcaaaattggaggctatgaaatccagcgagtaaaatgaactgtttcatactcaaaattactctaagatgaaaagggtgagttgagttgttacttttcatgtggccccgatggccagcagtatgagtacttccctcgagtgcattggggagagttaaacttgagcaactaattaaactctctccgtacttgtgatctagctaaagactatatttaatactttaaaaatatatattaaaaagtaattaaatttaatttagataatacttttgccaacagttataaacaatcatttaatgtgattttttccaacagttgtaaaccatcatttaaattgatttttcccaacaattataaattatcttttaaagttctgtatttttatgacacccacatagccaacggttttaggaattgatggaaaaaagtataaaaagacagttataaactgttgagaaaagccaattttgtagtagtgttgcttccatgacagaatcttgctctgcagtgacaaggttcacattgagatcaacttcttttcttgatttttcaattctcgattcaaaaaccaagagcatacctcggtttcttcgattgtataattttcgatccgtgtgtttgaagagatgataaaggttgttggaatatattttacc

SEQ ID NO: 236711 - DNA, 1413 bp, Cannabis indica
tcatggctcttgataatacaaaaactgtgatctgaaatactgtcccatttaaagagagcttcagttttggggaaggagttgtgccaactattgtttgtaaacactcgatccagctttgaaaattttttgtctccaacttcatgcttgttggaccatgtgtaatgggctcctgagcacttaaattctttaacttgtgcaaacgaaagccaattttgagcatcttaaatatctttagcagtgataggtttccccccagttcgatcattaaattgaacatggcattgaagtcgccaaaaataatccaaggatccatgatctaacctaaattcttcaatttactccaaaggtctttcctttccatcatcgtattaaatccatagactacagttgcatagaaagcaacctgcagaccacagactttaactctgcagtgaatcaactgcggatcctccattagaacagtaaacttactttgccacaaaagcagcagtttgcccgaaaccgtctcactagaaaacatctcccaattagggaaattactttcaatgcttccagccactttattatgcttcaacttggtctcaaagagagcaccaaaccccaccttattctctctgcacacttctaggatagctttttgcttatccttcttcttcattcccctaacattccatcctaaaatattacaatcttccataatcttttggaataggattagtaatcaaagtcccttcattagcttcctgtaaaatagtaaagccattactcatttttgctgcctgggacactataacaggttgtttggaacctttccttttcggggtcacccaattgttctcagttgccacaacaggtagagaagttgttccattcactgtctgcaactcagggtcagtacccttcatttcttctttgttctcagccaactccttactcaaattcccaaccaaactttgttcaattttttcctccttctattgtatcagcagctatgcttgcaatttatactccaacacataatgcaatcacaaattcataattgaaacgtggagatgagacatatgaaagggtagttaagcatatatatatatttgcatcattccgaacaagtgaactgatgcaatgtgtcagactttagatcagtttggtttcaaatttgtacaagataattgctaaaattttatctttgaggctttgacaagttctggaggatacagttttagaagctctggtgcatttgttgcagggaaacagatcttagtggtctttgttactggtgaagcagtggaagaatatagagattttgggaagaatggatatcacaatgttgagtggagctttgtagatttatttttgaaaagaaaggtcttggtgcaaaatggtgaagctggataccaggttgtacttactctg

SEQ ID NO: 236712 - DNA, 1809 bp, Cannabis indica
ataaattattctaagaccttattaatattatagacagcacgtgctattctctaacagcacgtgtgattacaaggagtgtgtttgtttctcgagaaaaaagctcactcaaatttctctgaactaaattggtttcttaaataatcaaaggtctctctaatttcaattccttttcagctgatttcaattgcattttcgtgaattgaatcttactgcgttttcccaggattcgaaaaataaaaattgggctttttgattatataaacatttcgtatccttttcaaaaatcgataattagggttttagcaaggaaaaaggttgaatttttggggtgttgttgaagacaatgtctgtctcctcattaacacccacgaagagacaacgcgacgagagtcttacggagtcagatgggaaaggaaatcgtcaaaagcaatcttcaaattcgaattcttcttcgacctgtgatttttttcgtgttctatgtccaatttcaaaatctgattctcttattggagaagaaagctgtttagtttcacaaattaaggaggaaactggtgtggaattcagagttgaagaagctattcctgattgtgaagagagagttttcgttattgggttagagaaagaagaagaagaagatgaagaagaagaagaagaagaagaagaagctagtaaaaatgatagtgatgagaaaaaggaagaagaagaaaagaagaggacttcatcacttaagaaggctctgatgattgtttttgagaaaatggttgaagaagatggagaaaatgatgaagaacaaagcaaaaaagcttttgtttttaggttacttgtactttcatctcaagtgggatgtattttgggaaaaggtggaagtgtgattaagctaatggcatctgatagtggtgctcaaattagaattcttccaagggataaactccctccatgtgctacatctttagatgaattggttcaggtaatataacaaatatatatgtatatgaaaattcttaggagactgcaatttcttattttcgttatatgtatatacattatagttatagtaggtactattttaaactttactttgatactgtaaattattcaaaatttgtggatactataaataaaatattatagtttctctaggtgcaaaaacagaaaagtaggggttcgagtgatatatatttatatttatataatcaaccatacagttgcattgactgtaagtagtgtaaatggtagtcagctgtgatatgtgtgttgttattcctttccaatgggttcagtactttggtgactcaaatttacattataatgtaggttttttagaacaagttcatcaaagttacacctttcaataatttataggcatgaaatttgagatgggatagtctgtttgtcctggttagccattatggtttttgatagaactggcaattggtttggtggtatactaattaatattttaagctgtaattaagatgctaatgaagaaattgaaatagatggttctaagaaatttaattcaatgtactgtttttaataggagtgtttatacttatcatatttaaaggtttttatgtatgtatatcttttctttctttttttgggagtaaattgtattgatgaatagataattcaacctgttggagaattgggatttgctcagtttgcagaatgttgaagtcctcattagtagagtagaagttttcataaatttttgcatgggaaatattttacgcttaatcattcagcgtaaacacgagtggagaattgagagtccttcaaatttaattgtaataaagttttaatgaa

SEQ ID NO: 236713 - DNA, 903 bp, Cannabis indica
ttgaaaaaccttggttttgggttaaagggaaattaagtcattttcttaagagtatgttgaggtggctgtctagctttttgacacttagcaagctgattttttcagcaagggaaattgatttttcctatcatttagctcatttagtaaaattaaggaaaaacaccaaaattgaagaagctttctcttcctttctttctctcttcgaaccagcttaggacaagggattagctgctagtttttgatgtttcagcaaggaattcaagaagaaatcaagccaagttaagctttagcaactccttgccctagttcttgaatttaagtttaggttgagtatgtgaaattgagtttcaggggctgttagagttagagttgtttagggttcgaattttagggttcatttgagttaatttaagttcctagcagctggtattgttgattggtttgagttttatgcaagtttgagctttgagttcaaagctctgatctctaatggcatatttgtttacactgagtttttctgtgaaatactggttggataatattgtatatggcctaaggaactctggaaggtttcattgcatttggtggaaaattgagcaatgaatgaaaggttttgggaaacctggtgcaaaccggctagccagtttgcagagccacaaaaaccgactagccggttttgccagggtttcctgggcctttcattttctcaaatttttgccttagggttttaatcatgtaacttacccagtttcaaaatgtgattagggcatccatctagcacgagatttccgttcaagtcggccagcacacttgaattcggaaatcaggtaagaactgaatataatatgtgtgtgtatatgcatgcttagattgttattttacactatcaacacttgtatggtt

SEQ ID NO: 236714 - DNA, 686 bp, Cannabis indica
ccaactaagcgcttccttcacactcatagcttcaatgacctctgctggataaatacctctatggtactcggccttgaactgcaacaagtgaccaaagctatatcaagccataatcctgaaattgtaatagttatctttctcaaataaggcgcactacaacatttgactgcggaccactccgtcgttaataccacctaaattgcgcgacaactatatttatcttgattgtattaatagctggtttagtccaaaactcaatttatcatcaatactttcaagagacaaagatgataaagcatatttgtcttgatgagctttcctttaataagcaagagttgttacaagaacctcattaacagaaagtgctttttgcttccaaatcttagtatttctagctttccataatgcccaacatatcatcgcagaacgatcaacggtttccacatcaacttgaaaactaattgctccaaccagttgcaaaatacaacagtaggaaacgttcctatttttccaaaagcattccagtaacagagaggaaagggacaggtaagtagtacatgagaagtggtttcagcatgtatatgatagttggggtagattggagagacacttacatgttttgtggtcatgttaacaaaagttggaaggcaatccgtagcagcagccgtagaatatttttacacttt

SEQ ID NO: 236715 - DNA, 772 bp, Cannabis indica
atgaatttatatatatatgtataaaggtataagcttatatgttatcatatgtcatactaatatttgagcagtgtattaaattttttttaaatgttttaatcttgtttttttttattatttgaattttttaaaaaatataatattactatttttacaaatttatttatctatttaaatgtttttgttaatatatattttagtttttcataaatttagtctcagtttttaaataataaaaatcggggaatgaattaagcatttgttgtactttagagattagttttttgtattttcattcaataaatttatgaaaaaaatattaaacttataattgttaataaaattattaaatcctggcaaactaacaatttgttactactttaaaattaacacaaaagatatacatttttttataatacaataaaaagatatttgatgtataacttagtatagtgactgtaaattataaaaacaaaaaaaattataaattaaccaaaaaattatttattaattagtataatgaccgcacgaagcgcgcactactacaaaattgggctttagaggcagtttttaaggcctttcaacgtcagttttggcaaatttcgctaccgacgttgatcggggtgacgctaaaggggtatgaaataaccgtcgccatagggaccctatggcgtcggttattatgaaataaccgatgccatagcggtttcctaaaatttttttcagctgtaattaatatttttttttttacatttattaaaaatctaaattt

SEQ ID NO: 236716 - DNA, 675 bp, Cannabis indica
acaaatacaaaaccaccaatccatccacacaaaggagactcgaaaaactcagaaaccccaggaataaagcacccaaggaaaggcaagaacaagcagagagaacaccggacaagacacacagaaaacgacccaaggagaaagatcagatgacaacaagaacgacgagacaagaagaggttggtcgatgcccattctctccgacgaagaagatcttactctgcttaacgtgcttctgatgaccattctcatctgctcaacaaagaatatcccacggtttctcttctcagtcccggtggaattcttttcaggcaccgacggtccaatccgacctcaccatgagattcgccgactagggacaactattatgacgtgtataccgaaatttatatttaatgttaataaaactgtaatttttctctagtttcgcaagtacagactttgttattgtcttaaacatgagacatatatataagacccaaactctagatcattgggtctagacagaaatatgtataactttcaaattttgttttaataaattcaaaacggaatctgtagtgtactaacgaaactgaaagaaaattacagttttacagattttaagtatttatgccgctaaaaataaagatgagttatataattacataacagataattttttgtaaaaaaatatat

SEQ ID NO: 236717 - DNA, 759 bp, Cannabis indica
atttattcttccatctggtacatgagatgtggagaagctttaacatgttttgttgcttatgggtgtatgtctagtctattagcaaggtgaaaaggcagatgatggttggtgttggcactatgatcaggatggagtttataatgttaagagtgactactcattggcgtggccgctttaggtcgatgagggagcagtagactcatccaagttgattcatagtagaatggagtatggaatctttccatgccaccaaaagtgaaagtttttgtttagcgtatgttctatttggcgttaccagtagctacatagctttatctcctggaaagttcaggtacctctttgttgctcacgatacaaagaagaatctgaaactccaaaatatgctttatattctgctctggtttgtttccaatgtgacgttgttgggggtatgttcggtgctccgtcgttgtatacatggaccaatgccaaaaattctcctctttctctttgaaaaattatcttgtgcgtcttttgaattgataataattatctcatggtagctttagtatgatcaaaacttagtaatgtttggtaataaacagtcaagattagatgttgttctaaaattagcttataatcatttgtcggaattcaaagagcatattcggaagggtcttcatttgggattgcgctattcaaacccagttgaaaaatgacctactcagtggatgcctcctcctcctgatccctttactcttgtgattgatgcttcagtga

SEQ ID NO: 236718 - DNA, 674 bp, Cannabis indica
gcccgaggcattcagaaaggtttgtgcaaaaccttgcacattctaaggcatcataaccaaaaactatggcattgaaatgaaggatgctcccaaacgaaaacaacacaccataggatcgaagtggctccgttcaggtacatgatggtcagagttgaagtggaaaggccggtggaggttcaggtgggcttgactccatgaaatccccttatggaaagtatggaaatggaggttaatcaagagagaataaggggaggccgtaatttggggaagagtataataggtgatgaggagaaaatcttggcaattaatgaccaaagaatgtcaactgttgacaatcaggtaaaagggggaaaattaatattgggagggaattcaaactctgggccctttgaagttaatgagggtattgaatgggtggactagaagaggaggagattgtctattgaaaatatgaatgggcctttgcaaggtaataatggtatgggccttaacaaagaaaaatatggacacttccattggtgatgttgaaacaacaatggtggaagatgttgggccgaatgaagatatgggaacaatgacaaaaaactttatggaggcggattctagtggccagacccgccaaagattatgaatgtattatgttggaattatcgtaggcttgggaacccatggac

SEQ ID NO: 236719 - DNA, 910 bp, Cannabis indica
ataaaaagtaagattgaattaaaattatttaagattttgaaaatgtgaatgaaattaatacagttacaaaggcataattgacacacaaattaacctgtcaattactaaaataaaaatctaaatgatagcgaaattggataatttaatgtataataatttgaaatgaatacaaattttaaaaaattaaaatatagaaggtaattatttagcttaattttctccaccattcatttcgacttcgtccggctaatcaaccgcgtacaaccatcgtcctcctatgctctgccacctccacctccaccggaaaaagacatcaaaactaataagaccgatagcatctccgatactctagattacgaaccaactaccactatatcatcgagtacgaacaaccatgaattgtatattgctatgaataactatcgatctgtagatttcacgttgtgatctcagatctgggtcgtgaaaccccattgaagacgctcgcatttgccgcctgaataccaaatcatagccctagtggtcagagtcactggcatcatcgacaacaatcttgtggagatccttccattctctgacactcctggcagaccctagaaggttaacgacattgcccgctgcccccgactgttgggggtcatacagaatactagttagtgctttgtaaactatacttgaatttcataataaagattttatactttaacacactaccaactagttttattcatatttatatatattattaagtattttttgacaatttagttaaaatgttatttattttaatgtaaattaattaaatattatttttttgtgttaattttgtggctttgattacctttttttcttagaaaacttgcatttacagttattcttttttgtttaagaaacttgtcttacaagagaa

SEQ ID NO: 236720 - DNA, 2035 bp, Cannabis indica
acatatcttgtccttcccctcacttttaagacaatttcttctttcttaaggggagactttttatggcccgtccccatgcccttttttttaagactctctttcttgaacaatctatgtttatatttacccgtacgatatgccttaatacccccgtaagtggcatgaagaccagtttttaagtcacttagtcttacaaaattaaataagaggttgcatacatttgttaggtacaaattcctttacagaatataaactttgttttttaactattgataatactttcgaaggtgatcatcattccaggctctagacactgtggttccgtccattcttcttagcttgtaggtcccagagccgatttcttcctcaatttcatatggtccttcccaatttggcccaagtacccccactccaggttcttgagtggttgggaagactcttcttaggactagatcgccaatggtgaatttcctatttttgactttggcgttgaagtgtttggctacctttctttggtaagctaccatccgtatttgagactcatcgtggagttcgtcaatttgatctggtgcttcttgtaataaagctttgtttgttgctgaatcatatgtcacccttctgtgggatgggaacaaggtttccatcgggaccatagcttcacagtcgtacaccattgagaatggtgagtgtccgattgtggttcttggggttgtccggtaggcccataatactcttggcaattcttcaggtcagttgttcttgcaggccagcaacttcttctttagagtgaccttcaggattttgttgacggcttcttcctatccatttgttggttgcagaagttggtgaattcttcgcagtcaaacttctttccattgtacgagactattttatgaggcaagccgtatcgacacacgatgtttttgataacaaagtctaatgctttcttagcggttatgatcttcatgggctcagcctctgtccactttgtgaagtagtccacggctactatggcatacattaacccctccctttcctgttggtaaggacccaatgagatctactccccacaccgcgaagggtcaggagctagtcattagggtaatttcgttggggggctcttggtatgttcgcaaacctttggtacgaatcacattttaggacgtaagtttacacaatctttcttcattgttggccaaaaaatatccttgtctctagtattttctttgtagagagttggacctccggtgtgatctccgcagaacccatcatggacctcctacatgatctgcctagcttcaaaggtccgagactcaccttaagtacggcaagctgagtcctcttcggtaaaaggacattgtccatcattacaatattgatgcgcctgatactgtagtctcctgggtacgaccctttccttaggcaaccctcctttcgttatgtatctgatgttggagttcatccaactaggttctcgctcatttgcggctaccgtttctttgtactaatgcttggctccgcgagattttcaacaggtaccacccctagtctctctatttcactatctgatgctaacttggccaaacagtccgcgtgagcgttcttttctcttggaattctttccactttatattctgtgaactcatggagcagttccctaacaattgctacgtaagcagccattttttctccacgcgtttcgtattcccctgatacttgattgaccactaactgcgaatcgctgaagacttctacttgtgtagcccctacggccttcgccaactttaatcctgcaattaaggcttcgtactcggcttcgttgttagaagctgggaatgcaaagcgcagggctgcctggagccaaagtccactagagatatcattgctatcccagcaccagatccgctttcatttgatgctccatcaacgaacaccttccatgccggtatttgcggtactggcatacttgaactggcctttgcctcattacattccattatgaagtttgctatggcctgtccttttatggaaatgc

SEQ ID NO: 236721 - DNA, 1302 bp, Cannabis indica
tttatatgtgtttaaattacatttttttagaaatttatatttaggatgttaaataacatacatggtaataaatctacatcctggtaaaacatattccaacaggaggaggctccgttatccacgatgcacatggaaaccgtcatgttccttatttgtgttgttatgaggagagggtcattgtgaggaaacctgaccttggcagcatttccctctataaaggagatggcaggctctccaagcctaagttgcttggagtctctttctttgacagctaggatgtcacttttttgctcataacaaagagtccgagcatagcgctccctagccttgtttgtcttgcctgctatgtggggtccattgattatgacccataaatgacccaccactggtgtgacatagggtctccgttctgggcagcttgtccctgagcttggtcgttttacacataacgacgcaagtggggattgtttttacttatgaggaattcaatctccctcttcaagtgttgacactcgttggtgtcatggccgaaatcattatgaaatcagcagaacttgaacatgtccctcttttgatgtccttaacaggaggagacttcttatatgggacagtagcctgagtggccatgtaaatagtctcattaatgtgccttgtgatctcgtccatccattttttatacttattttgcactcaaaatattcattttcctttaatataggctccaatcaagaaatattttccacttgcaataaattaaacataatctttcttcaatattaaactatttgaataacataaaaaaaataataacaaaataaagtgaacaaattcaaaaaatactgaatgtgttttgtctagtgacactgatgaaggctctaattgttcttctccatcagattattcttgctcttctccatcggattcttcttgttcatctccattagattcagcttgttcttctccatcagattctgcatgttcttctccatctgattctgcttattcttctccatctgattttgtttcttcttgtccacttgattctgattcttcttcaaaactttccattgactcatattcactatctaactgagatttaaataaaatgaggtaaatattatatcaatcaagtacaaaacataatagtcaagctttactaaaagtagtcgatatttatactaacattttaattataatcttgattatttatgttcgagctctactaacaccaatcaagctatataatatatcatatagactttaaaaatctcgaacataatttgtgaagttctacccatttac

SEQ ID NO: 236722 - DNA, 1609 bp, Cannabis indica
aatattattttcaagaagtgattgtccttagccttagtcccttgaactacttatatgcaactccttttaatgtgatcgtgaaacattgacatctggctttgcttgagactcttttcatttctattagctcattataagcactgagatagtattttggatcggtggtaccatcggcgtcattcatagttcttttgaattgggtggaagtgattcaagttgaatctcccttgtgaaaggggattcttcatcaaactcatcatcatccaagtctccctttgaggcgtcagctatcttatgacgtaagtcttgcatctctactcccagctccttcatcctttctcgggggttagcaagtggaacttggatcctttttgtggttttctaatggtgtgtgagatgtaatcctcctattccatcatcacatgacttctttccaaggctgaaggataatgcctcacaaagggtcataggcaaggttccccttaacatgagaccattcgtgggaagtctcttcataaggttataaggtgttctctctagtgtgaccttctcatggtgagtaagctcgggttatctcaattgacctatagggttcttgtcttctgatgggtgtttccgagctgaccttgtgggatattatcagcggaggacatggggtttcctcaattaacatatgtagctgagacctcgttcccttgtcggtggcttttgtactggaagtgcgaggctcaggtcttacctttgagtatactactcaacagtttttgcatgccagccaccgcagtttctcgcctttggttcttccagcggagagtagtgagttcgggagcttgagctaaccaagtacacccacttctcctttttgggtccacgtcttgaaatatcggggtcttgtgacataaatggtggaatgtgttttaccagagatagctctctcaatggtatatacttatatcgacagggttaaccatcgatgttgtcatcacgtcatcttgtgttgggggttcttttttagcattggcctagaggtcatctccgacaaccggcagtggaggttcccttatggcggtgaccaactggttgtcatttgggtgaactccattattttggagacatcaggaacgtctaagcatggtggttggttaatacttagggaaggacataactatggacttgcactttccacagacggtgcccaattattgactataggaactcgtcaactatattaaggctggaaaatcaaatgtagatgagaggttagatatgatcgactaaataagttctagaaaaagaagcaacaatggggaaaagtgttccctgtattagttttgagagcatgagattacaaaacttgattaataaaccccatttcaaataaaagaaaggggtattataggagctctaatgactctaaaatacaagtagtcccaaaagttaacagataatattcttgtagtacattatggatcagcgtgtaggggaaatagtggaggtgtgttggtctgtgtcaaccatactgatcatgaggcagatgatgcctccaccactgtcccatcgaatcctttgtacatgcacctcctctccacaggctttggcagatgcgtgc

SEQ ID NO: 236723 - DNA, 836 bp, Cannabis indica
tttcttcctttgaatttgttattcgttagtttatttattttaatttgttgttgtggatgtaaaataactatcatttgttttattttgttgctagttatgtgaagaaaaaaaatcataaatattaaataatttaatattaaaaagtaaccaatccaaaataactgatccaatccgcacttctgggaattggatttgacctattgtgcagattgaattggatctaaaaaataaaatctgcacttagtgcggatcggatgaactatgagtaaaatggtacggattggattggatgaacaccctaacaacacctatagttgtcaaaatacacatatcatcttaaaatattatattttttttgagttttttacggctaaaccctctcaactatcatttcatttgcacttaactctcaaaactcaaattttggtagtaaaactctccaaattactgaactgttattaaatttaaggagacatttatttttcaaggttaactgccaacatgaactgcttatgtgtgtactttttagacgtggcacgtgtatattggtacacctaatattattatttaaaaattataaatatatatttaaattataatatttttattttataatttatttaattttgaaataataatagtatgtataccaatataaatgtatcatgtgtacaatagtgtacacataagcagtccattatggcagttaacgggatgatagcttaaatttgttaacagtttagtaatttggaatgttttactgccgaaatttgagcttggagggttaagtacaagtgaaacgatacttaagaaggtttagctgccaaaaactctat

SEQ ID NO: 236724 - DNA, 1220 bp, Cannabis indica
tgataccatgttgtaatgtcctaacccgtaaaggcaccatatgtgtgcttttactaattagtttataataataaactataaatttaagaaaatgtggtttaattaaaacttttaataagataacttaaatccataattaagacttttcttataaaatgccactggttttgaggatccccttatttataaacttttacaacatgtagcaaaacagttgttacaaaataaagttacattttcaaaatagatccaaaagatggatcttgtccattgagagccaagacacgacgactgatatgtgcattgtcgaaaaacctctaactcatggctggtccagctttctttacccttacctgcaccacagagacccgtgagtcacaaagactcacgataaaacataatctcaaaacaatgcatccaatagactaaacaatcattcaaacataatgcagtaaagataaataattagttatattataagacaaaccgtccttaatgctttataaaacatccttacaactcgttaccaacaagcttcatatgtcactatcgttgcttaatgaagcaaccgataagtaaggaacatataagaggtttccaaaagtgggtaataactcatttctatcaacggtaattgccgtatttttactttgattataatcgagtcacaaacgataataatcatatcacatttgacatgctaagcagtgcaattagctttccttacctcgaatccaaaattaggtatgcgggccgacctgaggggaataatgctcgacgatcttaggtcctatgtcacgataatgaaacttagtgaaaaacttaaccaaatcttaaaagaagccctaatttcacaactagacaaaccctaattctgactggcttaaaaataggttaaacatcactaaaataccctaaactaggttttagaaaaatagtacgagtaaaaaccagtttcgaagaaaaactagggttttccttgctggccaatcggttgactagttcctcaatggcctgtaactggtcgaccggttcctacagaaaggcaaaacccctggtttttcacattaaaaccaaaccaaagcttcttcaaacttgctcaaactttccagaacaattctataacataaaaataacttactcaagcattcaaaactcaaaagaaacacctcaaaatatcaaattcaccgtggatgggtgaaatttgagttcttgaactc

SEQ ID NO: 236725 - DNA, 1524 bp, Cannabis indica
tattattattattaagttaaatagcggcgtaagtacctaacgtgttaagtttgtaagtagtataaattcaatgtttatttgtagcggcataagtactctatccatgtttggaaaactgtattttttctctaatttagtcagtatagactctgttactgtcttaaacattgtacatatgaggtccaaattctagataattggatttagatagaaacatgtagtatcagttacttttaaatattcttttaataaatttaaaacggggtctggaagaaaattacagttttataaacattgagtacttatgccgctaaaaataaatattaagtttatgccgcttataaatttaaaactttgggtacttatgtcgtcatttacccttattattatctctttttatcatgtgttataaatcttatgattataatattaggctttgatgaaaaagaacttgccttccttggaagaatagaatatcttatctactttgaggttttaaacttgaagtttcaatttcaagtgttttcatctcattagagcaattggggttcatctgataaatatcccttaatcgaattttactttgagtgagtaagcattaggttttgatgagaaaagagaaaacaaaatacattacaaatggcacttgcttcacctgcaagaatagaatagcaaaacattggttcctaagatctgttaatggtttgaatactgctgctcgtcccgagacagcagcagcagcagcattggctagtggctaccaattaactcaaaactgccaaattacagtgagcaaaccaatccaaaattgctacaccagtttcgttatatatttttataagtgtttttgtccaattagagctatggggtcactcagctccttgctagaatttgcgggagagaggggggaactatgtgaactgctgagtttcaatctcatgttatgctatttttgcggtttatcatgttttttttttatcggaagttatgtttactcatgataactattgctcttacaaatttatggtagatgggactaatggatccgaacaccatgccaaaactgctccatcctcgactatgctcacaatgggcgaacatcttgatccaaatgctcaaatggaacttgttggtcactcaattgtaagtatccccacctccttcttcctctatatggatatgttttcttttggttgatctcaagaatacatgtttgttctttacatattttgcaggttctaacaccatatccttatggtgatccaaattatggtggagtaatgactccgtacggaccccaacctatggtaagaagatatttggagttttttgtttactatagttaatgtaaatcttgagttttccattcaacacactgatttagctaacaagttcattataacaaaatgtcaatagatgtcaatgtcacggtgttttgtggcgtgcatcactcgggtttaatttttacgtgattatcggcacactttaatttaatttttagaaactagcaattgtttgaaaggt

SEQ ID NO: 236726 - DNA, 844 bp, Cannabis indica
ccagaactaaaaatgcaactcgcaaaacctcccgtactctcaaaaaccgtttggacggtgaagaattagggatatacatggcagtcactgaatacattgtgagcgtcgtactgaaaagggaagagaataatgtccaacacccgatgtactatatcaacaaacgactagttgagacagaaggttgatatcctttaattgtaaagctaacttattgtctaatcttagccataagaaagttaaggccctatttccaagctcatcctgtttgggtgtatgccgaccatcccttacaccaagttttgaaaaaacccgatgcttttggatagttactcaaatgggttatagagttgggtcagtacgaaataatttttcaaccccgcacatcagtaaaagagcagactttggcagactttatggagcaatgcacaggcaaagaggtcgacagctcaaaatatagtcccgagacacacaaagagcaagagtcccaactaaaagagaataaagacaaactcatctggaaattacttgaggaaggattgaccacgtattagctttttggtgcaggacttgctctcgtcacacctggggcaacctctgcatagagtaatcaaatttgcgttcaaagcctccaacaaagaagcaaagtatgaagcactcatagatggactaaagctttcttgggagatacgtgccaaatacattaaagtctatagtggttcaaagttggtggtaaatcaagtcttaggggaatacatggctcgtagagaaaaatgatggcttacctcagtttgatccaggacctgctcgcataattcaaagtgttacaccctcaagcaaattccaa

SEQ ID NO: 236727 - DNA, 1400 bp, Cannabis indica
ttatctttcttgataaaaaaataataaagcaaattaatttatatggtcaaactatgtatgtaaataaattagtggcgaaagtatttgagtaatcaattttgttacatttaattactagtataaaaaaaattaatagcaaaattggtaagtaaaattattttttaaaaataaatacatgtttaaatataattcaaattaacttaaaaataataataattcaaattaaaaattaaaattaaaaattaataaattttaattattaatatgtataaagttttaattgtatacaagcagtcccatagtaagagtatgcactttacatcataataactacaggatctaaaatcaatggttaagaaaagttccctatttgctaggtcttaccatagtcttgccctatacattacttcacaattcaaacaaattacatgcaaatgataatattttgagttttatttttgtattttttttctattacacatatactcttttaaattattatagcttttaaatatattattatcctaatattttttctctatcattttcaaaaacaaatatatagtaaatttacaaagcattatttagtataaaaaacaaagtaaactttaaataattaagaatgaatttataattttaatattaaaaaaatattatcataactaacattaattttttttttttattttcaaggaagaataatatagatttttttaaagaaaaataacatagaaaatttaaacacaaaattataaaatttttaacttatgtaagagaaaaaaaaattaactaaattgaaaggaaaattattgcccataataaataagtacatatacattatattttttttttaaaaaaaaaatatttacttaattaattagatcttaaattttatgaaaaatattctcataaaatcaataaaatattaaaaaataaatttaattaatataatatataatttatatactaaacacatgcaacatactagtatgataaagaaacaagatattttttgggttacacaaaagatgagtgttctaactgctttcaaactttttacaggttaatatttatagggtactccttaagtgagggcatcacttttgctcttaaaaataagagcaatttttataacctttgattctcaatctaatggtaataattaatttggctacaatagaacatctcatacagaattaataacttcttttattttaatttattttttaagaaaaataaaagaaaaaaaaactacgtacccactaacaatatagttcattttcttaaaataaaaccataataataatctcacatttgtaaatatttttaaactaataattaaaaaaaaagaaatcaatacacgtgtatgatcttttaaagatacttatttatttatttat

SEQ ID NO: 236728 - DNA, 1115 bp, Cannabis indica
tttcttggccacagcccacacatatttgaacattgcagcaatgttccaatttgtgacatttcttaaccccaagccacctgctgatttagattggaagacattattccaagctacagcagcagccccagtcaagcagtggctgctattccataggaatcctctacaaatggcctttatatctcttacaatgctttttggcaaaaccatcatttgacaccaataaaagtgtatggccatcaaaaccaaattaatgaggacaactataccagcaaatgataaatttctagaactccaagttgtgattctggcaaccatcttgtcaactaaaattgagcaatcttttgaagaaattttctttggatagattggaacacctaagtacttaaaaggtacatcatatgttttttaaaaccaaaggtatccataattctttgaatttctgtatcactcattttattgcagtaaacagaggttttgttgtggttagggattaaacctgaagtttgaaagaagagtttgagtccctgcaacatgaaatagatgctcttatagttcacattgtagaagagcaagaaatcatctacaaaacagagatgattaagctataactcccgccatctttcatggaatttgaaatccttcttttgccccactttcttcataattctggacaagtattccatgcccaaaacatagagaagaggagacatggggtccccttgtctcaatcctctcttggcttcaaagaatccatgtatggatccattgaacattaaggagaatctaggtgctctgacacatatcattattaacttgatgaagctgcctggaaacttgaaagcacacaacattttctcaatgaaatctcattccagagtatcatatgctttttggagatccaacttgataatacaattgttcttgcttgttttcctcccgtagtgtcaaatgagatcttgacaaatcattatattatgaccaataaacctccattgaacaaaaccactctgattctgagaaactaaaccaggtagaactattttaagtatcaagcaaattagttttgtagcagctttgtatagaacattgcagcaagtaatatgtctataatctcc

SEQ ID NO: 236729 - DNA, 1211 bp, Cannabis indica
ccattggacccttgccctttgctgccagaagacctcctcctttaacagcagatcattgagtttattctgcaattgcctagatctttcgctgaaacatcctttactttgcaaattgttcatttgaactacttttttctgcgtatcttaaatttctcgaaataaagatccatacttattgtgatgccaagtatccaggtttgaagcacattgttgtatattcttgattgttgaaatcagtggtgtattttcctcagacctccaacaattcttaattagactcttacattcttcgtcaccaatccagatattctcaaatctgaatcttttcctcttgttggaacctttctgcagatccgtatcatcctttatttttaccaacagtgctctgtgatcagaatgataataatctagatgcgtcaagcttgtataagagaaagagtcctcccatgcttcattcaccattgcccaatctagtctctccttgatactttcattgtctgcactttttgcccaagtatatctctctcctttataatgcaatgggtgtagtgcgcacaattctaaagtactacgaaaatcttcaatttgtgtttcatttctatatccgcttttatttttatcattttgacttaaaatctccaatcactaaccatggtccttcatacactattcgtaaatgttccaacatatcccatgttagtcgtctcttataaagattaggctccccataaaactcatagaaatgccaagttattggtatattctctagcttcataaaacaactaatataattaggggtagaagtaattcccgagaccacactctttccttccacaatagcattaatccccctcccatacctactctaggcacttcatagacgttttcaaaagataattgtctttttatttctagactcttacctttgactaatcttgtttccatcaagaatagaacatctggcttgaactctcgaagaagtagcttaacatgtcgtattgcatccttaccattcaaacctttaacattccagctaatgatagtcattcctcgtataaacttactagcactcgcaataaaccatatagcttttatgatatcttgatgattatactcactcttatatccctaatattttatatttctctcgtccaccaatcttcttgagatacttcaaatatcctataaaatataatattatatagaataaa

SEQ ID NO: 236730 - DNA, 1369 bp, Cannabis indica
aattgaaaaatcactgtagcgtgccttagcattagggcattacagttggggtcctaaatgacttagccttttaggaaaatttggggttggtgggcacacaattttgtttccggtctagtgggggaacctcttcttcctcttcctttatcaacacaacttcctgtcgtcgggcactttcttctctggacctccaggagtgaccacaaccgacaaaggatcaacaaccacttagttaggggtgtgcgtggagtctagcatggcaaagagatcatccatgggtttagatgtaaaaaataggaaaatgtggagaggaaaagtcaaacataagaaatgcaccaagtgtaaacataaaggcatagcaaacaaggaaggctagtcctaccccgatgtcatagatttgttagaaaattcataaattaaagagctggtgttgtcatctccgaacaactctctgagggaagaaaccaacttgaagttatgtagcaatagtgattcaataagataggaatcaggagactggaactcattttagatcagcccaagaagccactcatgttttaaaaataaaaatctttttccctattgccccactgagaatggggcattcagaacctagatattctcacgtcaaagctgactagccatgagtgagagtattcttgaaataaaggaacatattaaaaatttaagaggggcttacggacaccaaatttatttgctccacgggtcctggagttggccactagaaagggaaaacgtggccgcagctaaagactttttccttgtcttctcctagtttgtcttgtctgaataactttgaaggtgggcgtaatggttctcctactccttttcgtacctgtacatgttgtacttatcctcaactattgctatgatctctggccagagcttcttttctactctcaaaatcctttcattgggacatgataccttaaataagttgaagtccttaattgtttggttcctcaggatgagtttagccttgcagcaattgaaggtagtcaccaagtcacccacgttcaactacctctcataaccagcaaatactttgaacccaattagtgggatccattttgtacaaaggggggattcgagcccaattagtcaagatgtccggccattcgaaggctttgaagactgatgaaaggaaaaatctatgacggtactccttgacattcttttgggagttgaagggaacaagggtttcattggctggatgggcttgcaacttataaaacccatccttgtacttgtcaccctttttttgggatagataatagttcataaaaaataaaaaatttttgtggggttcagtgaaacaccctaactaacataggcgtattacgtgatt

SEQ ID NO: 236731 - DNA, 1022 bp, Cannabis indica
aagttagttactaacctttacaattgttggatggtaattttcacttcttcgtttaagggtttcttgtaattttttaggcaaatcttattttttaatgataaagaaaaattatattaattgtatttattatatcaattttaaaagaaggctattttgctaattaaaatatttgaaaagtcattttcctaataaaagttttcataaagcctattttgccaactcactctcttcgaagggtttcgagccgttggcgaactccattacaacaagccagtgctcatagtcacagccatcgagaagaatggtttctttaggaggacgattgttctagttcagcggtgaatatccagagctgaaagtcttgaactcgagcgacatttcgacagagtcaggtttgaaattccaaattagacatttatattcacccaaggaaatcaattgaaaagaaaaaggtaatggatatacacaatcatactgaatcttatattaatgaatcaaaacaaaaaaaatcaattataaactaaatctcttagggtgctccctcgaaactcagtcgtatacattagaagattttaaattgtatctttcgttcttacttgaggaaaagaaaaatcccaataaattatagtttgattttaagtttgagggagaagaaagaggaatctactaccgtacgatttaaattgaatagcaatagttaacggaagggttaacttctgttaaaattaacagaagaagaataacaaaacgttaacccaacaattgtcgttagatagacacttttaatatataaagatatgggtcgatcgtggtgccataaaaatgcagatcacatcatactaatatttttaaaaaaggtaagtctatacgacttgtacgtcttgttttccatgttatgctcaaattcttaacctactttactcgccgaactatttttcttaagtaaatagtttatttttatatttagattcgaattttaattttactgtttcacaattttttttattattaataaaataatt

SEQ ID NO: 236732 - DNA, 961 bp, Cannabis indica
gttagttactaacctttacaattttggatggaattttcacttcttctttaagggtttcttgaattttttaggtcaaatctattttttttaatgataaagaaaaattaatattaattgtatttattatattaattattatatcaattttaaaagaaggctattttgctaattaaaatatttgaaaagtcattttcttaataaaagttttcataaagccaattttgccaactcactctcttcaaagggtttggagccgttggcgaactccattacaacaagccagtgctcatagtcacagccatcgagaagaatggtttttttaggaggacgattgttctagttcagcggtgaatatccagagccgaaagtcttgaactcgagcggcattttgattgagtcgggtttgaaattccaaattagacatttatattcacccaaggaagtcaattgaaaagaaaaaggtaatggatatacacaatcatactgaatcttatattaatgaatcaaaacgaaaaaatcaattataaactaaatctcttagggtgttccctcgaaactcagtcatatagattagaagattttaaattgtatccttcgttcttacttgaggaaaaggaaaatcccaataaattatggtttaatttttaagtttgagggagaagaaagagaatctaccaccgtacgttttaaattgaatagcaatagttaacggaagggttaacttctgttaaaattaagagaagaagaataacaaaatgttaacccaacaattgctgttagatagacacttttaatgtataaagatatgggtcgatcgtggtgccataaaaatgcagatcgcatcatactaatatttttaaaaaaggtaagtctatacgacctgtacgtctggttttccatgttatgctcaaattcttatccttctttgctcgcccaattatttttcttaagtaaatagttt

SEQ ID NO: 236733 - DNA, 773 bp, Cannabis indica
aggaagagtgcaaatgaagcttaagatttgttagacgagatggccctgaataatcaacagtggccaactgagagaagtcaaacaaagaaggtggccggtatgctggaggtagatgccattactaagttgacagctcaggtagaggccctaactaaattgatagttgtgcaagcaaaacaagctcagctggtttgtgagttgtgtggaggtcttcatccctatgcagaatacccagaagatgtgaatagtttgccaatggatgaagctaaagccattggaaattactctcagaacaacaactatgggttcaatcaaggggggaatcgaaggaattctgggttatatcaacagaggaatcagaatcagacgcagaaccaacaacaaccacagcaccaagggtctagtgggagttctggtcttcaaacagacttattgctacaatttatgactgagacaagatcatccattaaagacctacaaaatcagatggggcaattggcaacttagataaaaacccgttctcagggaaattttcctagtacaactgaggtaaatcccaaagaaaattgcaaggaaattaccttgagaagtgggaagaagtatgaagggcctgatgggggagaaccagtggaagaagaaattcaggatcaaccggtgccatcatcaacagaaaagaagaatactaaagtcctacaccagaacaagactctccacaaatcaatatagatcatcatgtgaaaataccatacccacagagactccgaaagaccaat

SEQ ID NO: 236734 - DNA, 1702 bp, Cannabis indica
cttatgtatattgttcatacttatattactataccataaagacttagaaccaatataacactagcattactactactactactagacatcattaatactaataattaatgctaatatttgagtattttgcatatagcttaattatttaattaagtaatttttatttccagttaaatatttaagtttaattttttatctacgaaagttttaataaaatataaattaaatattattatcattaaaaattaaattttagtttatttataattgaaattcaaattattgttaatattattagtagccgtgctaccttaggaatgtttagcaattttattaaaataattaatattattaaactaaaaatctaaagagaatttaaattatgacaaactgtactataatgccctttaacaatatttctcatgtattagccacatttttgggctaagaattttggaacataaatgagaattaagcatacaagtttctcaaactgcagaggtataagagtgtaaaagaatgagacaaaagcttttaagatttcttggtaaaagaagaagaagaagcatgtgatatatgatgatgtttgaactttgaaataaagatatcaactttatttattagcttatgttatttttaatttattttatatattattttttggttgaagaagtaaccctactgcactatctccctgttaattattttataaaaatatttgtttgggtagaatatgggtgatttaacttgtgtataagggtaataaataaataaattggtcaccatttcatatcttggaatttattaattttcaatatcaatctattcataaaattccttttttcaatctcaataattaattatatcaatacaattttatattcatcattatctattttccaacaataataatctaattaaatttacatataatttcatgctatagactattgttttttcacatattatgcacgtacgtactcattattaattagttgtattataattagtttattatgttcatgcacgttacagcacatatgcaaaatatactaattatataagaatattttatgatgttatataaaaattaacacatatatgcacatgcaaatattttttctatcataggttgatacatgaattttctatattttaaatagtactaaatatctctttggagcttatattttgtaaaagttactaattagattttttatttcgttaagtgataattcagaaaatacaatacaaattatagttcaattttcgtcaaattaaaacttaataatataacatgatctggaggtactatgaccagactagttacatttttattcgtggtagaaattgattttaggttagttatatattatattaaaaaaattgaattcaaaatgtattttgtatttacttttatggtgctacacggaataggtgaatgccccatatatatcttctataagtcttatgattagttaacgatattccttaaaagttattttcttaaattatataagatttaaggtggcgtttggttggaagaaatgaaaatataagaatgatgatggaaatggaaataggaataataatggaatggaataaaatttaaaatgcataaaaaattgataaaaagattattaaattttttcccatcatgcattggaatggtctttccttttatttcaaaatagaattgtca

SEQ ID NO: 236735 - DNA, 1024 bp, Cannabis indica
gtttattcgtgcttatgtgtcatgccttcgggtttgtcatgtcatgtcgtgtcgtgtttaatcctatttttcttgttgtgcttaagcctatttttttcgcagcgtgccgtgtcatgttcaaatcgtattatgtcgtgtccaaatctatattttttcgtgttgggtcgtattaaaaagtccaactcgtattgcccatgtaccaaaatatatttttctttatttaaaaatatacagatgcttttttactttcaaaatacaataaattttctttttaaaataaagagtccaataattgtgtaccgtaaagttcacttagcattctgtgcatgccaatgtttaggtaattaatagtagtcatcataaagatcacttgttttatatatatttcattagagtcacttctgtttattatcccgacatattaaatataaatcattcttttaaaatggagattacatttgatgatgtttgtacttattatacatatagtggtagggaagctttactaggctcttctttttgttgggtcatgtacataattcaaaaaaactcataataacaaattttgataatgttaaagaggatattcaatggtgaatgatgattcatgcatgattgtttaatgtgaaaacttcttatattatagatagttaaggttgtttattgatattttttatttttttttagttctatctagatgatttaattatatatattagatgttaaattttattatcacgcgggtttgatccacttaatattagtcatccaatcgatccaacattcatttgatgttggattagatcggttctaattattagatgtattttatgtatattaactgaattagttatttatccaatattttagactagaattttttggatcggatcgaattcatacaatactttaaatctaatattaattagattgaattggatccatccaatccaataaaaaaagtaaaaaatttaattttaattttcatatatatatatatatatatatacatatataaatgtat

SEQ ID NO: 236736 - DNA, 817 bp, Cannabis indica
caatttgtatcaaatttgtaattgtacatgtaggatttcctatgctcaagataatactaattcaatcaagaattaactataaccaatcgcaaacaaaacagaaataagatcaaacaactctttgtacaaagttctttatactctaatgaagatcacaatgatggattatttgactggagtaggagcaagtttactctaaacttgtctctgaactaggataaatttttcgtactttcattattgttttgaacacagtcaataactcgattggaatctctcacaagagtatttccaagctttgatactcacaaccccgaaatcaacacgtactcttagttgacttgaatacaaaactcaattcccataactatctttctcgatctctttctcactctctttcaatagtttcctctccctctcccactctctaatctctataaatgaagagatgaaagcctttagtatttataggctttgataaacttgaatagattgtctaggtgtgagctgatcttgtaaccgaaataattaacttaattaaagagttgttaagttaattatgggtagttagttatagaaatgtttccacaatatattatagtacaatattaaaaattgatgcaaatatattattattttttatgtaaaatataacacaaattttacaccatctattaaaaatggtcttatgcatgtctttcaaaaacatgagtagttatttacgagattttccaaaaaaatttaagaaattgataattatttaaaatactaaaattatattatttaagtactaaatttgcatataaatttcaaaaca

SEQ ID NO: 236737 - DNA, 1242 bp, Cannabis indica
aaaaaaaaatcattttgaacgccaccattagcaaaataaaaatagcaagtaaataagtagcaagatgtgtaacgactcactgaggttaaagccctactcatatcctgaatttggtagattgggttagatgaggcgtaggcaacaaatctttttgtaggaagatggactgatttggaatcaaagtgactcatcatttctgatgcaaagggagctaaggaaaaccccaggaagttaaagaaccagtctatcatgggatctaagtttaggtcccagacttggccagtatactccccccggagaggaccatctcagttttccatcaaccatatcctcaaagcctccgctttggcgtttcctttagtttgctcatctacagcaaaattatgcctggctatctagggttgcaggtgagcattatctgggtggatatgagttaaagggatggacaggacacctggaaaaacagttgcttcagaagggatctccgagtcatcaatactctaagaaggtgccctaaacaatttaagattctttgaggacctagaatcaatgaccaagtccttcttcttgcattccagtggggttgcttcatcctcgtctatgcagaccacctttgggttagagggagcatctttttaggcacccctgggagtaacgatgaccctcaagaagtctaatgatggaagagtatcgccacctctgggactgtccaaagcatctagcatggaaaaaattttgtccatgggtttagctatagacaacaagaaacatgagaaatgcacacgtggtaaaatccaatgataaagcaaatgagaggagctaatcctactcttatggccaaattcttccttaataaattcataaattatattgctggtgtcgccatctcctaaaagttatctaaagggagagccaactcgaagtaatgaaggaagaatgatccaggataattaggaccggagggcctgacctcatttgggacctacccagaaaatctccaatattttaaaagtacagctctttttccctatagccctaccgagagtgaggcatctgtaacctaaacaacctcctgtcaaagtgttggctttttacatggcatgcttttagatctttgatcttctttctctatatatgtctcatcttcttttctttgatatctctcctttgtacctaccattgataagtttcaagcttttaaaaactttttgattctcatgttagattgtaatatttttggta

SEQ ID NO: 236738 - DNA, 944 bp, Cannabis indica
agtttctcatttcttttagtcatatttttatataaataggatttcacctcattaaaataaactaatgacaaaaatcgcattcactctctcattctgttcttctctttgttttttcttttttcctatttctttatctattctcactacaagaaatgagacttttgccagtgcatttttatgctggcaaaagttaggtattgtgttggcaaaataaaatttactttcgtcagcatatttttgcgctgacaaaagaggttggcaaattcatgttggtattgcaatttgtgtcagtgcaaaacgaaaagcactggcaaaaataacttttcccaacgtgtaatagcgctggtaaaagtaagactttttccagcgcattaacgcgctgggaaaagtctcacttttactagcaaaaatgtgcactaggaaaagtcttacttttaccagtgcatgaacgcgctggaaaaagtctaactttcgccaataaaaatatgcgctgaaaaaaatcttacttttaccaacacattaatgtgcgtgtaaaactttgtaatttaaattactttttaattaatattatttaatttaaaattttatcaattatttatgaaaataaatcaacaaaaataaaatataattttaaattgttctgattatatatatttatagttataattgtctaaaagttaataaacaaacatatctttaaaatagtaacataagcataattttgtcactaaaataaactaaatactactactacatatcagttgcatcatcatcaatatcatcattgccttggccatcattatctcccacctctgcccgactagatccaacatcatcaaattgtagtggcgggaggtctaactgaaatcctaaaatactcgcactcaatttttacaccaatgcctgcatcattaggtcttgattgacttgattttgcttaagag

SEQ ID NO: 236739 - DNA, 811 bp, Cannabis indica
aaatcaaaaatttcagttatataggcacactttatatagaatagatataggaatgtcaattggaccgggtcggactcaacctggtattgacccggcccgacacgatgtctcttttaccattcctatatatatacttgtcacaccaataattgcaaatttattaataattttccaagaatcaataatttaaacaacaataaaagctctttaacacataatagtataatccaaatattgattaaaaatttaaattctaaaagtttacatagtatctagtttataatccaaaatatggcatattattatattgcaaaaagtttcataaagtcaccccaagaacgaatgccaacttgatgggaaaccctgataccccatggcattgatatctcttgtacttgtttagcttgaaagggggacttgaagagaatagtgcaatgtaatctccgtttgactgggccacaaaaactgaatcagaggggtgagacctcacacagggacaggtataggcagacattcaattactttggtgtttaattagtttcctggtttggtgaggcttgaggctttagttgaggttgagaatagtgcttcacaaaaagggtactagaaaaggttgggttcctaaaaaaagggatgttgagaaaatatggcttctgtaagagaaaatatatttttatgtaatgtaatgtttgtgatcaatacagagacattttgtggcttcaaaaccaaatccaagtccttttcttggcttctttattataaactaaattttaacttcattaaattttaactctttgaccaattaattaat

SEQ ID NO: 236740 - DNA, 1919 bp, Cannabis indica
catggcaaaataaacaggaaggtaaatctcgtagtactcgcggctacaattgtactagtagtaaggtactcatgaaactcatgatctcatcctcaactcatttaacttcttttgataaagacataaaatcttaaatagaagagacacaaaggaaattgaagcttcttttagagaataaagatgttagttagagcgtttgaaaaagtataagcttctagttagagtgtgtgatcctctgttagaagaatctagtgtttatggaagggatgctaataaagaagagattatgaagttgatactttcgaatgacaagatcggggacggtgatgacaaactatctgtaattccaattatgggaatgggtggtattggtaagactactcttgctcaacttgcatacaagaatgataggaccgaggagaagtttgataccaaagtatggattacagttagagatgataaaattgactatgtgaaagtgatgaggttaattgttgagaaattcacttctaagaaatatgaaattgaggaactgtacgatcttcaagatgaagtacaaaatactttgaggataaagaagtttttatttattgttgatgatgtttgggatgaggattcaaccaaatgggatgttctatataagtttcaaatcatgattgcatggaagcaatattgttgcatcaactgtgacaatatagtcaatatatcagttgaaggggatatctgaggttgttggatggcagttatttgctaaacattccttaattgattagactcagatgaaaatgatactgatattaaagaaattggaagaagaattgttgataagtgtaatggtcttgcaataaagtcaattgccaatctcttaagagggaaacataataagggagaatgggagaacattcttaatgatgatatatggagattttatgaaagaaaaaataatgatgttcttctagaatttgcggttgatttacttttatctaccttctaatttaaagtcttgttttgcttattgtactcagcttcttaaagattatgaattaaaaaaaacggtgataatcttgttatgggtggctgaaggtcttttacaatctcgaaacaaaaggagtgctttagagacggatacttccaagatctaatttctaggtcattttttaacaatcaagtgcgaatgaatcgattttcttcgtgcatgatctagcaatgtttttgtctggtgagttttctcctaatatttgccatcttttggagtcgtcgcaacatggtgaagaagctaatgagcttaagaactttgaggagttatctaaagtcaactatttcttgcgcaacttattattataccgatatgtacaaaaaaaattactgatcaagattagctttctgaatttgttatcaaaaaagattagctttctaaattagaccatttgcacaaattattcctatgcttaagaatactatctataagaatgaatttgatcaacaagtttcctgattcaataagaaatttgaagtacgtatttaagttacttgaagttagattgttatagtattgaagagatacctaatacaattaatgcatgtacaatttagagacattattgttgaaggtgtgtcatcatattactcgactaccaactgataatttaattaagttgcaacatctctgtgttcacttatttataaaagagatgtcattacaatttgggaagctaaaaaatcttcagacacttaatatcttttcagtgagaaaaagtaaacattctggtagcattaagctattgaaagatttttaagatctacacgagagtctttggattcaaggaatagaaaatgttagtgatgttgaagaagtttcagctgcatcattaaggagtaagaagtttcttaataagctatctttggaatgggaaggtgat

SEQ ID NO: 236741 - DNA, 1495 bp, Cannabis indica
gacaacatatatcatcaatattgaaagatttaaaagcatcctttggatccaaagctgaggtaaaagttaaaagcttcgttgctccttcaccaaacctgctatcgagctcttgtatctgaaagtcaatggtagcattaaatatatcaaaatgataatgatgctctattgtaatgtgatcacgttgacggtgaccatgtccttggacataacaagagccaaaatttggaatgtcaatgtcaaattttttggagaaagagacaacatttttaagcaaattttcccaacctttattttttagttcttggataaggtttttttgtagtagataccatattcatggcattcaatatgtcttgagatttttgcttcaaaacttgacaaagaatattagttatacccaaaatttccttcattaagtgcaatataaatataaattcaaatgatgtaatcattttataagcagcatttgcatatccgcgttgataataattagatccttcctttattatgttttcaagcaccgagcaagtggctccaaacatattttgcagactacaaatagaagaaaaatgagagccccaacaagtatcactagctcgtttgattgtaccaatttaatttgctcatcttccactttcaagttcatcaatagctatcatatgtgcaatttgtgttgcttgagcagcttgtagttcatcatgacgtttacatgaagcccccacgacattaataacaaaattcaaatttgaaaaattcatgcacataaagtacctctctagatgcagcaactaatgctaattattgtaatcggtgagcaagaactctagttatttcattctttgaagtcaatgctagcacaatcatatccttgtccacgaatattttgaatatcaagacaatggtgagaaagaactctagttatttcattctttaaagtcaatgcagttgtatctctaacatgtacaagatcaaaaaatcgttcttgtataaaaccatcatcatcaacaaaccttaagattatagccatttgctccctcttagactcatctcgtgcctcatcaacaataatacaaaatttagaattcccaacatcttcacgaattttgtttcgcactttatttgcaagaacttctaaaatctctttttgaattttgggtgaagtatacttcgcagatttaggggcattttccaaaacaacttgtttaacattttcatcatatgaagctagtaatttaaccatttcaagaaaattacctcgattttttgactcaagagtctcatcatgacctctgaaagcacatccttgaaatgcaagccaacgaacaacatcaattgatgttctcacttgtagccgattcttgagaatttgcttagaactttgtgcattcattactttatcaatatgttgtgactgctttaataaatcctcacatgacttcaaggcattattatgagtagagcaagaatcttctccaacatgattcaaaaaggcaca

SEQ ID NO: 236742 - DNA, 2195 bp, Cannabis indica
tagcacatgatcgaaggttaaaacaggcctgttgccgcgacaagacatccaattccctacaaaatcaataaatagaataattcatacctaataatataataagcaataccattatatgacatcaacaggagaagtcgttgataaacacaaggtcacatcaaagaagtgatttactataacaaacatgttaacaaggggatctggaagtgaccaactgcaggttttagcaaaatacagtgagcttccttgatatatcaaaataaaaatagcattcgtatacatagttagtgatgctttcattttattttttttggacttcacaacattttaatttgaatcttaccacactgtgaagcctctttcactagttaataggttggatatgccagaagagccaaaaaagtggttgtcagatttgagaccaaaaagttgccttaattgccccatgaaaacttcaataactttctgaagatcctgttccaaatatttttgcatcaataatagaaaattaacagaaagcatccacaataatagaacagagccccagtcattgagactttattgatgagtaattcatgggtacaaaattaatttctcttttagcaacattataaagtaataaatgacctgttcttgtttctaagttcattcctctcactctcagcactcagaaaagagattatcaagaaaggttaacaatgtacctctaaccaacatagtgtaccacaagagaatttctcattgaatagcaaagcatctagaatataagattaaaagcatagaaaaacatctaacctgttgtgaaattgtatgcatgactggatgcttacttctcaaaactttcccacatcctttagggttccaaacagtgactcctccccacatcttcagaacagttatcattgggatataaaaaattggataagttcaaatagaaaattcagttaagaatgcttggaaaatagataactgtgacatgttaactaaccggggaaatgaaaccatttgtcttagaaatctctccattttcaagctgtaggagaagggggcactcctttgccgaaggaacatatctggcaacaagtacagaaaataattattggggttgtgagttataaatagaattctctctaacaacaatagagtcagcattacctataaaatagagaatttttcttaaactagggttaagacatgcaccccaacacaaacatattcaatgtaatagggaaaaaattgtaaagtagtttctctcaatagatgtataactccaagtccaaacaacctgtagtgtagacaatgatatagcactgaattttgaaaaggatttacatgctgaaaagtgcatactgcagaatgtttgcaatatcatatttatcttagtatgtatactgcttcaactcaattaaatcataatccataaccttacagtaaacatttatataagtaaaataattagaagaatgatatgagttgaagaatatacaccacaaagtgtaatatctttgatctcccaccagctgcaatggaagtatccaagtgccactcatttgaattcacctgtacaacataattagttaggttcaaagattttgaataaaaagaattgaaatactcaaagtttaagtacacctaaatgaatacaagcatggacattatatattatgcacactaattttagatataaccatctaaggaatcaaacgaaaattagctagtataatgcttcctatcaaataatgaaaagacacaaggcttagcatacaaagaaaggaagatccttggtactaaaaatgaagctgctccacttgtcatcccagtaagaaaatgaggactttggtgtgtggtataaaacctgatacacagtaaagaacagtgcaatcagactacataattaaaatgacaatctatatgaaaattaaccaaaactgaaaacaaatcaattgaagaatattacttgactttctacgcttatgttggcaataggtcttagagcatcgattacaggggccaagagaatttcttctacacttcgaaaatccctgcaggtacaataaaacccaacaagagaaatttgaagatcactacgagtactttctaactaggtgttcaaccatactagacatttcccataccttatcaatatagttaagagatatttcaccatatcttagaccaagaaaatataactacta

SEQ ID NO: 236743 - DNA, 1256 bp, Cannabis indica
ctcttctctcttctctcttctctattctaaaatttgaatttcctatagtgaagagtaccttgcccgcgcatatcaaatcagtactcaaacttagtgtgaaattttttgaagaattccatcaccctaagaagattcaggttcagatcttgttaatactctgcgtaagaaaggaagaagggttagagatcagaatgaaaggagccataatattccgctaccaccaatgtaaggttttttagaactttatatatgttaatttcgttgttttaggaaactcatatttaggatgtgagattatagaatataatcaaacgtatatgttagtaaatctagatcctattaaaatatcttccaacaagaatccccactaagagatttactccggcctttccttggtgggatgtcttcccttctctcttcatccctaggtaggggttgaaattgttcagtcctgccatatgccaaaaatttgatcatcactgtgttgatggtgggccagtcttgtagggatgcagttggcccttctagctgcgaggtgttcccaatatccttagggcattgaattccctctgtaacatatggactttgttcctaaagaggctcccttatgagtggtggttattccactctggacccagccctttcattgaattttcttatcagttcattcgctgtcctattttggcagttcagctccgcctgatgggcttagaggatcgcagcctcccgatccatccattcttggaattcatgtctctattaagaaaaagcatcgctcataccagcgcgtgtttcttcttatcatggtggaggatatttgtgtggccctaaacctgccctatggcttctctcaacctggctagttcagaatcatcccccaagtcaacatggtgcccgttgatgccaggttggccaacccttgaccaattttctccagcatatacctaggggatatgccttctcaggggaactcctatagtactctgggcaggtcatccagcattggtcggtacatgctcgacacctgtgggatcttgcctgacattgattggacccttgggtctagtcactacaaatgggactgcctaaggtggccgggtaacgttggtcgggttgtcaaggttggtggaacctagacactaggatccacaaccattggatcttaaggctctatggaccgactcctccttgtcaaaaccatagagattaccaggtgatgagatctttgtaagagtttaaactctcaacgaaagcac

SEQ ID NO: 236744 - DNA, 787 bp, Cannabis indica
aaataattcttgtttattaattccatggttactccactaaaaatatggaattgaactcttagtaattatagaattatatttactaagtatcgattgatataatcaattctagtgattagtcttctatgttttaattcgtaattagttttggtcaaattatcgttttacccttctaattacttctttatcttttagtaccattaattcactagtgcaagtataatttagatcccatttaaatttgtgcacaacattccatttctaaaattaacacttaaagggaaccagcattcgatccttaggaaagtcaagattccataattgtaaatcatgctcccagccatccgcactattagcttcccaaaacagaagttgtaagaatcatcttctctaagaaactttaacgagtgaattgaagaaactaataacatgatcagaagttcatgataactcaggatttaggtcgatctactattgatcattgttatgatatgaattaaatatttatgataaatggcatgttaataaagacagcttcattcatatcatttattttcatatataatctctattatatacactctcactttgatgtcatactacatctgtaatctgaattgagattacttgcactgaagaacaggcatcagtgaattgtactagcaactattcattaaagacttcataactttaatatattgctgactgttttatttatagctaagtggtcttagttgtctgtatagctacaagtcataatctcatatatgaataagaaattttttga

SEQ ID NO: 236745 - DNA, 2174 bp, Cannabis indica
aaaccaatatagactcgcatgtcttggctccatcagcttgttatatgatgtccgtataagcgactttaaaaggacgcagacatcctagattcgacttgtctcgaatgcatcctaagcttgggagcttatgcaagaatatgaacagccaactcgcgttataaaagtcgcatacattgatgtacttagtgaattaagctggaaactgttcttcatttattatgtttatgttttttagtttaattattgtaattcaatgtatgaacggattgataatgaatgcaatccttgtgtaaatgataggacacttgctttgtatataaaggagtgatccgccgtgaaatggacaagaaagaatccttgcaacaatggactaagcagaccgtgatctgactgaaccactatactgccttgtgttcattgtatttccagtttttgctaagtatttttgttctcttaatttgaatactcgccattatgggtcgagtactcgcatatattcttcatatcttattattattattattatttatttttggtgttgtaaaatttccttcaataacatttggcgtcgtctgtgggaacgcaatactttcttgatttagaaaaagaatcacaatggctggaaatcaaacaaatggagacgtcaacaatggatcaatcaacattgggacaatgaatgtcccacttccaggaaacagggtacctcccgtcgataccatcaatggtggagtaggatggacgaacataacgccccttaatttgttccctgagactgctgctcacattggggaaacatccagaccagcagccacagtgggacaattcccgcctatcacacctatcgtggtatctgaaggcattgttcaattaaccaccgaccagtacacgacgatacaggatcaaatgcgggctttacaggccgaaatcgacggacagaacaggacacagcgtcctcctcgagtacccactaccctctcggataatccacaagtaactacctctagacgacgaaccaacagtactcgcagggaatgaaggacaggtcaagaggggctcgatctaaatcaaccaatgtcgagagatcaatctgcaagaaacctcaaccgcgaggcacaactgaaagaagatctagaacgttgtaaccctcgcagtagaccccaaccatgaaacgaggagaatgacgctgagttcgactcttcgtcttcacaaagtcgcactcctagcaagtacaccaggtcaggtttggtggaaacaccgcaaggagaaagataccaagttcatatgggtgatcttcgtgatcaccttaacgcagtttttacggcgcgctcccagacgccccagaacgatgaagagcctcatgatccccgtttgggcgatcaaggcataaataatcgcaccaacctgcctaacgcaccagctgcgactactggagttgttatcccctgcgacgactcagggcaatgccgccctaccaggaggtatcattcagggtatacttttacaagctttaaagataatcgagcagcagagaaagcccatatacaagctgcatgggacttctgttgggttttatgccctaaataaaactccatttcaatgtaatctttatctttttagatatcaataaagaaacagaagtattttcatcacttatttgtgtgtcatttggttcacgtttatttgatttataaattcatccaaacctatgtcacatttatattcttgtttattgtgtcgtcagcatagtggaaagtaatcaagattatgtgattaaatatatattcctagatttatcagtacacagggtttaactgatatgtgaatctacaacatagtttacttgcaccttggataagtgctatgttcttttagggcattggttaaagtaaagtttgggttggatgcatggagtatacatcaaaagggaccgatattgaactttgtttcatatatattaaacttactgtaagatctattcaattcaatatcacctagttgattctagatcaaatgatcttaatcctgatatggttaggttcgatctcaggagtattatacatgttttttgatttgttagttatggtagtacaattgagtgggagcgctaaacatagatatggaatctatagcttctatctagcaaatagaagtgaaatgatgatttccttagagct

SEQ ID NO: 236746 - DNA, 1562 bp, Cannabis indica
catttgtggggacaagtgattttagagactgatagtttagtttgtgttcaagccgtgcaaagccaaattactttgtcattatcttttggtcttttagttcatgatgttcgtactcttctcttatccttaaataatattgagttgtattttgtcaaatgatctgcaaacaagctggctcatgttttagctaagaattcttgttcctctacaggtcatgtgcttcagttggaggattgttccaacaaagtgtattctattgtttattaacgattgctagctaataaagttgctaagttttattaaaaaaaataaaattagttaaatatattttttataaataaatttaaaaccaggttaaattttatatatttaaaaatataatataattgtattagatttaattttattattattatttaaattaaaatttaagtaataacaactctaatcaaacgtgcattttaggctactaatacttagtattttatgttactaatacttagtgtgtatatatatacatctatatattagacttttatttaggtttacaaatacaaagttcaaatagttaatgggcttagcattgtatgtgtataaagcctagtggaagtatatatgcgagtttttctagttaactgaagtctttgatgagcaagcctagtctaactctattaatatatattgtctcattacaattgtatacttttcataaccaaataaataaaactacttctgattagagatataagtaagtatacagaattattatcatctattattgtttttctagattatatgcaaatatgtatcttgggtttatttgattttctaacatgtggtattagaatgcctattatatataatttggaacttataattttctcagattaagtactaattatgctattattttatgttaaattttttatgtattgattttaatactttaggggttttattcctcattaaattctcttcttaatgataatttatatgcataaaattattgagtaaattaagagaatttataaattaaagttttaggatttatttaatttcattatgaaattaattttgtatttttgaattttattgattataattttaaatagattgtgcaaatctcattacagactaatctataatgtttttacatgatttaatttttgaattggatgagaaataattacaataattgggttctttttagtttgagtttttggattgaacacaatcaaatcaaacctttttcgccatttatacctaaaattaaaactatagattgattagaaatccaatcccgatccaaaccctttttttccccgtcagtttcacgcgtttaatcgcttgaattttgttccagcccgcctggtagaaaccaggtcgcgtgatccgcttcagaactggctcgaagtagaagatgacccctccccaacgaatcccactctcggcaacagcgaatgggggcacgtgcactgcactttgacgtcatttttaaatgatttttatcccaacatggttaaaatttaatttatgatttttaattaattttttgactccgt

SEQ ID NO: 236747 - DNA, 2620 bp, Cannabis indica
tttacatttttacgtttaaagttttatttttacatttttacagttctataaaattacaagaaaacaacaacagaaaaattaaataaaagtatcaaaaaaataatatcgaaataataacaaaacaacacaaaaaaataatatataaataataaacaattaacaacaaaataataagagtaaaacataaaaaaatcgtattttatgtaaataaatttgaaaaactataaaaatattaaaaaatttgtacgtagagactatatttttgtaatttttctttttttttcttttcattatcaatgaaaagacattttttctaaaaaaaaattaaatttcatcatctatatatccccatttcttttgttgttaattaacataataatttatttagttcggtgttaaataatttagttaatttgttggatttcgaagtctgctgattaaaagagtcctaacatccaataaaaagtaaatccgtaacacatttactccctctatatatataaattccaaccatatatcatagcaaaagtaaccataaggtataagcaaattaataactaaatctatcatccatgagctgggtatgaaaagtttataaataattattaaatacgttatacgtatatattataatatagtgtatatttttcaagacatgtggaacacattaattaaggagactcgaagaggaaaagcaatgccccgtgaccaaaaaaatcacttttaacattcaacgactggctaatgaaaaaatacattaatattttttttttaattagctagattgagttggttttattaatacaaagtatggttttatattatatttatttaaatccgaaaaaaacaaggtaccaccatctggttcccactacacctgatgtcaacttttacacacaggtcacgagccaccacacgaactcgttgtcctacgtggcaacacatatcgaaacgacgtcatttgtcttaggtttttctttagaattagaaagttcagaagttgaccataaggtcaaacagaaagtggggcccgcacattatctgacatggacaagagcttaggggtccacggtgacagaaccacgtgtgttgccagagtggcttttgttcagaacgaggcgaatgtgtgtcagatgctacggagcacgtgacattcacacgcgttgtaaagcagcagccttgtacctatttacactgaccataaatgctattactgattttattttatttctgattttattttattttttttgctgaataaatggggctattattgattgaatgattctctttttctctaattcaaacacttggagcacttcatttattattctgctttcaggagaccatgatgtccatttactaaattaccactccttaattcaagatttttacgataaacattaatgagcagcatttataattatggttcaccaagagcattcttattaatgagaaaaatagaaattttaatataattagatgataatacatcactcgaattaagaaaaaggacaaataaattgtcagtgttgaaacatcaaataattgtgaagaatactatatttttcatccaaataaatacgtaataaattaatcacacttataaatgacaatcagttaaagattttttaataaaaattaagtgataacaattctattattcaatctagctagaataaaatgaaataaggaatcaatcaaccacaataataacaatcataacaaataatcacatcataattatgttactaacacaaatttacttttaaccaattgaaattctcacaatatcctgtcataaattaataaagtcctacaactataataatagcaaggtggtaaagtaacatcattattaaaaataaaaataaacataaaaaaaaaacaaaacttatagctactagaaataacatacttataaaaagattaataccaatgaaattttaatccaaagcgaatgagtaaatcattgaaatttacctttgaagaaaaaagatggagaagaaaagaagagatggcaacaactttagcgaagtcgaaaataatgtgggaatagattagaccagagccacgtcgtaaagtcgagaaacggtcagcgagtctggtcaggcaaaaaaatcaaacaacaactaataacttctaaagaaaaactctaagggaataaagaaaaaatcaaaatgtgctaaggattacagtattaatatattattattcgtacaattagttatcgatcctacaattttaattagaagaataatgagattattttttttagggtaaatactatttttagaccatatgtttttgcaaaagttactgattagaccctctatttcgttaaatggaaaaatagatttgcattttccaaaatagtaaaaataggaccctgagcttaatttttaacatcttttttttttagtataaccaacttgaagacaatttttaatacgaacaaatatataaaatgtaattagttttgtcataacacttttaaatcagattattattaaattttgttttgacaaaaaatcagttcatggttctatttgtacaattttagaaaatatagggtccattttgtcgtttaacaaaacagaaggtccaattggtaactttt

SEQ ID NO: 236748 - DNA, 2101 bp, Cannabis indica
caaaattaaaaaatcatatttatctgtgtgtcgtatttttttagtttttatattcgtgcttgcttgtcgtgctttcgggcttgtcgtgccgtgtcgtgcttaagcccatttttttcgtgtcgtgtcgtgctaatttgtagcatcgtgccgtgtcgtgctcaagcccatattttttcgtgtcagatcgcgctcgtgcctctcagactcgtgtcggtttcgtgtcgtgtcaaaaagcctagtccatatttacatcactaataatgacacatgtaaataattctaggtaaccggttccacaacatctgagctcaaaaattgtagaaccaaggggcaaaataatcctaagggcataaaggtagttttactttcatagtaacaataaaactaacaaagtgatgtggcgggaatagtttaaaacgcatcgcttcactaagggaaaaggcagaagatcaagcgaatcagagcttagaagacatgtcagagctcgaatagtggagaaagtagaatttaaagagcatagcaaaaaagggaagtgtacgagaaaataagaaggacgagtccacatggatcaatccgaacagaggaaagatgtggcttaacatccattcccacctataaatagggaacttcatcgttcaaaaataattacgaattcttaagcacactagatcaatcaaagctctatcagaatacatctctcacatactcatcagcttaggaacaagaaacaccccaacaaaccagaaaagaattatcaaaaactttagaaaaattgtgtaaactaatagagttacaattttatgattggattaatcatagtgtaagaattcgaaattgaaatgcaaatttgctgttgaaccaattttcagcatcaaaaaatcttaactcaaatatagaataggaaatattttattagattagtactctaactctctataattaagcttaaatatcctaatcaataaaataataataagtaatgttccacacattccactcaatcatttaattagttatgtagaccgacattcataccaactcaatcatatggctttacttttctcaaggtcggccgatccatgaagaataatatataaatacaaaatagtagatgtagttttgcttaattaaaacttagaattaattaagtatcatcaccaatttaataattgcaatataagtactatattaagatattttatgcttaaataaaatgtatactataaataaattaggagaagaaactataaaaagcaatagtgctgccctcttttctctttaattatattattaataatttaggttgattgtaacactaaatgtatcattttgtgattgattagtgataaattattatattaaaatatatgagatctctaaatagatcaataacaatattgacacgtataagatggtgttggtaatatattaaacatttctaatatatataattgagttgttggaaaaaaataaataaagaactatatattataagtcgtaagagaaaaatatacgttctaaggtcaactaataaatatatatttattatatgcagtagtattaattatatcgtaatacaatgaatgagtcccttcgtaataaaaactttgttactttaaaatgagaaagcctccatttctgcatcatgtgatctcacaagaaaaaatgatctgttaaaaataaataaataaattataaataataagtacatatatataggggttaacactattaaaaatgcttgcgtggcatattctaattggtctaaatttggttgttttaattgattatatatattttgttctaagtgtggtaaataccaagcaaagctagctacctatatatattgccttgtcttaaggcataatcgatcaatattacacatgcaatattagccgcctagctatatatttattcttatatattattattgggtgtttttataatatacaacttctaaaaaaaaaaaaaaaattgacaccgatcattttggcatttgaaaaaaaattatctaatttttttataatcttataagttatacttatttaaggtattactgtaaaattttgagaaatctagaataatctataatataaaaatt

SEQ ID NO: 236749 - DNA, 1926 bp, Cannabis indica
ttgttgtgttttgttttcattgaagtgttctaaagtttgaattatgtttattgagctgatttgaagctggttggttgcttaatttggttgttagacaaagtttgagttatataactcaaactttggtctttaatggtagattttgattctgagcttgtttagttgttttattgctttgaatatgtttataatggtatatttagccgctctagaaggttttgttgagtttggggttgaattgagagagtagtgaaattttgaagttttcctgcactaaaccggtcgaccattccagtgggacctgtaggaaccggaattccggttggcccccaagaaacctcacagaaccggaattccagttggggaaccggtctatcggttgggaaagttttgggaaccctagtttttcccgtgtttgcgatatttagggcatcgccatgttgtttatcgataggaaaacttttagtttcaagttttagtccccagaaagtgattcatcgtgtcactcaccagttttacgaataatgtcatttaggggcctgtaatttgttgagcagctattccacttgggttggccggcacacctgaattcgaaaataaggtaagattagtataattatatgcatatgcatttacatgtttagtgtgcatgttagttaatcctgttagattatattataatagtgatattagtatgtttagtattatattggatatcgataaatgtatgttggattaagtactattcgacaatatcacatcggtacgactagagtacgactagcgtatcgagtataggctgatatcatggttgatggtactgtactacttgacagtatcacatcggtatggctagagtacgactagtgtatcgagtataggctgatattatggtcagtagtactatcgtacgaacgttctaaactcaacaccgtgttggacacggcgataggattatggttgagtgtatgggcgcctgattataatccgggttattgctatgttattgtttatgctattcttactgagtctgtcgactcacagatattatttggatgtgtaagtaagcgcaaggctaaggttgatcagccgtgagagcgagcaaatggagattgtacatatcggggcggttaggcctagagcgtacgatctttggaacagcagggcttattttgtatagtcgctaggcgacaaacttttgtaacttgtattatgagacggttgtaaatattttgtaaaatgggatcccagattattataagtatattattttagtgttaataattaaataagtaaaattttaataaataacgattttcaataaactcgttgattagaaatgaacagcacagttaagttaaaaaatcacgttaacatgcctaatctagtagggtgtttacaatttggtatcagagccgcccagttatcttttgaagacatcatcacgacatgtacaatcatcatcagcgatcagctcgtctcacggttcagtaagcctttattgctttagtagtttaatttttatagtatgagtttaagtaaatcctgataggaagcatgttagtagcctaatagctgaatagccgcatgtttttaatttccaaaataagcggtaactagcaagttattcttgatcgtgatctgactagactagctcttggttacgcaagttattctagtactatggacgctaggcgaaataaaaggattcagggtagctcggtccggatgcagtggtagtgagggagttcagattcgcccaaatgttcctggccgaggcacaggccctagaggcagggcacgtggtcggggtgatgttagccagtcgtaggctgcccaagctgcctaggaatgggaaaattgatttgtcgaaatgtaagccagaattaatgagcaagatgaagaaatcagacgcttgagacagca

SEQ ID NO: 236750 - DNA, 922 bp, Cannabis indica
gccaacatctccttttctatagtagcataatttaattgggaatcattcaaggttctactagcatagtagatagtacaaaaaatcttgtcaaccctttgtcccaacacagctctgatggcataatcactggcgtcagacataatctaaaatggcaactcccaatttagtgtagtgacaataggtgaagaaagtagtttttccttgagagtttgaaaggcttctaagcattccttcccaaactcaaaaggcactccattagcatgtaagttggacaaagattttaagatcttggagaagtccttgataaaccttcgatataaagcaacatgacccaggaaagtacaaactcccttgactgacactagaggggataagttgtcaattgtagacaccttagctttatcaacctcaatgcctctttttcagattttatgtcgtagtactatctcctctttcaccatgaagtggcacttctcctaatttaacaccatattagattcttcaaatctcatcaacaccaattttaagttactcgaacaactatcaaatgaagactcaaacactgagaagtcatccttaaaattctctatggaattcttaatcaaagaaaaaaaatagccatcatacacctttggaatgttccaagacattacacaactcaaatggcattcttcgaaaagtaaaagtgccatacggatatgtaaatgccatcttctctaggtcctttggtgcaatatctatttagtgataccttgagtggccatataggaaacagtaatactcttgacccgccaatctgtccaacatctgatcaataaatggaagaggaagtcatcttttctggtggccttgttgagcctttggtaacctatgcaaattctccacccattcacaatcctggttggaatcaactcattctttt

SEQ ID NO: 236751 - DNA, 972 bp, Cannabis indica
gattctacttagttgagtattctgtcctcttcaattgttcatgataaagcatctcagcctatccctcagtaccatagtcatcatcttttcaattccaattttgatttttctttgtggcacagcaggcttggccaccctgctaccaaaattgtaaaaatggccttgtcaaaatgtaatataccgttgtctaataattttttttatgtgtgccaatcttgctgtcttggaaaatctcacaaattgtcattttctcactccaatactacttatactaaaccattacagctactccattcagatctatagggacctgcacccattaattcattcaatggttatagatattatattatctttgtagatgcatattcaagatatacctgactttatcttcttagaactcgtgatgaggctttgcctacattcacaaaatttaaggctcaagttgaattacaattgggtcttaagatcaaaacacttcagtcagattagggggtgagtttagagcttttactaatcttcttgagagttcaggcatagtgcatagacttgcatgtcctcacactcatgttattttcttcattaatcaatgaatataaagtactctttctttcaatctctctctctctattctagtcttaaaccttagaggggttttatctattattttgttaatgtttaagtttttgcaagaattttgttttcctagatgtttgttttgtttctcactttgtaaactctgttgcgaatgcgctggccagttgggcccattgtgctaagggtaagtctgagggatgcttaaaggaagtggccccgttatggctactagtttgttttagttttgtgtttggcaataaaattagttacttataaaaaaaacaataaggaaggaatactactaaataaagtgtgggtaactcaattatacattataaaaatatgagtgtttattggatcacatctaatattttt

SEQ ID NO: 236752 - DNA, 616 bp, Cannabis indica
tttttttttatttttactaaaagtctatttttattctttttcatatatatatatatattattttattattaatataattaaattaagtataaattatatataaaaattaaattaaacagttaaataaatacacatttacattagtttaagtgtttgtatatagtttttgtttgttaaaattttttgttttataatatatgtttgtattttttaatatcctttttataatttttaaagttatattttgtataataattagtatattaaataataaataatatgtaatattttaatttttctgtaatttaatattttatacatttaaattttatagtataggtttgtatttctttcctagtatattagtatcatttttataattctttaaaactcttcaagggtattcatctgtaattgttctctagggtgcacttaacaactcaaacttgtacttcatcattttaatggaaaagataactcagacgagtaacagaaattgtaggcacttgatttgcccgaacctgtataaaaatcttgtattctttactttagttatctactatttttcttttccagttaattttctagtttgattgtttatttgtaacatatatat

SEQ ID NO: 236753 - DNA, 1244 bp, Cannabis indica
tgaagaatccaatcaactgaaggagaatcgagcgaaatcttggtgatactctgctacaaaaaggatacaagggttagagatctaagcggaaggagtcatttaatttagttgcaaccaatgtaaggtttcttaaactttatatgtgtttaaattacattgttttagaaattcatatttaggatgttaaatagcatacatggtagtaaatctaaatccgggtaaaataattcccaacaggaagatcttgagaaagctgaggctaatgctgagaagcttaaagaggaaaattctctgttggaagagaggttatctgagctgaggcggagcatcaagaggccctgaagcgttcattggtggttgccctttctgagctttggaaaatcaataagaatgtcttggacatgctgggacaagtagaaagagaaacgctcctacaacagatcttgaaacttgacgctggagagaaagtttccagagataatgataaggatattcatgagatcactcttccagatagtacaaatccaaaagactcttctcttctagctacagaggatgctacagctgttgaagttctgtctgatgctcatatcaacttaacctatcaagtagacaatctggcccaaccttaaatctatcttccaatatacttgataacttatttttgaatttatggtttgggagacatgggtcccctttttatctctggggagacaatgtatgtgtccttgccacaggcttttaaatgtaaatattgtaactcctttatattttacttatttacagtctaaattcatcaagtatttgttgaatcttgaatgaatttaatttgctaagttaatcttatttcctagttccttgaagttctaattcctatggtcagaactttaggacttcaaacttttttcttagactttaaatttcccttaataaattacttgtttttctaaatttttagaacatggttccaacagcctggaccttggcatttaaataatttattttagaaattttttgttaaaaatacaatcttaaacatataaatataaatataatttcaagttatcgccaaaataagaaataaagagatactaaaagtaaatgctagagtactaaaaaatattattttttgtgctacaatttcttggcgcaaatatgataagcctaaaaggactccttgtgtatcagagaagaattaattcttctttctttgttattgggcttttaattagttcttttatttg

SEQ ID NO: 236754 - DNA, 2636 bp, Cannabis indica
aggttcacgcaaccatgcgttttcgaatcggaattggtgtgctgaagcgaatagttgctgaactgaaggttgtagtagcagtgggcaatggtctgaagcagtgatttcgaggttaaaaagttgagctgaagggaaaaaatctgaccaattatgagtgaccaaagctctatcgagtcggacttcgatcaaattagtggttcctcttccacgttcccatgtataaggatacccaataagatcaagatcgactaaattgcaatccgagagggtttaattaaagccatcgattaagcgttgcggataattgttgcctcctcttttgtcattgtggcttgtaacattgtttagatctcctataatgcaccaggggagtgtcgaaagttgcttcaggtgtcgaatgagattccatgttcggtggcgttgttctctgttaggttctccatacaaaccggtgagtctccatggtactgactgaggcgcatcaatttgaagatcaataaagttgacagaatagtgtaacaattggacttcagcactatttttccaaagcatggcaatacctccactatgacctcttgcgtctatcgaatacataccttcaaagcccactttcactctaaatttctcaatgacagaattgttacttaaagtttcacaaagaaaaatgaaattgggtctcttttgggccacaaggtccacaaggaattgaagggtccatgggttcccaagcccacggcaattccagcttaaaatactcataatgagcggtgggcctgggaaccagaacccaccaataagtcgttttttgagcccacttgagaattgggtctctgtatggtattttcactagcatcctcttgcataacttcatgaaaaggcccatcaaaatttcctttgtgtgactcagcatgagtcggatcacttgggacagtgatatcctccaatctcgtgcgtctccttttagaatcagtgatcacactatcctccatttcctcctcaagatcttccaactgtatgatttttgaattaatggaattatttccatttataggcctcattgtaattgcagattccattactccttttgatttgccaagattgatactaggtcgagtaaatgccccatgatttcctgcggctggttccttaatcagtggagattgattggtgtctgaagtcttgttcacaccagtgggagttcgaatggaattttctggttcatcttcatcgccgttctgcagccactgacttccaataaggttatgcctacgccgtggttgagctcgcatccatgctccataaggttgagaaagttggtctgctggagtgtcgaaacgttgtgggcagagtctttcggagtgtccgagtataccacacacgaagcagaaagttgggaggaattcgtatttaaacatagcccagaaaccttcgtctcccgctgtacgtcgtagcttcattctccttttcaggggagtagtcacgttaagagtaactctgacccgcaagtaatctctccaaatgcctctgaagttcttcggatcggattcaacatatgtaccgataaaattgcctgctcgttgaagaacaatatcagatttgaagccatactggaggccatgaacttgtacccatatgtcaagggagttgatgggcactagtctcggatcatctgctggtttgagctttgtaaaaacaaactgaatacgattaaaggtccacggacttccttctataacacggttcaaatctaattcatgatagaattgaaataagaatctattagattcaagttgtttcacgtacattcgtatttaaacatagcccagaaacctttgcccggttgtttcaggttgactattttttttagttttgttttttttggtttttttgtcttgtttggctccaatataaagtttatataatctttttttaacaaatatataatttatatatttaaatacatgtttagaactttctttaagaaaacaaattgttttaaaaaaataaacatactttcaagatgagtagattttcattaaatgttcgatctaaaaaataacggaaaattctaacaaaactatgagtaacctgttagtaaaacgataaataaacaaaagagagacttcgctcaaacaattaaacaaatgtctagagtcgttaacaagtaatccaaaaggagagtttatcatcagttgactgcaaatagctttaactgccactaaacaatcagtcttgagcaccacctattctccgtccttaatctaactaagagcctccctgatgcttataatttcagccaactcaagtttcacatcccaccacagcaaatggtatgagcttcaacaaaattgtcttgatgatcacgagctaccatgccaattccaaattgatgagccgcaacaatgtggtgtcaatatttatctttattttgttcacttgaggctttacttaaatctaggtaccaatttgtgcacaccactaggcagtagtttatagttatcatttcatttgggcattctttcattcttcaagatacaaagatatagggttgctgaagtaaccacatcattcacacttagaattttcttactctaaagaattcatttcaagcttgccaaatagcccaatatatcaca

SEQ ID NO: 236755 - DNA, 1732 bp, Cannabis indica
aaaaaggggaaactttattcaaaaagacaagcaatacacacaaaggcaaaaagccaaacaaaagaaccagcagctgccgaaaccagaaagaggcagcagccacccaaactaccaactgttaattacatttaaaaaatacatattcttcctgcaatcctcaaacggacccttacccaataacctcatctgaacaattttacgcacatccaaactaactcttctaggggcggcacaacaaagataaaaaacacagcagtttctattcatccagactgagtacaaagtcgctgcaatgactgtattcagcaccctcatttgaggctgctggttcagatttttgcaccagttcagcagctccacgtgagttcttggccaagagaagcagcccaaccactccatgacagcacctatgacctgtttggtgaaaatacaattgaaaaaaaggtgttcatgcgtctcaacttcagcttcacaaacaggacaatgaacattttgaatagaaagaattcggccaaggtaatctcgggtcagcaattgggagttcaaaatttgccaaaaaataaatctatgtttcggcactatgagtttatcccagctagctttagcatagtctgccttagccacttcaatagacaagttatagtaccttttggcgctgaacttaccacctttgacagcttgactaagtcttgcttcatccaagttgtctcgtaagttcaaaatcttcttgaagtaccaacaatcatcaaacttcattgtgtaactccatatgtcttgattcctcagataaatcgaattaatccatttgacccaaagacaatcttgtttactagcaagagcccacaaatttttagccaacaaggctttattccacttcttcccctctcgaaaaccaattccaccaaggtttttgggaagacacaccttctcccaagaagctcggtggaatttacttctattccccgaagaaccccacaaaaagtctcgacaactcttgtcaatagctgctgttatcttagagggaatgataaaaattcccatccagtaatttcttatcccaagcaaaaccgagtgaattaattgagcacgacccgcgaaagagagatttctacttgcccaacaattgaggttcttgttaagcttatctaagataacaccacagtcttcagccttccatttagtaggcctgaggttgaccccaaggtacttgaggggaaatcccccttcttctatcttcacacactccaaaatcttggattttatctctgctttaacacctccaaagtaaatgtgagattttgaagtgttggccgacaaacccgtggcattgcaaaacttcacaaaagcttcatgagtgagccttatcgaattaagatttcccttgcaaaagataaccagatcatctgcaaagcacagattaatcaagcgaagagtcttacacatagggtgaaagccaaaacctttttcattcgagtattgtcgaagcagccttgtgagataatccatgatcattacaaacaataaaggggacatcgggtctccttggcgaagccctttcttccctttgaagctaccctagattcttccgtttaaaaggatatggtagttggttcccttcagacaagtcatgacccaactgatgaagcgagaagggaagcagagcattctgagtaaatcattcacaaaatcctagtcaaccgtatcataggcctgttgggttttatgccttaaa

SEQ ID NO: 236756 - DNA, 989 bp, Cannabis indica
agattttctggaggcaaaagtcaagagttaaatggctgcaacagggagatagctgcactaaatttttcatggcaacaactgttatcagaagaagaagaaacttcattcaagagctacgaatggatgatggtacttgggaaagagatcctaaaaacattgctaaaatgttcattatgaaatttaacaacatcttcgtcgataagagaacgtctgttctccttacactgaaatgcctcgatggatgtcatatctcgccccaagataatgaacgtctgaaagctatccctacggagagggaaattgaaatgtgtattcgatatatggggcaagaaagagctcctgaacctgatggaatatccacgggtttctacctgcagcattggcctacggttaaaagagatgtgttcgacatggccacacactttttcagaaattttgagcttccacagttcataaacaacacgatcattgtgttaatacaaaagaaagagtgcccaagcggtgtcaatgattacagaccaatcgcactatgtaatgttgcctacaaatgcatctccaaaatattagcgctagatgatgactctaataaagattttgttgaaccaacaacgaaacccatcatggttctttgaagaaaaaattacaaaggaaagagttagattcctgaagttaagatggggaagaagcatgtggatcaaattcctaaggtttggtttcaatttcttttcaattttgccctaattttgaaatgttgtctttgttttatttagtgttttttcttataattttgggtatagggttttatatattttatttatcttgttattttcttagtgataggctttattgaatttagaatattgttagatttaggttatttttagttttttttggtctataaaatagttgtttattgatgtatttatttctattcaaattttaaactttattttgtaattgaatatttgttactgttttttttttattta

SEQ ID NO: 236757 - DNA, 1017 bp, Cannabis indica
gtaaggagatgcgacaattatgcaatgacttgggaattaaaaaagcattctctacagttgcttacccgcaaagcaatggacaaactgaagcagtcaataaaataataaagcacaccatcaaaggaaaactcgaacagcgtaagggggtatggccagacgaacttctgcaagttctatggtcatacaacacgactcctcgatccacgactggtgagactcctatctcgctttcctatggatgggaggccatagtaccagtcgagattggggcaggttccttacgaagagatgttttcaacatttcaaaaaacgaagaaaaagagtcgctctacctcgaacttctggaagaaaagcgcgatcaggcacacttgaaaaatgcgacttaccagcaacaaaccgcaagatatttcaattccaaggtcaaggcaagagtcctgcgaataggagacttggtccttcgaagagtaatgccaaataccaagaacccagcacatggggtcttcggggataattgggagggaacatatctcatcccagaaaaaattagtgacgctacgtaccgactcgcagaactcgatggtactgcgattcaaagggcttagaatggcgagagcctaaaattctattatcatagtactcacattttctagtttatacttgccttgtatttatacttagtaattttttgtaaaaaaaaatcctaagtatagggggtatataccatgatgtactattgactatataaagcaatttttttcaagtttttcaagtttgaaatttttcacgtttctgaaattttctacttattgcaccaagttgtaattaaagtactcgtgtattgcgaaaatactgtaaatagatatccccgcgaggatatgaagtcgttcaaaataagcataaatgtaaattcgtctaagtacaaggtgcgagtacccttgtaccgtatgaacaaaaaaaaagatagagtttaacgcaagcaaatattaagggaaaagtcaagcatttggagcagtagga

SEQ ID NO: 236758 - DNA, 982 bp, Cannabis indica
gacttacattgtttactaccccaaaaatcaacaaggagcactgttcgttcaacatatccaaagttcaactcgacgtgagtcaagtaaagtaactgtgccaaacaaacaatgtattagtaatagattcaactaataaatcaaaaaattaaaatatcaagttaataaacacattcacataaattaaagagaacaaaatcaatgtacctgcatgaatatggtgcagccagacacattcttcgtatgcttattttggaatctaaaaacgaagttcatcagatacctgaacccagtagtttcccaattcttgtggtgaatgtccctagtaatcaatagggaatgtaggtaccccgacaccacatcgcagcccgtttttggcactaggattgtccctatcaccaccaaacaaagcttaatcaaaaataggttgtctacctcaacgcattctaacaaagatttctccaatgtgtcaacgacacggtgtagtcgacaacgttcaatatctcttccagataccgagtgtcgctatcaccctcgatgattacaggatcacctccatcctccacacccataacatctccaaacatggcggcagacaagtggatctttttactatacaaatccagtatgctagtgattgggtcaacatctttgattaaccaactcactagttgggtgttaatgtatgggccatcctctctaatgaatgatccaaatccagcattgaggatcacatcattttactctaagtttaggtttttgcaaataaaattaaacggttgaaggagcattgaccgtacactgacgcttcttcaatttcaatgacaacctcttcctcttccacctccaccttcttccccttaccctccactacctttgctttcctccttcttgtttgaacttgcttcttggcaggagttgggttagggtcatactttctccactcagtcttttcatcatcgatgaaacctttaaattttgcttt

SEQ ID NO: 236759 - DNA, 1554 bp, Cannabis indica
ttagtacacaaaatatatattaaaaattaataaagcaaaaaaaaaatattatactgtgatctatagtaccattggaaatgatttaatgccaatttactttacttttgatattttatcgttgctattagagttggcctaactctttagagtaatattatatttattatatttaattatatgagactcaatacttaattatactaataataatatgataccgagaaaaatattagacacataccttttaacatttatcttttgaaaatttcaaaatcaaaatacaataaatttatatgttagttcaaatttacttactctaatttagagttatattattctattttacttaggagctttactttcaataatgtgacctaatcaaataatggagttgtctaaaagggttggggaatgtacttagaaatatacaattaattaatagtttgattatgtaaaattatatgagaacatttgtgtcagaataaactaataataataatgataataatttataagcaactaatgaattattaggttgaggaacgtgctaataatgtatttaataatataatttcgtccatatgtatcactattaattaattattttgaaggagctagcttgtaggatagggtttccactaaataatatggcctaattatataatataaattaattaagatgttaaatgttggtgtatgtgcttataaataattaatcgtacattgattcagtaaaaataaataaataaataaatacataaacttgaatttttttataccttagtctcctttaacgttctactagggttgataaaatggatcagatacgataacaagattcaaatctcgcacgagaattagtgagtttggatttgccttaaatgagtttgggtcgtgttctggttaactcatctaactcgtttaattaacggcttaagtttgggttaacacaactaatatgaaaatgactctttaatgacttatttaaagttattttaatactttaatatatcattaatgagttaaaatcgcgttgaatacttcataaatgtattgttgacatatttaaataaaatatgcttataaacggggtaaacgggtcgtctcgtgtcaattcatttataaacgggtcaaatttggattttattttttgccacaattattaaagggatcgtgttcggatcaagcatatacctattatacatggatctcgacatgacacgaatacgacccgtgaacacaagttgccacccttgcttagagattttttttgaaatgacccttgcttagagaattaagtgtaagtaaaacgataattgtgagggtctaaccgccaaattgtcaagtgcagaaagtatagtttccgcaactgaaaaattggtggtcccaaaatatttatcctccttattgagcttatgaaaatcaagacgatctgcgatctcttgttgaatgctttggcttgcattactagagaaaatataggcaaatttttgaacattcaaacgatgttgcccgaaaagactggcagataacaataattagacaaaaaattta

SEQ ID NO: 236760 - DNA, 1412 bp, Cannabis indica
tttaagtcttataaacaaagttacttcttttcagtcaatgaagttgccatatttcctgaagttcaagaagaacatagcaaggaaaggacccacttgaataatgttgtgggggaattcttggttgttagggtgcctaaataattgatctaccctatcaatgtaatccttcattagatatctacgaggatccaggcttaggaaaaaattgtcgaaaccccctttatctaccaacgacatctgagataggctgagggtacaaattatgtagaaggatagtttacatcttcttgaattactcattctggaagtgctcgcatccagatacactgcctggaacctagctttaatttcctcttcttttgtgaggcatttgggatgatgaatattccaggcagcggcagaagctcctcgtccttggctgcttttgttatcacaactgacagttccaaagcagtttgctctttgatgttgctagggttttgaggttgacccctctctttaattctgtgaatgcgttggaatgtggcaatgaggccatattggcacagtaacttggtagttagcaggccctctatccttagctcttcctttgagtagggatcgtagaaagtaatctgctacctcgtaagcactgtttgggaacagaatctacaagaaacaagctagagtcaaaccctaaaatggaggcatctttcaatctatcagggaaattaaccaaggagattataccttggattttgaagtccagggagagtgctagaacacactccatgagaaagccagttgtgaaaaaccagtactcatggtggtctgagcaatagcaagaagtgctcgtggggcactgagcatgtctgtacttctgaaggcaataaaagccaatctttttgggataccctcccataggttgaaatttgaactcgtagaagtacaatatctcttttggagtcggtgcaggttgaccctatgacctgcagaatacaaaccacccaacaagtagtttatacacgactaacaagagctgaaagggagcgattccaggtttgacataaaattgagcaaagtaagctctaagcaggaggtgggctccataggatatatgggcccaactccaagctttaaaaccatccacactttaggacgctgattctcaaagaatggacattaagtgccacaagagtctaagaatgttttgtactcctccatcaattgagtatgcttccattagactgtaatttcttagtgttgggttttgtgccctaaataaaactcatttcaatataatcagatttacttattaataaagaccagaaatagcattttatgttgcatggttcacatgatttaattcatgataatatgcatataatgtatgaattctattaagtccaaaacatatgaatttattaatgatt

SEQ ID NO: 236761 - DNA, 594 bp, Cannabis indica
tgtcatgaagttcatgaaggttaaaggcttagaatactttctctaaaataaagatttttataaaagtttaaaaaactgtactaaaaataatgctataacaaatgctctaaatatttttatcattttaaagtttctttaaaatacattatttatgctttatgtttatggattactattcattgctttaaatatattttattaattatttttgtatggagatatatattaatattatatatttaaaatgaataaaatataataaaattttaaaaaaatagagttttaatgataaattttaaagaaattaatgtatggtgtaatgtagaagtgtgctgtaaaatggaaaaaaaaaataaagttttaataatgtattttaaatgatggagtaaaaaagctggtaggagtattcttaacttcttaatttgctccaatttctttcccagcaacaagaaaaactactacacgagatattaatgtaaaaacaaaatcttttttaaaaaatgcaaggtacttctacattgcactatagtaaaatgagtgcactgacgcaaatcttaactatttcgacatctagaataattttttagttcaatt

SEQ ID NO: 236762 - DNA, 567 bp, Cannabis indica
ttcatatttaggatgtttaaacaacatacttgtgagtagatctaagatcctggtaaaataaattccaacactcctcaaatgggggttattttatctgatgaggaactctatttcctcattcagattggtgcacttgtcagtgtcatgaccataatctttgtgcaatcggcaaaacttgttcatgtatcatttaataatatcctttctcatgggataaggcttacgatatggcaccactgaatgagttgtattgttgatgttttctctcatgtcaaggaggatgttgtaggtagtgaaccttgcagttggatcctgtttggctggctcgggggtattctttggccacttactatcgttgttattgttaacaccattaccattattatccctcttgccattgttgaagccattcttaccattaccaccctgagtgtaacgccctattccataaggacgccacatgtgtgattttataaactaatttaatactcatagattaattaattattaaaaacttgattgaaacaaaagactgaaaacgaatattataatagcataaaaagcgtg

SEQ ID NO: 236763 - DNA, 919 bp, Cannabis indica
agttaaaactttcttaaaaacaactgtactttaaagtttacaatcgagatcccgtttctaataaaaaatacatatgcatactgtaatattttgagaatgtcatctaacaaaaaaaatctagttacgctagctgatctctcatagatctcaacccttcgggtctagtcgttcagatatgtacaatcttcattgtagctctcaaaccactgccgatcagttttctttcacataacctacacaaagcaaagaaactatgagttgaaaaacttaataagaaaaccatgcataatacgatcatataactgacttgtaactgagcatcaatacactcgattaccataagtctactaacctcatccaatgtgtatattgagattcgaatgtttgtacatgtagtatgattaaccataataccaatctaatttcagtactctagtcgtacttttgttggtagcattaatcgatactatttgataccatctaacatcactagatatcaatatctaaataaaactttatgtacatgtatattgatatctctagtacactaggttaacagtatcataaaatatgtctaactaaacatgtgcatctgaatacttttcttacctagtatccatagttatgtgtgtcggcaaacttgagtggaaatatgttcaacgatcagaggccctaagtcacattagtggtaaattagtacgtaagtgtctcactaaaacactttatgggactataattcatctgaagttttcttatcaataaataatgtggcaataccctaaatggtaattccatatttgtcttataaatatgacaaattttatgtgttaatattttgaaattgattctttgaactgttgattaacgtgattttattttgttaagagaattgatggttaatcatacatttggaactgtt

SEQ ID NO: 236764 - DNA, 1317 bp, Cannabis indica
ttttggacaacaactacatcaaaaaatctattgatatttgtgagactaaactagctaaccgtgataatccaaaaattaaggctacaggagcactcatggcattgactgattggaggaatttggggttagtttcggatgagttcggatcaggatggaatgttgagaacgtgacatcgttgccatgggactgttttgggtcagtagatttgtgcacctttttgcctgctccaaaatctgatccttccttaaaaggtggagttgggatattggtctctcttccgaggctagccatgcccaagttcaagcaagagattgatactcttaactaattaactattgtacttaatttgaatattgatttatttattaaatattgtttggttttcccatttgaagagcgaattatatacagctttactccttcattacaatttacatttgcaagataaattaatgtaactactttggtgaatatcaaatatttcgaatacataaaagaatataaagtgaatttgtaaaaattaaatgaagtttggtagtgctgtgtttctagtttaattataattatttttttttttcaaaaaaagattgaaaaatttatatatataattgggtctgggccaacttttatataagtcccatgtcataaatattcttcagacaaaaaaagtgaagtcatcattcaatcataatactcttagagcactctcatcgtcaacttgctttataatatctaaaataaaaaaaaaaatagaaaaataattaaaagtcttaaaatctatatgtggacgaaaacttataaaaatactaacttttggtattataaagtaaactttttttttttgaatgaaaagatccaaaagagttacaaagggagaggataagggtcttggctattccaacaccatgtgttatctaatcctaatgacatttgtgccaaattatgagctcctgtattcccttgtcttcgaatatggtgaagggacacagtgggaagcaaaaataacacccgtcgaatagcattaattatggctccatagcttgagagaatatcgtcagatgattgtagatcagtgagaaggtttttacagtccacttcgacatagttaatgttaattccgttctcaaagctctatctaagtccttctaacaaagcccatccttcaactgctttggcactacaagaattcccaccaatagcggcgggcctattagcggcggagcccctgcttggccgctagttgggggcagttattttttttttttaaatattaatagcggcgggctgtccgccgctaatgcccgccgctattacta

SEQ ID NO: 236765 - DNA, 1145 bp, Cannabis indica
gtttgacaaaacatgtttatgctcttggatgataattagcttaggatcttgtactttttatacttttgaggttgtgttaaaagattcatgttactttttatgtgctattgggattgtctaaagtacttttacaaagttgagcgattcttgtttcagtttcttgtcaggccccttgcttgaataaagctagccatactgaggtgtgaaagccatcttttgagtaagctagaaatttgtaattaagtgttatgaagaggatgcactaccatagaaaatggctaccttcagtattgtgtgataatatccaattgtgggatcaaattgaaaaatgcgaaaaaataaaaatcttgccaatgtatgataattattttcaatgcacacacttatgtctgacaagtgaatacaagtgtatacgcctcctctgcttaaataaaaataaaaattatccagattcacattatttgtaacttgtctattttctctcaacatttgttaagtgtgattggtatttgagatactaattaattatcctattttgaaagcataacatgtgtatttgtctctttttatgaaatttgattagttgcttgctctagaataacttatttttttttgtttattcgaatttttaaaaaaaaaagggagggaggcgcttgtgacttgacttgtgggctaaggaaatttagtcattgttttgtttggtaagtatcaatattttttctaatttgtttattatgatgagtttccttttaacgtttgatatcttattcaacgtattttgattatttattgatcttgaatgattttttttttatcttaattggcctattttttgtgagaatctttgtttattcttatttcttttatccattttagagtttttttctttaaatattattaagggaaaaagagtggggcggttctctctttgttaatgggcaagacagttttttttgtttccttttaaattggtttcctttttgctcctctttcatatctttatttaaaccaattcttttgtcatttaatctcaccattttctcttctatccgatccctgttctcctcggtatcttgtctctttgtttttcattttcatttttagcaagtcatggctaagacaaagaacttagggcatccaagcaa

SEQ ID NO: 236766 - DNA, 738 bp, Cannabis indica
aggcactactccatgggtgtttctgaatagcgacagtagcataggttctttgatcaagtccaagagtgggcgagggacatcatcactaagagggtggttctacggaggtagagggacaagtgcagacttaggattcaggggaagcttggagtaagcttaggactcgagatcgggaagattggcctgcggtttgtcgatgagggtatagacatgttgaagtggggaagaatgtaatgtgcatgcccagatggcacgtcacaagctaagtgatgcccacaagttggccaagtggtggtcaagtggtggcgaatgttgtggtgcatgctgatgcttagtttgtaaggcagtggcatttttgtaattatcttcaatattgtctaaattgggacgggactcggtatttgccatttatttgggtctacaaatacaatggtgcaatcggtttggcgagactatgtaatttggtttacagtttggtcgtatgtctatagagccaaaatcatgtatgttcttggcagaaggctaaaagctcagaatgctctttaagggggtaccttggtgtgtgctctctaccaccccttgcacgctggtgctaagtgagctactactagtcagcgagcctagtaggacgggcatatgaggaccacgaggggactcatatgtctccatgggttagagtactcatggacattatcgggccgacccggtagtgcgtacaagaagctgccagagattaac

SEQ ID NO: 236767 - DNA, 1907 bp, Cannabis indica
attcaacgagttatcaaaggcagcccgtggacttacgatcaaaaataactcataatcgagcgtctcaatgaaggtggcaatcctagggctgtgccgctcaacacttttaatctatgggttcagattcacgatcttcaggccagtttctcgactatgaaagtggccaaagatgctggtaattacgtcggtaagtttctcgaatccgaccccgaaaacttcacaggcgtttggcgtgaatttctgcggatccgtgtcactctttctcttgattcccccttgaaaagacgtatgaagttcaagaagcgtgatggcagttcattatacgccatttttcggtatgaaaacgtcccaacgttctgctttatttgtggtctcatggggcattcagaatgcttctgcccacgactttttgacactcctgagcatcttatcgtaaaaccatacagtcttcacatgaaaacagcttctcggcagcaccagaacttcaccgaatctccttacctccgatcgggcaaagctggtagcaacttctctcctggtgtgaacgcaaacggtccagccaatagcagtgccaaccccaaccgtgctaatttcatgggattgtcttcccctaatttttctcattcacgtaccaaaaataaggaggttgctgtttatggtaatcaagaagatgatgctgatgagttggcacaatcagaattaaaaaggaaaagatttgcaagtgctttaatcaatgaggcccaatctactactatgggccacgttaacatcatgggccatgctactactatgggccacactaacactatgggccaggttgatattgatccaaaaaacttgcatttggtgggttctggtttccaggcccaccagccattatgaatactttaagttggaattgccgtgggcttgggagtccacgggcctgtcaattccttgagaacattgttgttcaaaagaagccaaattttgttttcttgtgtgaaactttttgcaaaactgatgttgtgactcagattaaatacaagctcggttttgaaggagcttactgtgtggaagctcacggccacaaagggggacttgctcttctttggagaattaatgatgatgttctttttctgggatgttcaagtaaccatattgatgtagttgttcgtgctcctaattgcattccttggcgtttgactggtatttatggggaaccaaaccaaagctttcggttcaaaacttggcaactcattgaatctttagccgcttcttctcaactcccgtggtgtattattggtgatctcaacaacattggtgatcaatctgagaagcgaggaggtagactttatccacattctcttattcatggcttttagagtgtacttagaagatgcaatcttgtcgatttaaagcttcatggccacccttacacttgggaaagaggaaaaggcacggctaattaggttgaaatcaggttggataaagcacttgtgtctcagctttggcttgattcttttccacaagttgtcttaaccaattgtgatatttcttcttccgatcatacgcccatttttcttcaacctgagcggattgctgtaactagctttgtgtatcattttaagtttgaaaatgcttggactcgtgagcctctctgtagtcaaattgttcaatcttgttgggaggactttcctcatgcatcttttcaggagaaaataaagcaatgcagcctcttgttagccgattggggtaggagtctcacatgcaattttaagcagaaaattaaaagaagcaaagccaacctttctgctctaaaaggtaaaaccgaccccacctctgtacatgatttttgtcaagagcaaaataattattttgagatccttgcccaataagaattatactggaaacagcgatcaaagcaa

SEQ ID NO: 236768 - DNA, 1300 bp, Cannabis indica
tcaaccccggaaaaccaactgtttctgccaagtccacaggatcaaacgttttctccataaacgttttgtagtgttgtctattcaccatttccaagttaaacagtttatggatagaaccataagttgcaagcacatttgttttgcggacccgtaccctatcgttctctgcttcaggccaattggctaaaaattcaagagccagagtttgattgattctttctggaattcgcactaactgctcccattggcgggtctgaatttgttgcctcatggtctcgaataatgggctattcggggtgggattgccatcatattcgatacctcgatccataatgaaagctctcttttgcaattcaaagtatctttcttgcgctttcaaactcacaaatctatctttttcataattggactttgacgccggtgttggcggtttcgacgatgaagcacccgattgccccgttctagtacgcttggaacccatgacacacttcaaaattaccacacaaaaattttggaaaaattcggcagcacctccccttaatttcttcacttcccaaaaatcacaataataccacaataatccaacaacaataatatttcacaaatattcaacaatttctccaaaataaatccacaaattcccaaatgctctagaaaattattcaaactttcggaaaactcgcttaactaatcaaagttttgacaagaaagagacttactaagcgagaatgccgttcatccaccaccattgttgcacatccatggagaactcaaggttgaagatgatgaatagtagcaaattcggatttgggtgaaaaagggtaatttgtggtgtgatttttgaagaaaaatgaagattgatgagaaaaaattggggtttttggtgatttggatggaagatttgaagagaatgagaagagatttgaggtttaatggtggaatgaaggtgtggtggctgagaaaaggaagggggtcgggtgagatttgatttttaggttaaatggggttgtatgcgatttgggaaatttattgggctaaaaagggggtcccgtcgcgacgagcaaggtgccccgtctcaacgggaatcggcagaaaatattgattttcgtttgttactttcccagtcgcgacgggcaatgccccagtcgcgactactgaaggttgctctttttttttcgtaaaaggctcagtcgcgactggacattaccccgtcgcgactactgtagcagtggtaccttttttttcattttttttcttttcttttttttttctacgattttcacggttttactttaaaact

SEQ ID NO: 236769 - DNA, 847 bp, Cannabis indica
caatccactgagaccacctgcgcatccgccgaattcgggggataatgtggaggttggcaatgctaatctgcctgctaattggcagtaaatgtttcaagaaatgaggagtatcatacttcgtcaagaggatgaattacgtcggttgaggcaactagcaccagcagctcctgttgagcaagtgttactgccgcacagagattcagtatttgagcgctttgtaaagctgcaacctccaacatttttgggaggtactgatataattaaagctggacagtggatgagtactattacctgcatcctagataacatgggggtggcgcgaacagagagagtgaattgtgccacctttatgttacaagatcatgcccgcgtctggtgggatattgtgggggcagactcgagatgttagcactatgaattggaatgagtttaagagtatgtttgaggaaaaattttataacatcgctgtgagaacgtcacatatggaagattttgtaaaattgactcaggggaaaacggctatggctgaatacactctggaattcaatcggctatctaactttgctggtgatctagtgccgatagattacactcgaaaataaaaatatgtaagaggaatgaatgccataattagtcggacttgaagattaccactgcttacgacactttatataagaaagctgtcgaattagccttaatagctgaggaggctgagcaacatgtgattaaggagcaaactgcaaaggatgactccacggcatcaaatcctcttatgagtggtaatatcagtaaggggaccgacagtggtaaccctgatcacaaacagaaggctgatgcttccgaaaca

SEQ ID NO: 236770 - DNA, 2271 bp, Cannabis indica
ccggaccccaaccccagactttggctcgaccttggatatcgacctcagctctgaaccccgacccaatttcagatcccgattcggctctagaccccggcctcgacctcaaactcagccccggtccaaaaactacattagaaaactatgacaatccctgtattaatagttttaatatttttgtttcattttgtcataattaatggttgtattcttgctgttttggtgttgtttgttttttattttcggtgtttacagtataaaagaaaaaaaaatagttgtacaacccaaaaaactaggcgatagtcgaggtgattggaccatggtggcggacgagatgggatcggcgtggtgcgaccatggtggtgttgaggtgatgcggatgaagtgatgcactgtactgaggtggagcggacgaggtgtggctatggatgtgtggaggtgagtcgactttggtctaggacatggacagagcacctcggcaagggtcgacatggtgtggtagtggtacccttattaattacatactgatcatgatcatgagctgatatataattagacacattgatctttcataaacaagcaagctattgtagaagaaaggttggtaataataagattgttttggtttaatttctcttgatataaaagaaatgaccattatataaatataggattaatatatattgatgatatgtgtgtttaactatgtaaactactgcaacccttttttttgttggaataaatagcagttactgaaacaagagaaccatacttatctaaagtactgtgacaaggagtttgctgctcttcatttacaatattgtctccatttgaaaccgttttacactttacgttttgttatgttcaaaatttaaagactatgttcaaatgttaaaagaaatggaagaagaagaagagaaataagtcagtctattattacttcaattctgttgtaataattattcttgcaagaaaagtaaaattttacataatctaatacaaaatctgatccgacccttagccgtttggcattaaagttagtgaccaatatccttatccatgtaaaccaaaaatccaaactataacttcaagaaatcgtggcactaccttacctctagctgtaactggtccctgataatatatatatatagagagaatctaatttatcatcttgtacacgtgtaagatcatatgcctatgtgtcacctaaaggctcatctaagagacacctatctcacttgttataaattatagttgaacttctttatattattattgctcaaatagaaatttacaattatacaagtcttatacattatgggttcagaaactttgattgaagtgatattggctatactccttcctccagtgggtgttttcctccgctttggttgtgcggtaataattaatcttaaatatcttattatgtctatgccaataaattgtgtaatttgaaaggttaattgaattgaattgaatatgcaggtggaattctggatatgtttggttctgacactcctgggatatatacctggaataatatatgcactctatgtacttgtagggtagttcatatgagctttcttgtctaaacaaggcagttttatcaaactatgtaaaaaagctctattttcagatcattattacctcttacttggtttcatctgtctttacttcttctttttctcttcatattatttctcttcattattttcctattctgtctatgataatgaaaaaaaaaaaagtgaacataaaacccctgttcaagatgtattaattattcagactgtaattaagatcagacattatccaatttgcaagattcagactgtaattaagaatttgcttatttaggtatcaaatttgaatatgaacacaaaaataaaaataagaatcgttggtatgaacaagagcagaaaagtcaatgttagccttattctcaaaacttcacatttttgttttttgtgaaattgaaaattgtcccatggcaattattttcccatcttttatatttttttaattcctccaacattctgattttgaaaaatattgatgcacaaggcaatttataaacttaattagattcacctcttcctacaattctcaaattaactgaaagacatcaaatttgacattaaaaaaaaaaaaaaaaactcatttttatgttttttttttaaaaacacaattttctcacctccctcatgaagtttttattaattaatcgcaccgaatcattaacttactttttaatataattattttcataag

SEQ ID NO: 236771 - DNA, 3261 bp, Cannabis indica
acaacacagattgcttgagcttggctttgctcgacctgacggaccgtcgcctgggcccttgataatggaccgtggcgtgtccggggctattccttgattcttcgagcttggtcccccaggaatgacttctcggatatcctcgactcgatgataatatggatacaaatccacaacttaccccgggactacttctctgtcaacaatggaaatagttttaggagggaaagccggcaaggtcatcaaggtggagttggacgaagggaagccggcactgtggaaaaaatttcttagagttttgattaagatggatgtgaatcaccctttgttctcgggatgctatttcgagttggagaagggaggccatcgttggattcaattcaaatatgaaagggtgggtattttttgctataattgcggtatgttggggcaccaacgaaggggctgttcactttcttccccagtcacggtggccaatgatctcggtgttccgtttccctactgttttgggccatggctctccacggaatccacctacttagatgtctttgctggagcgaactctttttctcctttccctatctgcttcttctcgacctggtcgtgatgggaagagaacggtggccttgacgacatccatggatgagcttgggagaaactcggtccggctgaacagaatggtgcgtgaatcgaaaaggccggtgatagcgactggtcggaggtttgctaggggcaagctggcaaatcagatggcgtgggtacctaaacacaatactgtccctagtacgactggtttagctaaactgggtaataagggtggctttggagaagatgagaaggtaaagggtactctgaattttcccaaagttggtttgaatcatgttgactatccgttagtcttggacaaagaggtgggtgatggacttgggcttcaagaggatgttattggaccggccttttcctctactgggccggtttcattgcagcctatcaacaccagaaggactaatatcaatagtgggccgtgtgagagaaatgggccgtttgagcatcatgtgacccccccactagcacgtgagccctcttctctctccaaaaagaagctgggcgagaaagttctttctcaggctgtggaaactctgcaggttagtgggccggttgctaaggatataaatttaatgtcaattaacactcataatggcaatttgggtgttgggccttctaaaactatttccaatgagagctctatttgtggccaagaggcaaatgttgaccatgatgaaagcttagccttgtccaatttttttcaagctcaagacactcttcttcaagagcttaaaaattttggaaatttggacctttatgagattaaagccattggaggcgacattggagtcccaccttcctctgaggttaatgaccgaactactctgttcaaaaaaagaaagtttgacggggcatctgcgtccctttgctctcgtccttggaagcttcttcgtccccatccctgggctattcgggacttcccctgggacacggaggatcaagcaaatgccaattacactgtggaggatgagccatcagaggatatttccttatccaatagcgactttggttccgatatgtggaagactaaaggaaagaacgtgatctcatctaggccaatggagggcacattcgtggtggaggagtctggatcttttggctccgcccattctcatacccctgtggaggagacgtctactcctccacaggaaccatgagaggtattgcgtggaactgtagagggttagggcagacctctacagttcgtgagctgaagtccctgattcggacgcggtctccggatttcatttttctgaccgagatcaaagttgatgctacttcattggtacgtactcttcattctctccatttttattttcatattaaagttccgcctgttggtactgcgggtggtattattttggcttggaaaattgggtttgagtttgaatgtatagcttgctcccaaaaccacatctcgggtctagtgttttcggacccccagtcacatccttggctcctgtcctgtgtttacggccccccgtactttcatgctaaaaaaaccttctgggagatcctcatgaagcttggggataggtttggtggcccgtggcttattttgggtgacaccaattttgtcctaagtaattctgaacgtgttggatccagaggcagagaccagttcattccgttcatctccaatttggttaatgctaagggcctgattaatatgcctatccagggggacaggttgacatgggataaccatcgttctggatcaaaccatgttaagtctgcactagacaaaggccttattaatggtgcgtgggttaggttattccctaaggctgtcctctgctccttccagacttccaattcggaccaccgtccgctgtgcctgtactctgatgggctgggggagaaaatcaagagaagttttaagtttgaggaagcctggactagggatgagcgcagcaaattagtggttgattcagcctggaagtctattagctacccctgggccccagccagggttttcaagaagattggagctactcgagtggcgcttatgcattggaatagatcccagtttgggaaacttgatactctaattcgtgatctggaacgtcgtctagatcacgtccagagtttgcctgtgggatctagagagtgggagtccgaaagggccttacggaactctcttaatgaggcccggatcagaaaagaggtgtactggaaacagagggccagggtctcttggcttaaggaaggggacaaatgctcaaaatttttcttcctaaccgcttccatcaaaggtagaaggaatgccattgagagcattctcaataaagaaaatatgtgggtctctagtagggagctcattggaaaggaatttttggagttctttcaaggcattttctctggtccagaggatggtgtagagcctcactgtaccgagcttgtccgtgatcgcttatcctctgacgaccaagctgagctcattcggaagccatcccctgaggagattaaggctactctcttcgccatgagtaactccaaagccccaggtcctgatgggatgtctgttcttttcttcaaacactattgggattcagttgagagtgatctctgtgcagcaattttggacttcttccatactgggcgtatgcatagaggcgtcaatgcaacgaatatagtccttattcccaaagtccagaa

SEQ ID NO: 236772 - DNA, 1419 bp, Cannabis indica
tatgcttttcttactgagtctattgactcacagatgcaaccttcatgtgtaggtaaacgagagacgaaagatgaacatgggtgagcaccgagcttggatgaagattgtacatgtcatggcggcgcgacctggagtgttcgatctcgggacatctggggttatcattttgtagtcgttgtgtgacctgacttttgtattctgaatattttgtaaaaagtttatcaacggaatcctgacacttataaatatttttataaagtttataaagtttcatagttaatcctaaaagttttaatttaacacgattttcaagaaacttttttgattagcaaagattgcaatgcaattgaaaaatcattgtaatgtgccttagcattagagcgttacaacatctatgctagataacttcttgcaagtgttgttgttgagctcaataaattttttttttaatttaaagaaaaaagaagattaagtctatatttgaggtgtcttgccttttggcatgtgtattggtttttttctctctaaaagtttttatttgtctttttctgggttattcttttggtgatataatttgaacatgtaacacgttgagtaaaggttggactgaattatggcttccagcaacagatccatggaggaaatggaggagaaatatgcttgcatcgatatcgaaggagaagaggagggtgtggagattgacgctctcgactcggaggaggaggtagtttttgacgatcggttttgtttggtaggaaggtttttgaacgctagaacagtggactttgacgccatgagacacactctggcaggactttggaagccgcgtaaagggctgtttgtcaaggaattggggccaaacctttatctttttcaattctatcatgaaatcgatatcaaacgagttatcaatggaagcccgtggactttcaatcgactcctttttctgtttggaagagtgccgcgcggtggagatccgaaatcgatcccgctgaataagttggatatgtgggtgcagattcatggtttaacttcgggtttcatgacagagagagtggtgaaggaggcggcgaaggtgatcggagaatttgttgaatccgatccgaagaacaataacggactgtggcgtgattttttgcgtgttcgggtgcgagtcaatattgatcaaccgatcaagaggagaatgaaactaaaaaaggttggtggtgactggttttgggcgccgtttaaatacgaatttctcccaagcttctgttatatctgtggaattattggccacactgaatatttctgccacaagctgtttgatacaccggaggaggccattgtcaagccgtatggagaatggttgagggctcaaactcgtcggaaaaactatctgcttcactctcaatacttgcgcactggtacggaggccga

SEQ ID NO: 236773 - DNA, 766 bp, Cannabis indica
ttaattctctcaaaggaccatcctttgttaaccgatttattctgttttggcaaatgtggcctaaatgtagatgccatagatatgcttcataatcatttgaagcattttgcctcttattttgttgaggtaaaactactttaaacaattcattatttataattaatttctcacatggcttgagcacataaagtctgttactctattttgcagaacaaataggcgtaccattctcgaaaaaaataatctcattattaataaaatcattattgaaaaattattaatgcaaaagagataaaaaaaaaataatgttcttggtatatttaggaataagataaattttgttcaataactaaaatttattattaaattttagacagattctgccaacacccttggcaaacacttgtgctccattccccacgtgcatagtcacctccccatcggccagctccattgacgatttaagtatctgcgtagaataacaaatatgattagtggctctagaatccaaaatccataaggattatcatcctccactaagttagactcaagaacaagtaaattgtatttacctttattcagcttagagagacacttgttacagtttctcttctagtatcccattacactacaatagaaacacttgacttttgcctttttgtctttcgacttggggctggcttcgttcttgttggcattaggtgacttcttgcctttgtgcttgccaccattgttttccttactgttgcacatccttttcttatca

SEQ ID NO: 236774 - DNA, 898 bp, Cannabis indica
atgtcttttcgaggttgataatgtaaatactgttatttttgctattgaagatataacgctccatctgacaattgcagttcttggtgacaaggtaaactttagcagtcaacatcatttgaatttcaacttctatctgagagggttgactcgacggagcagtggatctcattgaaagatgtctggagctgataagtgaaggtaccatgagtatgccttcctatagcgagatggatgcctcgctattcgttgttcaaattcgttcaactgtcatgcttagtttgtataatgtatattatacgctaagtgttctaacagtcaagatgtctcgtcaccatctttttatacgtagcgaggttggtgcctcgctttgtattactgatgccatccctttgattgtgtcttatgacgcagaatgatttctcgtcaatgcataagtcaataatttgtatatccttatctcgcttaagactttacagtcagcaagttataaatatgcactatcaatctccgcattaaatgagttattccattttaatatcctttaatataattgacattatattcgttacgtcatattctccaaggttgatacatgtcctcctctgaagtgccagccaaattttgagtacaacaatcgccccttaaaaagttctttttaatgaaaagtgctttttaaatgattataaatggtatttttgtcataatcccttttgaaataatgcatgtcctctgatttttgcagttttgtggtttcaaggcacatcaacatttaataaccttcttttccacttccttttttaaattttacccattggatcaattgtctccttaatctgacggagatcaacccaagagtataaaacgaaaaaaggatccaccttttcattacctttgccat

SEQ ID NO: 236775 - DNA, 1093 bp, Cannabis indica
atttgttaacttttcatttgatttaattttccagcatattcccaaaaagtttactatcaaatacggtgaaactttatccaattgggtgttgatgaagtttccatgtagttctaaatggaatggggttaacaaagaaatatgagaatatttgatttgagaaggagtggctagatttgcaaagcattatggattaaaaagagagagtatgataatatttagatatgctgggaattctaaatattatgctgtaatatttgatttaagtatagttgagataaactacctttctgtgcctactaattttacccttctatacagttgggataaactcgcacaaacgtcacacaattataaaaagatatcgcttaaaatcgcatattttgtcaattaagaaaattattataatatcatagtcaactaaattatggaaaataaaatcgcaaaaatatcgcacaaatatcaaaagatattgcataaatgtcgcctaaacatagtaagggaattttggtgtctttcatgtacatgtaacagacttctaatttcagttcatacaccaaaggatccacatccaactcttcatacaaaacttcacgcacattttccagtgtagtgtcaatgtcaaacatcattgtcttacttgttggggaattgaatacccagttgaaatcctccatagcccaaacaccatcatatagtataggcacaagtatagttgaatctatccaagaaaaactacaaacaaatatgaaaataaacagaaaaaattagcctaacatatcgcacaattatcgcacaagaaagaaaacatatcgcataatgtcacacacaaaaggcaacaagaaacaaataaaaaaacgaaatagtgtcgcacaagaaagaaataatatcgcataatgttgcacaaaaaaataatatcgtagaataatcgcacaagcacaaaacgatatctcacaaaaaatatagtaaggaaataataataaaaaaacaaaaaaaatatcgcataatggtgtaaacacaaatcgcaaaaccattaaaatcgcacaaaatcgcaaggacatcgtttaatgtcaccaaaaagaatgaaagccatccc

SEQ ID NO: 236776 - DNA, 3471 bp, Cannabis indica
aaaaaaaaaacaaaatatataccgtggtcatatatgccgtgcactatagtattaacctcaaaatgttgtgttggatagtgctttcttggaacaaaaaggaacgatgtttatataaaatgttacatccttggagaagctctaatgaggctagtttactggtgagggaaagatggaaaaaagagaagtaatgaattggaatctaaaagtacctttaaattattagtaaataataattcacatctttttatggaaagaaaaagaggagaaacatgtcaggcaacaaattttggttttattatatgtacatcttcttcttttttattttaaaagaaatataattttttgagtcattactcgtacgtaaattgtatgtctgtaaacaaaacatcctcatgtatttcattgacaactaaaaatctattaatggaaaataactacataataacaacaatacaaatacattaataataattgaagccctaccagctttgcttgtgtcacttctcaatcactattaaaaagaactattttcgttttttttttcagaaagtgtggcctagcttggaattggtgattgaaatggtgttaaatctaggattcattgcagaacagaatcatagaacaagaagagagaaaatgtaggtcaaagatttatgaaagagaaagaacagagaagaaagagatgaaagaatggagaagaaagattaatctcattgaacagaattacaatccagccttatatacaaagctaagctcaacagacctgagactaagccaaaacagaataaccgaatgagtaacaaccctcataacagaaaactaacactcacagtagctaactaactcaataacagaatgaacagtcaaaggtttaactgtcataactgtcatgagccttaacaccgcccctcaaactcagaatgggatgatcagtaattctgagtttgtctctaaaaccagagaacctttgactagaaatggctttggtgagaccatctgcaatctgatcaagagcagctacatgtttgatttgaaccatcttgttcaacaccttttctctaacaaaatatagatccaattctatatgcttagtgcgagcatgtaaaactggattttgggtgagcataaccgtgctgaggttgtcacaccatattgtaggaggctgaggcatgtgaatgtgaagttctgaaaacaagtagtgcagccaggtcaattcagcagtgacatttgcaacactgcgatactcggcttcagtactagaccgagatatggtttgttgctttttgctcttccaagcaatgagattcgaaccaaaaaagatggcataccccgaggtggactttctgtcatcaggatccgaagcccaatcggcatcacaaaaggcaacaagatcatgagattcaggtttggaaaaggtgagaccataatgcattgtgccactaatgtacctcagaatgcgcttgacagcttgccaatgagtggacaatggcttttgcataaactggcacaccttgttcacactaaaggagagttcaggtcgagtaatggtgagatattgcaatgcaccaacaatggatctatactgctgaacatcagcaagaggctctccttcatgtgcagacaaccgaagaccacttgtcataggtgttggagaagacttggaaccaaacatttgagccctgacaagtaagtcttgtgcatacttcttttgacaaagatgaaggcctgaatcggtatgctcaacttctataccaaggaaatatcgaagtttgccaagatctttaagagaaaaccgagtattcaggtctgcaacaagagtgttaacaacagtttggtcactccctgttattaaaatatcatcaacatacacaagaacaagtgttgttgatgtaggtgagtgattaatgaacaaggagtgatcagactttgaaggagtaaacccaaaggatgtcaaactctgttgtaatttgtcaaaccaagcccgaggtgcttgcttaagaccatatatggccttattgagtttgcacacaagctgttcttgacctgggatttcaaaaccggggggctgagtcatataaacctcctcttgtaaatcaccatttagaaaagcattattaacatctagttgtctaatttgccaaccattagacaaggctagagtcaaaaccaccctaatagtgacaggtttaaccacaggactaaaagtctctgtaaagtcaaagcctgcttgttggtgaaaacctttagccacaagtctagccttgtttttgagcacactcccatcaggattctccttgattttatacacccatttgcagcctattgcttgtcttccttcaggaagtctaacaagaacccaagttctatttctggctaaggcaagtatttcatcactcatagcattgttccattgttcttgttgaagagcttccttgagagaagttggttctctagaagccaggtacactttgggtttaaaaacacccatttttgacctggtttgcatcctgtgcatgttgtgtttccctggagcattaacacagccagcaactaatggtaaagcagcaggagatgagtaaacaggagcagttctggaatctggtatgattggtacacgaggggaggttgaggaaggttgatcagtgtgagtaacactatcagaaccagcattcgaagaacatggagacaatcctgaaaagccacctgtatcagcattcggacactgatctgcacacctgctgttagtaggaaactgtccaacaaaaggttagatggaatggcagtatcaaataaagcatgttggtcattgtgagtgggagttggaacatgattcaactcaacagcagcatcagatggagcaagaaatacagatgcagaagcagtatcagtttctgctggtgcaactaaatctgttgcagaaaaagggagttttaaaagtgacagcacacaggtatgacagcagaaacatgtgatgggatgataggatcaggtgtatgattttgctgattgtgaacttgctcataaggaaaagagaattcatcaaaaataacatcacgagagatatacaatctacctttcgagtcaagacacttgtaacctttgtgatttaaactatatcccaaaaatgtgcaaggggcagacctaaactctaatttgtgtttgttgtaaggtcgaatgttgggataacatttgcatccaaaggttctaaaggtagtgtaatcgggtttggtgtgaaacaatgtttccaaaggagaacattgatgcagcaagggggtgggaagtctgttatgtaagtagacagctgtcctaaaggcttcatcccaaaattttagaggtaatgaggcttgtgcaagaagagcaagaccattttcaacaatgtgcctatgctttctttcagcaaggccattttgttgatgagttgtaggacaaggatgtctatgatgaatgccacaatcagcaagaaatgaagtg

SEQ ID NO: 236777 - DNA, 556 bp, Cannabis indica
gaaaaatgatttctttcacttgtattatgcttcttggtgttgatggaccacattttgacaagtttcctttggttgtttaagagtagagacctgtgccattttttataccaaacgatggcacaggtcggccatgcattatggaatggcctcattgtgcaatattgactttatggtactgccaaacatgtacaagccccttctaatggaaaaatcaaattcaatgatgatttagctcatcccacacgtacacgtcatgggcatcctacttttctatgttctataaacttggatgtaattattgagagtgaagatactatccacaatgtgattattccagcaaagtgtttgattatagttaaaatctagcatatttatgcataaataagtaaagtccttgctgatttctttgacagattaagttctctgtgatgaaaacccttacgcgagcccataaaccctaggttgggcacacttgggtgtgggtctcggcattaaatagttagttagtgttttaataagtttcctaaaggtttcatggggccctcaaatatgatgt

SEQ ID NO: 236778 - DNA, 898 bp, Cannabis indica
ggggttccttaccttaatggttagtatggaaacagaccgaagatgaaaataattgcactaagccttcttgaaaagttctaaactacaccttaattataataacacgattttaaattaatacgtgactaaacaatcataaaccactcaaacaatcaacctcaaaccaagacatatacctgcaggtagaacaccctttagtcgaacctctataaatattaaacactgatgctacttcttgaacgattgattgttctaagatcattttttttttgaactatgattgggtatgacagcttctgatcttagtggtgcgtgtgaatatggaggtgtcaatataagacttgaattttttgaagtgacatatatcaagatctcataactaataaaatataaaacttacataatactactctaattcttcaacttaaattaaaaaaaaaaatatttgacctattatctccaaccaatatccctgttttctctctctgcacatcgacttccacaacaaaaataacaagaataaaaagatcaatacttatgctcaatcaattatacttatcttaaatcatttagttataccacgcaaattaacaagaatatagagaaatgctaaaaggcaccagtggtgtcaagcactttcctacgtgtcaatatcgctattggtctaattaagtatcgggtcccatatagtttaataaaatagcttttagggagtatatcgctaaccaatcacaaggcgacacgttttaagggtgctaggcaccactggtgcctaataacaatgctcaagaatataatatatatatttatatcatcttcagtcatctaaccattacttaattactatgtaatattatataagactaaagtacacttggtcaaacttccttcattcatc

SEQ ID NO: 236779 - DNA, 975 bp, Cannabis indica
cctcttctattagttctctaattaaaccatcttataagattgctggtcctaattgcagtaatctaattctgcttggtgagatcaaaggatgtactcctagtcatccatccatctcaggaatttgcatctttgctgagtgaatacatcgcaatcagcagcttgtggctctttagttaggcatgcatggcctacagcttccctgagtcttgccaaatcaaggtctttccctaagtcctggcgaggttcgccaattgctggctcgcccactcccgggcctgtctctccactgtataacttgagttgaggtccgattgtgttccaaagggatgtcgcccctgggtcctccttcagtgggaggtgccaatcgtggatctactcctggaggcgtgggcctaccacttggatctaccgggatgctcgtgtcaggttggccagctgaggcggccagagttgttgagcctgttgtggtaacgggatttaccacatctctagtattcatggggattctagttgtgactagaaactaagtgtctggatctacaatttgtgggtcttgagggagacctgaggatgcagatggtgtgataggagttcttcttgtgttcaccattgtgtttgatcagatcccgatagccacagtcgaaatgaaagcaccaaactcttgacctcaaaaagtgatcaaccaatagcggggtcgtgtagatatgatgcttgccgcgtatgtgcataaatgagaatgcaaatcaatagacaataggatttgttatagaggtttggccccgttgtgatagcgagtaatgacctactccccttttagttgtattataccgaaggaattactatctagatcactataggtgggatctgcaatagtacccttaagattacaatgtataaatcaatgcttggcaaaactcaagggttggacggcctaaggtaggcgtgtgagagagaatgaggaagagagagagagag

SEQ ID NO: 236780 - DNA, 737 bp, Cannabis indica
gaatgtctccctctatctctcctttccctcttgccaaacaagtaatctagactctccttccatcactctccctccacccctctctatccactcatctccccctcctaccaaacatagtgtaaatgtcttagactgagaggaatggcttataagagatatcacattgtggctgatcttatcgatccaagtgatgattgggacttcataaacttgaggagatttatgatagaaaaacaatctcgaatattaaattgggtagacctccatgtgaaggagtggacaaatgtgtttgggttaagaaaaatcatgggagcttcagtaccaaatatgcttatttagcattggagagagttggaatgtagattgaagatatattatgcccaatttgtgatcaagttgaggagagcatgaagcacattttcttgtaattttgcttctcatctttggagagcattttcatggggacctatatatacctgctagtgacagtgggggatcaagttcttttggagactccatttgtgaggggtggattcaaaagagcttcttctcattgtggtttatacaatacggcagataaggtatatgaaaatacatttaatgatatttctctttacataacaatgtgatgaattcattttttacagaattactcaaggatcggaccaaaatcaactgcaatgtgacaatctggttaaactccgtgatgatttcgactgcagctaaaaatcattatt

SEQ ID NO: 236781 - DNA, 611 bp, Cannabis indica
tctttacaaaaatgctagaggaaaaccattaagtcatcttcctaaacaaagaatacaaggagggttggtaaactcgacaaagaccgtctacatatagcttggagaaagaccgtctacacatagcttggagaaagactagctacacatagctcaagaaataccgtctacacatagatggtctcgacctctacatagacctcattctccacatcagaagatcccatttcatgcagccgagacgtcattcccagcctcaagaaatttctcaatacttgagagaggttggcacaaaggtcttcttgtgcaagcttgggtcttaggctggttgggttctttagtagaattcgagaccatgcccaccagtactactttcttcctggattccctatcagcctcaagaggacctcttagatggctcgcaaaatctatatccattcatgtggagacaaagttaaaagatcaatggagcaacaaaaaataataatgtgtatgatccaattcaaaccaccattcacaagggataatacttaccctcaaaaatcacttgtgaggatcgcccataacgatcaacagagctcccttagtttggattgatcagaagctcctcagcc

SEQ ID NO: 236782 - DNA, 3222 bp, Cannabis indica
atttaattcacacaaagtcaaaaaggaaaaaaatctaattttagaaagcttagtaaaaataatttcaaaaataccacaaatattatttttacctattttatcaaatatgccaataaaggattttacagaagcatcaaaaatagaattttggaagctcgattttaaggccccagcgcccaagtcaacatttggcttggtttgatgggttctgcttatctaaatcgagtgtcgtttttatcgtccatcaagtttttcacaagtgcaatgatccatgaagtcaaattatctaaattcacaacttcaattttggcgcattcggaagtcataagttttgagatctgtttccgcaaaacaacaacatctccgagaatgtgtgtgaccagcttcaccaatacatataaaaggactaaggggtgtcaaaccatcacttaagcatctcaaaggacttcccttggaagattttacatttatacaacgtccagtttgatgtcagatgtcaacctgggcgctaggacgtgaactaccttcagtaaaacggccataagtcactcaaattttatcttattgacgcaattcaacttgtgttttgaagctatttaatccctctatcaagtaatgtctcatacctcaggcgtaattctgaagttatcgtcatcaaaatctaccctcaaaaaagttacgaaaataaactttgggtaactcgcagcgggactcgccagacatcaaaaataagctaccacgagaagctaattttcatcatcaaaggtgaaaaaaactttatttgtatattatctcctatttttgtaggcttccttcacttataaaaagagagcttctttaactcattattcacattcagaaaactatccacaaggttagagcttctctctcaagattttgaaatttctcatacttagtctattgctgtaatcaccatctcgtgagaaataaaaactcaaagtagacatgtagtcccattattatcgcgacatataggaagtgaactattataaatttttgtgtctctccaaaaaatttactactaaaacaacttattcattctcgtcaacaataatatactttttattacctaaaagccattaccaggattaagtcctagccagttgatcaactgaatgattacaaattattttagaacaaagatatatatgagatattcttgtctactgtaaccttcttttttgttagtgatcattcactttgattatcatgcaccaaagagtcaaaaaagtagatttttcagcttttgcaaaaagactttttgaaatatacttttactatatgccaatatttttctcgtgcttaacaatacattttctttattgttggtatatagaggtatatatatatacttccaggaacttgctaatgaagaaacaaagaagctagtaataagtcattcttttaataatggtcaaccggcaggcgggtatacgtttacttatatattgctaccaagtaccaaccactagaataattgcgtgtataaatagagagcaaggctgaggcagttcaaggatacatacgattggtcaactgtttgttcgtggatgaatataggagtctctctttcgcttttctcatatttattattaataatatataattgaataatcaattaaattaatattacatgcatatatatgttcttctttttcttctttttcttctttcacattctttctttttctttaaccagaaatgcttctttattgatctgatggggactacaaatccaaaaatttaaatcgattccggtgcatctagatcaacaaagtcccatccactcactcaagctaggagattgtaaggttgaaacttaacagtacgtccatgtagttaaagtttttcttagctgcttttactttccctttctttttataagacatgtagcaaagtttattggacaaatacaaatatatataaatctctatttatccattatgcaaacactgtctaattaaaatacttccaagctttttctacaaggtccagctcatatacatgtcacgtaattgaacccaatttaaatcgttaaataaaaaaaataaaaaataaaaaaatcttacttgcccattttttaatgtatataatattattatttgtcacatccatcgtttaaactttgaaactttatatgcaaaatataatctaaattatctataaattataatctctcattttatccgattccaccccataaaaattacatgtaaaaaaaattctcgatttgacttctaatcaaaccaagatatgttagaaaaaataattatattacaataataaaaatgataacacctatgataacacttataaggatttacaaaataatccttcaggattcaacagatactctgattacaatcaaagaactagacaaaacaataaaaaaaaaaaataaccaacccaagaataattatacatataaatattatgtaatatatattatatatatgtgtgtgatactatgcatgaaaactttgtacgtctcactgagtgatagaaatatgtatggctgatatatcatcaatagcagatgtgactgagaatctgtcattgtctttctttaccaatgtggtgactttactatctctaatgaacacttggtcaccctctatttcgtgagtccatgtgatatgtttttctatattacatatatatagttttaagtcattcctgtattcctgtatcctaaaaaaaaaaaggtcattcctgtaagtaatagtttttaaatcagataaagtgagtactgtttagaaatggaattaataactgaaacaaaaataaaaaaaataaaaccaaagtgatctatgtgggtccacgtaacggcataaaagtctaataatgttgttctgccttttctcgactacacatcaagctacatgtgttcctcgatcattgggtccggccggtttgctcttccctaaaaacatgcatagatcgaatgcatgtcatttaatattatatatgtatatatttatatgaatctccaatgttcttatttggcactgctgggcagtctatattatcttaaacagtatatatctttgattggataattaggggctaagtcgacgtcgctcaatggatatacacaaatatatatatactagatagaattacgtggcgtcccacgtaaatattaattttatataagttctagtagtttttgtttaataatttagtaactaagcaacgaca

SEQ ID NO: 236783 - DNA, 1469 bp, Cannabis indica
catctgggagagtgtaaagggcaaggatatatttagtgtggttttcttggtcactataagagagattacccgcaagtaagaaaaaagagtagaagacagcagcaaagcccgctctagtaagggtttttgcttttactcaagctgatgtagaagctagcctctcaattgttataagtcagctctcagtcaacaactcttatctctctgtatggtttgactctagggcccctcattcatatgtgacggcaagaatttttaataaattgggttggctgtatgatagctatgataaggggttcggaaccctactacctagcagagaattatttatctctacaggtaggttaggtctatgccaataagaattgaggatagggagttgagtgctgatttggtagaattgggcttagcggattttgatattatacttagaataaatttcttgttcaagtattaagttaatattgactgtaagcggaagatgctgatcttccaacccaagggcgaggaaccgtttgtgtttgtgggatcagtttagggatcctgaattacaaggatctcagtattgaaagttagagattttttacaagattgaggcctagggtttcttgtagtggtattggataccacagggcttgattccattcggccagaggatgtcagagtggttcaagaatttttagatgtatttcctaatgaacttctgggttaccaccgtagcaggaaatatattttttattaatttagcactaagagcagaaccagtctctaaagcaccttgtagaatggctgcaacataacataaagaattgaagatccaacttcaggggttgcttgacctagggttttcacgacctactgtgtcatgctagggagctcccatgttgtttgttaagaagaaagacagatcccgaaacatgttcattgactaccgggaactaaataatctgacaatcaagaataaatatcctttacctaggtttgttcgatcaaattcatgggaagatagtcttctttaagatcgatctctaatcgagctgtcatcagttgacaatctaagaggagaacattccaaagactactttttgcactaagtaggggcactatgaatttctagttatgtattttgggctaactaatgctccaacggcttttatgaatttgatgaatagagtattcaaggacttccttgatatatgtgttatagtatttattcacgacatccttgtgtaatctcaatcagaagtggaacattagcaacagctctagatggttttgcatcgattatgagaacgtaaattgtatgccaagttcaaaaagtgtattttggctatctctggtgtcctttcttggacatattttcagtaaggatgggatcaagattatccagggaagattgaatctattagggattggtcgagaccgaagacagttatagaagtcaaaagttttttgggtttggctggtta

SEQ ID NO: 236784 - DNA, 1038 bp, Cannabis indica
ctctgctgtaatttggcagtcaatagaaaatacatttgtataaaaaataagagagacttgaggaatctaaaagataagaactcactgtagtgagggctgcgctcatgtcctggatttgatacactgggttggtagaagcataggcagcatacctcttcattgggagttgggtcaagccggcagcaaagtggctcattatctctgaggcaaaaggacccaggctaggtcttacaaagcgtttaaacaagtaggtcaagggatccaaattcaaatcccagatgtttccagcatattcgctttggacagatccaccctgggtatcccttagtattttcttcagagcctccaccttcgtattcccattggtgtactcccccaaggcgtagttgtacttgccaatccggagctgagcctcttcctcatctggatgagggggagtcaagataatgcccagaggcataggatactcatccacttcggaaggaatccctgagtcagcactgggagcaggagtacccgctcacctcgatttcttagcagtctctgtctccactatttttcctttacgcttgcggtccaggggagggatgatcttaccttcctcctcttcctcgtcaattaggatgacttggtcctcgggaacactggcagaagatctctcaggagtcaccacaatgtcgcgtgactcgggcagaccagactcaggactgtaggtacgagcgaggatgtccaggaggtactccattggcgtcgttgctcaaagaaataaacaaagggctcagaacatcgccaaataatcatgcatgcaagaataatataatgagactaatcctaccttggcaatttaattctgccctagcaaaggtatatattaaaaggctggtgtcgtcgtccccaagaaagctattcgaggggaggaaccaactagaggacagataagcagagtgatccaagacgatgggtacgggaggaccggaacccatccaggaccggcctaggaaatgactaagttggaaaaataaaaactcttggcgttat

SEQ ID NO: 236785 - DNA, 759 bp, Cannabis indica
tgtgttctaattgtgtaccaaaagtgatgtaaatttggcacgtagcaaattttttcatttacatttatgtcatttctattattttattagtatattgaactatcacatttaattatgaaacatttatattatttttttattgtcttacatattaaaataataataaaattgattgagaaaaaggaattgaaagttcaaacataaagtaaaagagattcaattgaattgaaacagtggagaggccagctttatatagcctggacctcattacaaaccgactaaaaaaaaagaacataacaaacataactgaataaaccgactaaccgacttctatgctgacacacatgacaattgtaatagaaacaccaaaaataatataacaacctatggacaccaataacatacatgggacagtaaatatgacaatatatatgaaccggaaccagtaacttaatacccctgttggaaattattttaccaggatcttagatctactcacaagtatgttgattaacaccctaactatgaacttctaaaacgattatgaaataaacacgtataaagtatgagaaaccttacattgggtgcagcggaatataatcactccttccgttcagatatctagcccttgattcctttctgtagcagagcattatcaatatctgaacctggatctctttctctcctttagtgctgaaactccttcttgttgaatgcctttcttcacgatcttcctccctatgattgaggtatcacttg

SEQ ID NO: 236786 - DNA, 2495 bp, Cannabis indica
aataaatgaacaagaaaatactataccttatcaagcatcctataacaaaaaaatgatacctttaatcacaaaaattatcttttgatgtgattaattataaataattatttttatgttgtgattaaaaagttcgtgattaaaaacattagtcacaaaaattataatttgatgtgattaaatgtgtttttagtcacatgactgaaaacaaattattgacaacttgtatttaaatactatgttttagtcacaagtaactttttattgtgactaaaaaatcacatttaaatacaaaaaatttatgtgttgggactaaaaaattatcactcaagatagctatttttttataatgatcaaacaatagaataatattattcatttgaataaggaaaaaaaaacaatttaatgcaaatattttaattattatttataatataatcatataaaagtatgataaattacaatttaatatgaatttggtacaccaaacaaatattataagagttgcatataatttattgactttagtgcaatcttgttgaccataacgggcctaagcattcatagtattcaacttatgtatgtgaatattttaacatgtttttatatatatatatatatataaatgtatatatatatataatatatataacattttgagaaactttgaattaattacttcatgcactatatgcatttgtagtggttgaattccaactaattaattaaattttctttgtttttggttgtattattcaaggtgtgacgagtccgagttaattgaggaaattatcaatgacatcttggaaaaattaaattacatgtcattaagtaataatcttccgaaaggtttagttggaatggagagacgaattaaacatcttgaatcattgtttctcaccaagtcatcatcattagattctcaaattgtaggaatttggggcatgggtggtataggcaagacaactctagcacatgccctatttactcaaacttacaaaaagttcgaaggtcattgctttctcgaaaatattagggaagaatggcaaaaacataacaaactcgatttgaggagtaaactttatggtgacttattgaaggaaggaaatcgagatttgatcatcaacaagtttgtgaaggatagactttctcgtcgaaaggtacttattgttcttgacgatctagatgatacagaacaatttgagtatttaattggcgatcgcgattggttaagccatggaagtagggtgattgtaacaagtagaaataagcaaatgcttaagattattggggttgattggatccatatggttgagcaactagacaatgatgaagctcttcaactctttagtttcaacgccttcaaaataaaaaccccaccaaagaattatatggagttgtcaagaaaagtggtgaattatgctgcaggcatgcccttgggtcttaaagttataggttcatctttgttttcgaagaataaaaaagattgggataaagctataaagaagtttgaaatatatttttccaatctaaagattcaagatgtgttgagaataagttatgatggactaaatgatcatgaaaaagatgcatttcttgacattgcttgttttttaagaggaaaaagaattgaggttgttgaagaaattttggatggttgcggatttgagggtaccataactaatctcattgatatgtctctcattagtgttactaatgagaataagatatggatgcatgatttggtgcaacaaatgggtagggaaattgttcgtgaacaaagtcctaaagagcttgggaagcgtagtaggttgtggcttagtgaggaagtatgtcgtgttttgcaacataatttagtaagtactacttaaaaatttattctatcattaatgttttagttttgttttaatttataacattgcacacatacactacagaaaactgttacttttagtgaattttttaatcacaacataattttttttatgactaaatgtaatttatagtcacaacaaaatgttacttgtgaaaaatagcatttagattcaagttgtcactaatttagttttggtcacaataagtattgtgactaaaaatacatttagtcacaatagattggaaattttgtgactaatacttttagccacggaactttggtcacaacataggaatgatgatttataattagtcacaactttttcatttttagtcacaagttttgttgtgactagaaataaattttttttgtagtgatagggtatgggtaaatatcattttggatcttgtgttttgtaaaaattaccgaattgactatttgttttgttaaatgacaaattagactctgtattttcaaaaatagtactctgaactgatttttatcagaataaaatttaataataaccaaatctaaagttttatgataaactgattatgttttctattcgtactaggaattgtctttaagttcactatattaaaaaaaagagcattgctattgg

SEQ ID NO: 236787 - DNA, 714 bp, Cannabis indica
gtactactcaaatctttgtagaagatcatgaagaattgtcgtgtatcgggcttaaggaagcaatctagattcatcatttaacaatagtaccctgctacagaacgggaatcgagggttagcgtgattgaacgtaagagtgtacaaaaagtcatccgatccaattataattgactgatctaatagaatcggatatctaatcatattggattgaatcggatgtaaattttaaaaattcaatcggaacagatcggttgttggatgaaacatccgatcaattatggctaatcgaactgaactgatctaattatcatctaatggtcatccaattatatttatatattttaaaactatatttataattttatatatttaatatattattttatttaaaaaattatattaattgatttagtacatatttaatacatgagattaaagaaaaaaaatagtagatctaaaatattaattctcgtctttctcaacgctaataaaattattaatgtgtattgaataagttttagtttttggtagttttattatagaatcatgagaattaagttggactaaattaatgtttattatgtatgttagattattaggttttaaattatgttttttatatagttttctttttaataaaatcaacttgaatggtagctaataaaaatggaatattgaatggatctaatcgaattcaatagaaaaccagttaat

SEQ ID NO: 236788 - DNA, 734 bp, Cannabis indica
gcactaacatgaaacaagaagtgtattttaatcaattcattgtcttaatatcatcaagtgtagtgtattttactatatccaaataacaagaattgtaaggctgtggtaagcaattgctttagccactattacttcctatgtgttcataaaacattatgcaacatcatttttctatatgcattactcctctagggattcttaattctttactatttattaagttcatctgaatatacaaaagacatatatctctaattctatccaaaacggaatagagataaaatagttaattactttcttcagtttgaataactttctagtgtttttcaaaaacaactaagttatttagcttcatggtggagctaaattattatagatgagtttttacatccttctagaataattcctccactcccagagtaaccaccatctacgatgttaagttatgagttggtgtagataaaatgattctaatatacacgcctatcatctaacatataggtcactttcataattctttcttgattgtctcctaatgttccttgtttaattacatcttagatggctcccactcaacagtaggagtctggtgaaattcatacactagtgtgcatttaacctcttacaattgatgcttagggatatcttgttgtgatattttatattagtctgcaacaataagttccatctagattaagtcatcaatatagtattctagtattagcattaatgta

SEQ ID NO: 236789 - DNA, 2655 bp, Cannabis indica
aaaaagaaataaataaaataatttagtatattgttaaaccaaacacataatactttcagcataatccaatcttgtccagtcaagtccaatcattttcaatccaatcatgtctaccaaacaggttagtgcttacagataggagaaataaacttttgtacaaaggtgcaatatcttgttcaagtcatggtgatccttactaatctacactcaaggttgtgagtgagtgtatatatatgtactcttctcttgctatatatatatatatatttcattacatgttttgtattctttttcttctacctttcacatatatatgcaatatatacagtgtatgtctgtgtattgtaatatatatttaatcaatctcttattttagtcttttattataatacattagaactgtaatgcatcttgattttattccattgtaataaaatctcaaacaatcaaagcttaagacttattcacttttctcccgacccctatgaaccacaccagcctccttccacaaaaagttctcatctgaataatatacgtctccatgaaccttctatatttacacttattgttcatataaaaaaattatcaaaatgtaataaatttttaaataaattaaaataagcaccctaaatttcgttaatttattatttaaaaattaaatcaaagaaaaatacatgtaacattaccatataatcttatgataatcaaattaaaataataatcatattaattaaaattacaatgtctcatgagtttttcactatttttcctctttattattagctctagcttaaactttgtcagctttcatggtgtatatacatatatatgtgatatataaatatcattatatatatatttatctttatctctctagttgttgttgtgcagcagcttgttggcaatgaaggtgatgatcttcttcaatgatttctcttctaggagatttgtttaagggaattggaagaacttcagtagttgcaccacttagtctagggctccattcacttgagagagtagaaaaaaattgtatggattgttcttgttgtttcctccttctgttcctcacttccgtcaaccattgctttataatcactcctagttgctcttctactactttgtttttgaattctgaacccatctacatataaaaataaactaattaaactttacatactacttattttagtaatatttatgatgaggtgtgattttttcttggataacaaattataatataatttttctatatagcagttatactgtagttatttagtatgtaacacaaattttcataaaatcttgaataattcatgatattaaaatgtggcttcaaaaaaccaatttatttcgtgaaagcgtaaaataaattccaaaaaataaattcactaaggtgctgaatagcaacaatttatgagcttagaaatagattgcaatatgtcaaaaatatgaatgttttgcttggtatctaaactgaaaaggctgaagttagcattgaaagggatcaatcaaacaaggtgtagtggcattcaaaggcgagatcatcaagattattaagagatgatagaatgccaataaatattttagaggaatcaactttgtttgtcctttatagaacaagaaagacaaacccaaaagaagtatacaacgattcataaagttctcttgtcctttgtacatcaaaaagtaaaggtaacatggatcatggaaggggatgagaatacaatattcttccgagctaggtgagcttctaatcagatctattcggtgatagatatggaacgtagatggcatgatcaactagaccagagatttttttttcttcactattataagcagttgcaacattctcaaatgggaggaaggaggaatgtggtttcgagtttgattagagcagggtcgactataacttcttctcataggcagttattgttgcaaaaatttatcaaagttgatgtgaaacaagttggttttgcaattcttgagagtaaggtgccaagccctaatggatttggtagttatttcttccaacataattgggattcagtgggaaatgaagtctgtgaggttataatagatgttttgcatacatgaaaattattggagctgaatttcacggtaatttattattgtaatgttctctataaagtagctaccaaaataatttgttctaagcttagatctatttttctagatttgattcatggaatcaatgtgggatttttcatggaatcaatgtgggttttttcatagaaggtgtattgcttataatatataatggtttgtcaagatttggtgtgacattatgaaagagctaattctcaatcgatttgtatgattaacatggatcttaaaaaataacatgttacaatgaaatgtgagttcattaaagaggcattacatgcattcaattttacccaagagtttatatagattattatgatttgtatttaaataacaaggtttagctcaataataaattgttcgttgcatggtttttttaagggaaagagaggcttgcaccaaggagatatccaatgtcaactttattgtttgttcttggcatggagtacctctcaagaatcatgactaaagtgggaatggatgagggtttcaagtttcataaatggtgtagagccttgaagataaatcatc

SEQ ID NO: 236790 - DNA, 1341 bp, Cannabis indica
tccaatcctcactaactaattagcttttggttatcagacctaagaaaatgcctctaaaagaaaggaagacaaggagaatggttggagaagatgcccctcaagctaatgaccaacctccagaagctgaattccctatgaacgcccttctcgaagccttaagagaaattcccgctcaacaggtggatccatccgcttaacagagtcaccattttcaaatttttcatcgaatccaagtgcctgaggttgagggtggccaagatcccatggtagttgaaaggtggttgagacagataaagaaaaatttcaacacaataggaatacttgaggaatattaagttactttactgtgtccaagttagagggtggtgcaacagattggtgggagaccttgtccaggacaatggaaactgatgggatgacttggcgagattttgagggagtttttagggagaaatattttagtccttctcacaggaggcctttgattggagtatttgatggtccaagacaaggggaaatgactgtgaatgaattttacatgaagtttgtagagctatcctcttttacatatcctggtgttgttgtccaacccttggtgattggacagttcatgtgtagtttgaggactgtgatacgtggtccaatagcccctttgacctttaacaacctaactgagtgtgtgatagcaaccttgcaaactgaggctcatgtggaatggaatgagaggaagaacacaagcagaggaaataaaaatgaccgaaatatgaccatgaagattcaaggacagtggtcccaagggcaacaatttagtgggggtagcacttgtagtggttcatctggaaagacttgtagtggaccatacaggtgtttcagttgtggtcaacaaggtaataagtcgaaagatttcccacaacgacagcaaagatttcaagcatcccacggaggacccataaggagctatgtagagtctactccttttcatggatagcccagaacaaactagtctgagttttcatcctatggtttcataccccaattgggccagcagtctcagtatcaacaacagtttaggctacaaggtttagggttccacatggggtactcacaaggtttccaaactcttgttcctagcgggagtcaaaaagggtacaatcaaggtggagggtttggtgcaagtataagccatcctagtcagggaaagagaaaggcaaaagcaaagtcatctgctcaagcctatgctcttggggttgagatgtacagggcggtgctgaccagggagtcgttgatggtatggttcttatctcacactcttgggctcatgtgttatttgatactagtgca

SEQ ID NO: 236791 - DNA, 842 bp, Cannabis indica
acagactcagtaagatatgcaatacatatatatatatataagcaatgctaggctggctttatgcttaagcttccctgagctcaacaaccgagctcaccaaatggttaagaacgttcttaaggaaagtacaccactgtaccaaatgcactaaagtaccgaccctgtactcgtgttggtagagccattattgtactcctgggagttactaagtgtagtaccacatgcatggcgtaccccctggtactcgtgttagtaacacgtaaccatactgatatcctacactatactataacacccttaaaatcacatacatattagtgttagtagtgcaaacatccaaaacaagcatccattcacatatatgtaatatttatgctatcttacctcgttccgtgctcaggtgtgctggtcagcctgagtggaagtgcagctcgacgctttacagggccctaaaccataacgttcaaaatttgatgagagacacgctaaaacacttatcggggatttaaaaattgaaattaaggataaccctatcgataaataggatgctaacaccttaaataacgcaaaaacggagaaaactatggttctagaaaaatccccaaccgtcagaccggttctcaaccgaaagcccggttcctgggtaccaaccggtcgaccggttctaatggtcccccagaaccggtcgaccaattctgtgctgggaaagtaaaaatcgaccctatgaccgcaaaaccaaaccaaactttaccaaactctccagtatacctctaagcactataatgaagcataatcaaccagtaaaactcatcaacaatcttagaaattcaatccaccattaa

SEQ ID NO: 236792 - DNA, 1882 bp, Cannabis indica
ttttcagttaatttcgagttcttatagaatcatggcctacctaaaggtcttgtatcagattatgggatgaaagtgtcctactcccctcaaaatttgtatttttattctgtaaaggctgttcccgcaaggaagcgaggactaggcagtttttattacctcaggacccacataaataactgaaagatcatcgtaagattaccaaataaaattaaattcaaggatgaattcttctagataactggtctctcccccatcaacacaacaacatttcgccttatacgtaagtattatcttttctcaaaagcttggttttgagtttctgatttataaattgaaggcttttatttattttgcttattgtattgacattgatcacgaaaaggccaattctaactctcgagatggtagaatgacataaagctctcttagatcttccgtttggactgcggtcagctgattttttactgaacaagaccaatttgaagactgttaatcttcttggcaccgatcaatccacctgcgactataagaatccaaagttttctaagtggcaataaatccctgttccacctggcgaggaagatagagactatgtggcttgcatccacttcctaaataaagtgtcccctcgggaagctagagaaggagcatcctgaggtaataattgtggatggtcccctaatgtgcttagggctgaacgtatctcgctagttaagtttaaggatagccaatataacttctatatctgtgatcgttttcgtgtagatcgcatatctcataggtttgatagttggtatcctcaatatcatatccaattaagttgtaatagctcctactttggaattaccgaacagtatttggatagagcgagccatccagactcagattgggacttatgtccaataaatccttatgacatgtatatgattactggttctagcgaatttagtaactactatagttgttcctcatcctcgtttgatgattatgataaatttttataaatgggagttaatttgccacaatctttatgtcaatttttaataagtgttgactcatttctttttttgtttgcagatatggacttcgagagtcttcttaatacctcgggaaaaaagggaaagaaaagagtcgctacaactgaggccttatcgggagcaaatccagaacttgtgaagagatcgagaaaaaccactacaaacaaaaaacgtacctcctaataaataattatcgagccatctgatgatcaggttcactccccgaccccagcccctgagggcattgaagagcaggccttacgatctattcaccaagtcaaattctcgagttcagaacccgagatggtctttttggagctctcttatcctttgtcacgagatgcaggaattaatggcccgtaagtttgctcgcagtatgcaacctccagttagcatcatttcaaatccttctaatcgggtgattgcgacttgatcaataatggaaactttgaggagttgtttgagagaagtttaaacctcaatctcttgattaatttctttcttcctttcttatttcattatatgctcttccttatctttcttctgactttactttcattgtaggaatctttgctgtctcacgtggcacattaaaggggcctttagaaaatcaaacagttgatatccgagcttcacaaatccatcagacaacgtgaggttattgcgaagcagtggaatgatgcccaaaaggagaacactcgtttgacaaaggatgccaaggagatgaagaaccacaaggctgagcttgaaaatgctaaaaaagaagccaaggatcatcgcgaagcccgccaaaaacttcaggaagaactcaatgaagcaataaaaaagcttgagggtgccgaggc

SEQ ID NO: 236793 - DNA, 550 bp, Cannabis indica
ctgaagcaatagtgggcaagaaagtagggatggaaccaatcaggatatgctcctggccccattccttttggataattatgggacaaccaatctttgttggcttcccttctaccttgacaacctttgcagtggaccttttaattgctcgagcttgcctctttttgaaaccttttgcagccttgcttctcaaggcttgcacagtgttatggacattcttcataccttttcctcttctagcctttttagttggtgtaagtttcttcacattctccaccagtttgggtaccctgcatgaaataggtgcctggttggcagaagaggttactagtaacttgtggaaatagattgatacttgtgttgcaattttttttttcttgaaaacagtaaacatgattagcacctaaaatttaaaggtaaagaatagtcatcatagttggagctgaaaaggagaatgggtctcattgggcgtgccaaaattatgttaagcaaaaatttcatatttagaatattaaaaataaatggaaaacataattttacttatgccaaattt

SEQ ID NO: 236794 - DNA, 548 bp, Cannabis indica
aaagggttttatttagggcacaaaacccaacagtgtccttagcaagggagttttcctccctcacgggcttgttatcaaggcccaatgtaggggttttgtgagacaagaccctgcatgtctgcagtggatgggacagttgagggcgtgagctgtctgccaatctcttagaaggatgtgtgtcagaaaaagagtcggggaaatgcccaaaaatatttaattttggtggtagacttgtttttttcacttgtacggaggggacaaacagtagtacgactcctaggaatgtgctgcacaagttgggaccaaatgcgataaggggatctgggaggttttgacccttcgcggagattcaatcatattcaaattatatccaaatgctccataggaccggtacgacgttacgagaggatatctttctcccagagctatatgttcttgagccccaacataattagtcactagttacctctcaactagaccccactcgacacctatttgtttgctaggaaaccacgtgtatcaacaaaaattcaggatagcaataataa

SEQ ID NO: 236795 - DNA, 1386 bp, Cannabis indica
gatttgttagtttgaaagcgcaagaaagatactttgaattgcaaaagagagctttcattatggatggaggtatcgaatatgatggcaatcccaccccgaatagcccattattcgaaactatgaggcaacaaattcagacccgccaatgggagaagttcgtgaatgttccagagaggattaatcaaactttggctcttgaatttctagcaaattttcctgaggaggaaaacacaagggtgagagtccgcaaaacaaatgtgcttctaaacattgacgccatccatagacggtttggtttagaaatggtgaataacgcatattacaaaaggtttctgaaattaatgattgaccctgtggacttggcggagacagttggggggttgagattgcatgaagtggatggggaacctcaaatgctttgttgctgtgaattgattcaagttgctcgcgcttggatgttttttgtaagtgctaggcttatgcctagtaagcatttatcggattttacattggatagactcaaggttatttatgcaataatgaaggggattactgtgccagttgggggaataattctgcagagtttcgataacatggtcgcaggatctacacatgcaggaattggcctagcaggatttataactgagttgtgtgttgccaatggtgtgccacaatatccttatgataatcaagtacaaccacaacggaatattgattggacaatggtgcgcaacctaaagccccctcatccatatggtcaaccgcctcctcctcgtcgtaaccagcagccagaagttcatgtccccgaggaagaggacaatccaaatgaagaaatgcctcaagcggttcccacatccactcctcttgatgcggggatgcaacatatccatgctcaactcaactacattatccagcaaaacaatcatatccagagttacatggtgcaaagaagtgaatttgatgaaaatcaagtgaggcagttcaatcatttaattgattcgtggagtcttggggtcgaggacccgaattacttggcatatcctcctcgttttcatccctatgatcagccaccaccgcccaaccccttctgatgggggttcaggtaagtccttctcaccttgagtataatagcacattggggacaatgtcatatttagtttggggggagggacttaaaaattttaaattctgcactttaatttctgcattttaattttctgttttaattttctgttttagttaggaatggcaataagctaaacgataattgtatactgctgattagtgtaatgtgttctgaaattgcaaaataactgtgtgcttaattctgttaactctttggattagtttggatgcttgtataacatgtgtaagaatgcaatttga

SEQ ID NO: 236796 - DNA, 1661 bp, Cannabis indica
aaagagcgtaccctgaggagttcattacttcaggtatccttggctctcccgactatactatttccattaatcctgactatgagaaccggcttgttcatgaccagttattaatgggttggctttacgattcgatgacggaaagcatcgcgtccgaagttatgggctgtcaatcggcctttgctctctggacagcccttgagaatctctttggagcctattctcgtgctcatactgacgatcttcgcactcagacgacagacaataaggaagcgctcaacaacctatgaccgagtacctcaaacaaaaacatatgtgggctgactcactcgcacttgctggtgaaccatacccagaaagacatcttgtgtctaatgttctctctggcttggagattgaatatctctcaatcgtctccctcattgagtccagatctgaaacaacatggcaagagttacaaagtatccttctcagctttgacaacaagctcgaacgtctatctgccgttcctccaagctcacagacccactggtcagtatggaccgagaaatacaaaccagcaacatcagcaagggcgtggttcgtcgacaaattcaggttcctgtggacgaagtggaaaccgaggcaggggccgtggaggtcgatttggaggaccgaagcctacttgccaagtctgtggcaagtatggccactcagctgcaatttgctacaacagatacgacgaaaattacatgagaaatcaaccaccaggagaccaaaatcaagataaacagatcaatgctcttgttgctactccacaggttctaaaatgacgatagctggtatgtggatagtggggcaagcaaccacttaaccactaatgaaggacagatgaacaataaaacaatgtatggtggtaaggagaagattactgttggtaatggtaataagctgactatttctcacattggctcaagtcaacttaaaattatttctcactctcctttagttcttaaaaacttactccatgttccaaacattaccgaaaacttgattagtgtctcccaacttactgctgataatgatgtatctattgaattcttttctcttgtttgttgtgtgaaggatcgagagacagggagagtggttctgcaaggagctcttaaagacggtctctacaagctcaagacatctctttcctcacagtaatacaactcaagtgtccaacctcctatttccaagtcgtccccctttacggatgttgctactgcaactttagagtccaataaacctagtgttagtgagtctgtcttaagtttgtggcatagaaggcttggtcacccttctcatgccgtgttgaatcaagttttaaaaactattgatgtaaggccttttatgaatgaaaaactagagttttgtgatgcttgccaatatgggaaatcccattgtttgccctttaaaaattcaaccagccgtgccccagggattctagactttgttcatacggatctatgggggccaacacctgttaattcccacacaaatttcaggttttacatccactttgtggatgatcacagccgttatacttggctctttcccttaaaacacaagtctgaagctctctcagcattcactagatttaaggccttggtggaaaaccaatttgataggaagattaaagc

SEQ ID NO: 236797 - DNA, 1050 bp, Cannabis indica
tcctatttccaagtcgtccccctttacggatgttgctactgcaactttagagtccaataaacctagtgttagtgagtctgtcttaagtttgtggcatagaaggcttggtcacccttctcatgccgtgttgaatcaagttttaaaaactattgatgtaaggccttttatgaatgaaaaactagagttttgtgatgcttgccaatatgggaaatcccattgtttgccctttaaaaattcaaccagccgtgccccagggattctagactttgttcatacggatctatgggggccaacacctgttaattcccacacaaatttcaggttttacatccactttgtggatgatcacagccgttatacttggctctttcccttaaaacacaagtctgaagctctctcagcattcactagatttaaggccttggtggaaaaccaatttgataggaagattaaagccgagaacactaagattggggggggggggggtgaattccaagcatttactgacattgtcaatcaaagtggtatttctttccaacactcttgtccccatacttcagaacaaaacggaagggctgagcgtaagcatcgacatatagtcgaaactggcctcacccttctagctcaggcacacatgcctctaaggtactggtcagatgcatttcatactgctgtacaccttattaatcggcttcctactggcgtactcaatgggaaatctccatatgaaatcatcttctccccgaaacccgactataagtccttgaaaattttggttcagcatgttcccgtgtctgcgttcttaccaaacgcacaagtttcagtttcactctaccaagtgtatcaatcttggttatagtgaagcacataaagggttaagtgcctcagtccccagggtcgtatctacatctccagacatgttatttttaatgaacaagagttcccatgtgaacatggattctttaacaactatcagcctgaacaaattgtcactcttgacactcctaactcatggttcactcttcccactgtcacccgtgacacttctac

SEQ ID NO: 236798 - DNA, 613 bp, Cannabis indica
gatgttaatgaaacatacttggtagtaaatctagatcctggcaaaatatttccaacagtagcaacaccactactcgctcagaccttgtatccaggcgtggttggacattgcggtcattctctttctcttggtccatgtttcgtggtcaaggtcttgttatccttgtaccatcactgttatccaagtttgatgccttgtttcacatatttttttaccattgactaagttctcttgtctagagtaaactacatctaaagtagctgaattattttagcattgttgaaaaaaaggggtaatgaagggtctttaggtgaccaaaccctcaaggagtccttctaggtctcaccctcaaagagggtcattataggttaccctcaaagatggtcttcatatgcccctttttggagggtcttcgcaggtcaccctcaaagaaggtcttcacaagtaacccaatgggggtcttcgcatgtgacccaaagggggtgttcgcatgtgccctaaagggggtgttcgcaagtaacctaaagggggtgttcgtaggtgccccagagggggtcttcgctggtgccccagaaggggtctttgcagggggttgatgcaccctcagtggact

SEQ ID NO: 236799 - DNA, 804 bp, Cannabis indica
tctctctctctctctctctaggtctcacgtgcgtacaccataacatgtgtgtgagattagagaaccctgtcccaattacagcgttttatgagttaagtacacactgtaatacttaaattaattcatcaaaataagatctaatagcccactttattcatgagtgttgaggcttgcttggaagatcaaggtttggattcttcatcaaaagttcttagattggatgattattaactgtgctaaaagaaacaaggatacttaataggcttcaagaggtatgatctttctttcattagtatagatttaatctatatatattatgttgagatccttgggcttatggttcatattagataaaaattatttttatcaaattttgcttatgctttataactttgacatgggccataaaaactaacatctttgagtaatcacatgtggaggcttagtgctaaccaacctctgcaacggaatgttctcagccctagcaccaatcagggcctcactatttataagaaattaggagccttgctcacgcaattgttccatcaagtccaaacccgagtttagaagactctgtttagagtcatctagagaaagatcaatcggagatctctcatcagcactagtagtgttagatatctccataccagtgtcttgagcaggaagagcagcttcagtagttctaccgctcttcctcaccttcttctttgaagtagttgaggcagcaagaatgccttgaaccacttcctttactggaggatcagtttccttcaacaccagaatctttctcttcaagttcaaaca

SEQ ID NO: 236800 - DNA, 1076 bp, Cannabis indica
aaattctttccagggattgggatcgctttcttcttgtaaaaatgtcccaatctggttcaaaaatttatcgtccagaagacttagaacttgaatttcctacaaaatcaaccatcccttataaacctaatccctcaaaacccacatccaaattagagttaaatgatgttagggttagggaacatttagtgagagcccatcaggaagataatgccagtcgccacatgcgcttcttgcaagaaatcatcgaaggcaaacactggttcttgcgagatgtagcttggccagaacctcccagtgtgtcctttattcctttggctaagcctttgtttttacccaaagtcacgattgcttttaaactaggtgacttggactttgaaataatgtatcccaagccacgtacatcaaagactccccaggatcctaacgtcacctttgatgtcgagttaatagaatcgaaggtgcgaactatctcaggctacacaggtgatatactgagaacctgtagaatcgaacttgggcgagtatgccaagttaggtcagtgcaagctggtgagtttagttgttaccccctgcgcgtcttacaggtgagacccctgagggagccagtggtgagaccagtaccagtggctcgactggcataggtgcttggactcctgaacacatcagtgcaggggccatacttctcctccaggactatttcaaggattacataaaccaccttggggttgccccattttagctaaatcctgtttcctacagaattcttgccagttttaaggtcttgtataaaattctgaagtgggagggccctatgccagtggaaatcaagtatctctactctgttaaggctgttccagcaaggaataatgccgtagggggcttctattatctcggtgctcactctagcgagcctaaaattattgtggacctgccaaacaaagtgtctttcaaagatgacttcttttggacaattggcctctccccaatcggcataaccacctttcgcaaaattcgtaagtgattattttcctcatgctcggttggattaatccttgtctttccattttaagttttct

SEQ ID NO: 236801 - DNA, 2207 bp, Cannabis indica
tttacaaaaaaaaaaaaaatggaaatatgttttgattgtcattatacacatattgtcaatttttttatgtttcttttatgataaacttaccttattattctttgtttaagtttggaatgctgattctagtttgttttttcttgctagtagaatatacttgtcctcaaagttttgggtttatctgcatcagtacttcccaaatcccaaatgcaacagtcccattcgagcaactactttgatttttactaaattaaaatcaatgaagttagtccattgagtttcacaactttgttaaaggtttgtacgaagaaacatgtttcttctgtctgtggattgccaacttttagaaacaattgtaccaagctgcagattcttctgcattgtaagcattattaaaacattgagacaaactgtataataatgtggttggctttcaacttgtcactgctgagttaatgtgggaagttttgttatttggttgctgcagccacaaaggagcagttactcttagacagccttaaatcaaaatagcaggaatttgtagctgattcacatgagcgttatgttactttgtctgtaataacttggtactttctttgtaaagttccttaaatttctcaacacttatatatgcctatttaaaaaaggtaaaagaaggttctcattatttcattaagcttgttcttaattaggatgggtttaaattgtatgagtattttttttaaaaggtgaaaatgattatctacttgttcatggaaaatttcttaatccaggggaatcttgagaccagcagtcaacatgaaaaacttgcttttgttaagcgatgtaattatctctgaatttggtatgagcacaagagcttggtgtttgatttttgatgttattgtaatgttggtgcttatttctctatgccattagaatgcttggagttgtctttccagttgcagaatagaaactcttgagaaggatgctgtccaaaatcttgtacccaatttatgtttacccttgaacaaggctttctacatgcctgaggctgtaaatatccatcctcaacgttatgttcaggtctgaatcataaatccatgtcttagtcacatataatatatatgcttttcacgacttacaatctgatggttatttgctaggcgctttacacagcgtgtaagaatttagcaaaagaattatctgcatctggcattggtgaaaaacagttgcacttgcacaagaaaaatgttaacaaacccagtgatttagaaggtaatttctcattttttttttattattttccccaaaaaaaacaccacttccaattcgaagtgtttattttcccaaaaatttcacttttcagagaagagtatccagagactggcccttccatactttcagatgcttggctagctatccaggggcctcgaagtttgtacatgggctctacatgggaatggaaatcaagaaactcttctccaaatgtctcggcatcagaatcctctcaagccttggatgaacttctgcccaaggcatgtgccatttatccagatttaaataagtggagtttcgctggagctcgggctggtctgagggcaatgccaccactcactgcccacggctcacttccacttctaggttgtgtcaatgacattgtcggtgagagtaagggctgcaaatattggctgtttgcagggcttggtgccaggggattgctgtaccatgcttggcttgggaaactgatggcacaggctgtgcttgcatgtaatgaacaattaatcccatctgaattaacctcatggcgtaagggaactcaataattagctaatgtagttctatatttcaatatataaaagttattattattttcagaacaaactttacacttaaaattttattgagatgaaggtaataacacccaatatgaagaccagtattattctctttcatcatgctaatattatttagtaattgtttgtgccatgttaatatggtaacattacgatggcactttgattataataagaattatccattacaataaattgttatcaaacgtaagagaagtagaagaaaaggagaagagagaaaaatatgaattaaactctggaaatgtaattcttgtaaaaaaaaaaaaatactgaaagtgacatgcttatcaaaatgtgtactattttttttttctggtctaagttagtttttttggtttctatttggacttt

SEQ ID NO: 236802 - DNA, 1172 bp, Cannabis indica
ccttacaactgggaaattttcacaaagttgtttccaagcctcttacaatagtttcgcacaacaaaggactattaatctctttcttggattgtggtagtgacgatctcactataaccgggttgtttacaatacttgtgccaacctcacctcaatcaaaatataaaaatttgttcgaaatttacaagaaaattcactctagaagtatgataatacaatagaaacctagagtgataagatagcacacttaaaatgaataaatacaaattttggctcaaagtgtgtgaaaaatgtttgttggattttaaacttgggagctcattaatctcacttgaataggttaggtatatgatataaatgctcagccaacttaattttttgagtgaaaattgagtttatatagtgttggggtgaaaaatagccgtttatagccgttggacgcagaaaacgagactgccagtgggcaaaccagttctccgatttccaaattgatagaccagtttcaggtaaacttgttaaccttggttaacctcttttcatgcagtgggaaaaagtccattttttgcactaaaacgaccataactctctacttaattatcctattttagaaatttaaatttcgttctcttagttaaatgaattgtgatctagaaagtcaatcaaaaaaaattttgaaccatcgggtgagaaaacttttcgtacaagtagtgagtgggccaaaatttgtacttataaactctagtgtgctatgcaaatcactttaacaagactaaagtaaatttataccatttgatttagtgtagtcttgatgtagattagcttcctagcttgatttgcatgttttgaagtgtgggtgtgccccaagtgagcacgcagacctaagctctcttggtcacttgcaattcaccaagtttcatagacctttcttgagaattttctaggggttcttccgagtgtaaagatgtggaactgaaaaaagaataactttaagaagttaatcttgctagcaagtgattttgacacaatatatttgaactaaaacattgttttcattcatcaattggtctttattgttgtgcaacctacataagttgattctacaagcttaaaaaataaaaaaatcctcttctagaagtcaagttgctaccctcgcctaacatgccaattagaggcca

SEQ ID NO: 236803 - DNA, 1377 bp, Cannabis indica
ccttgagtgatagagtgagtggccacacatatcaagtggtatctcaatcatagtgtgtatgactgtgaagaatccaatcaccaagaaggagaatttggctcaagaaggagagaaagagatccatgttcagatcttgataatgctctgctacagaaaggaatcaagggctagagatctgaacgaaggagtcattatatcccgttgcacccaatgtaaggttttcttaaacccttatgtgtttatttcattgttttagaattcatattaggatgttaatgaagcatacttgttattaaatctagatcctggtaaaatatttccaacaccatggccggctagcttagtctccacagaggcttggcctgccaaggagtgcactgtaggctttcctggacacttctacacgtggacaacaggctatgggctgctaattgggctgtaaaagcccaacgaaatggctgaataatatctagaatcaagggcactttggtgtcttgtaaatatctaacaaactatacgaatattatgggatttgaattgaaacttaggattttaggtctcctatataaaggccttaaccttagcctagaaacctaagttgcctttaagccaaaaacgtgtttctaaactctaagtctctgttaaactctctctctcttcctcacatcctctctctcacatgtctatcctagcacatctcaacacttgagttttgccagtattaattcataccttgtaatcctaagggtgctatagaagatcccacctatagtaatctagatagtatttccctcggtataaatattacttaaaggggagtaggtcattacgcactatcacaagggagtcgaacctctataacaaatgttgttgtttattgcttttcattcttatttctgcgaacacatagacaacgtcagattcatacaaccccactgttggttgattactttttgaggtcaacataacttttaagtttgattggataaaactattttaattagttaaatataatattattattaaataatattgaagagagaaatatattattttagagaaaataattattattttaattcttgtgaaataagagattaatgagaattaatcaattattgtttattggtagaattaatcataaatcttatttatggcaaaattgagaaatcaattttggaccttaaggtgtgtgtgagattaaaaccctaatctcattacatatcttagttgtacacactgtaatacctaaatctgatcattctttaagatctaatagcccactctaatcctgagtgctgatgctaacatggaagatcaaggtgttgattcttcaataaagttcttttattgtatgttcgattgttatacgaaaag

SEQ ID NO: 236804 - DNA, 1361 bp, Cannabis indica
tttatctgggctgctgatatccttttgcgtattctcgagaatgctcttgaggctggttccattagagatatcagtttaagtagggatggccctggactctcccatctgttctttgcgaatgaccttatgcttgtgggtagagcgactattgcggaagcaaagggatttcggtaatgcctaaagaaattttatgattggtctggccaacgtataaacaagcttaaagcctccatcttcttcagaaataacactagtgagggtatgaaaagaggcattctccaagagcttaggctcaacatttccattagcaacattaactacttgggactccccttatttaggtcccatcaaaaggatgttgattttaacttcattattgagaactgtgtttcaaagatccacaggtggaaattgaaaactctatctaaggtcgaacgtgcaaccttgatcaaatcggtgggtcttactatgccagtctacactatgcagactaccaagctttctaagaaattcgcatctaaaattgatggtatggttagagatttttggtggggttgtgaatagggcaacaaagctatctatttgaaagcttgggatcgtatttgcctacctaagtcctggggtggcctaggtttttgaaagactttggaaattaatcaggctttgttgcaaagttttatgaactaagtttctgagaggcaagtcattcttggattgttcctacaaaagctcggattcttggttctggaagaatgttgtgaaaactaaggaaatccttaagaaagatgcatgcaagctgatatctgatggggaagagacgaacatttggatagatccttgggttattcatggtcaggatttttacccaaagccaacttcggttgggctaggggaagtaacgaaggttgtgtaactactgttagataacggggactgggatattccaaagcttcgaacgattttcgacccaaaaacgattaggcatatcattaaaggtggtagaccctgtggtcagggtagtgacaggtgggtgtggataaaagagcctaataatttatttactactaagtctacttatcttatccaagttcttaagcgagctactgcctacgtggttgcccccaccttgtggaacaaactctagaacgctaaaattttggagcgtcataaggtactctggtggtgtgtaatttttgatgctcttcctattagtggcctccttgctaagagaattcaggttgatgagatttcttgtcctctctgtggagatggtgaggagtcgatggagcatcttttcctctattgtaattttgctttccacctttggagtgttgggttttgtgccctaaataaaacccttt

SEQ ID NO: 236805 - DNA, 658 bp, Cannabis indica
ttaagtcaccatcctttagtattttgaaccaaaaagtcaagaagactccaagtctaaagcctgagaacttaaaaaaatagcctctcaaaagtcaaccagggtgcctagggttttacccagtgcccaggttgacatcccgagctagggtttcaatttttgggtccgtcttagtgcaaatggctcaaaatttgtactcatacataaataaaacctgtcacaaacatactagagacaccaaaatcaaaattagaatacttcctgttcggagcacctaggcacccagtgcccgagccacttggtgatgcacccagcacccaagttgacatgttcttaacttatggcgctttgaaccacaatactgaagatgtttcccaagaatttcatttatcttcatccaaaatgaggaaagaaatgctttcaggaaagaattggactaacctagaggcaaaaactaggatccaacacctaagttgacctagtgctcggtcccagtgttggaaattattttaccaggatcttagatctactcgcaagtatgttgattaacaccctaaatatgacctttctaaaacgatgaaataaacacatataaagtttagtaaaccttacattcggtgcagcggaatataatgactacttccgttcagatatctagccc

SEQ ID NO: 236806 - DNA, 706 bp, Cannabis indica
aaaattttaaatttgtaagcggcataaaccaaataaatttttttaacgacgtaagtacccaatgttagtaaaactgtaatttttatctatttttatcagtacagactctgttagtaccttaaatttctaactaaacttagttttttaaattaaaaaaagatttaaaagtaactgatactatgtgtttccgtccagacccattgatttagaatctaggctttacatgtatcatctttaaaacactaatagaatttgtactgacaaacctggacgaaaattatagttttattaacattaagtacttataccactaaaaaaatcattgaatttatgctgattacaaaatcatagaaaggaaacaattttcattccattcttttgtttggttgcattttaaagtattggaatgatattataatggaatgctctttccaccattttagtggaatgactattccattttacaaaggaaggaaagaccattccagtataacaagagaaaaaatttaatgatttttttattaatttttttttatacattttaaattttattacattccattcccattcttattcctatattatcattcctcccaatcaaacgccactttagagcacttacatcaacttctctactattttctttaaaatacttcaccaaaactctactttcttaattttacccttaaacttttactttacacca

SEQ ID NO: 236807 - DNA, 636 bp, Cannabis indica
taattagctccagttttgagattgtaacctaacgttgctccaggtaagaatgtgtcccctgaatgttgaaagctctgccataagctgtctcctgttttgtcatctttcaaaaccaagttaccactatctgaaagctctacgattgaaccacttgatcggacaggaatattagttgaccagataacagacttgtttttaccactcaccagctccagatttccgttactatcaatcgtgagactttcgtaagatgagtctacaacttttaatggtttctctctgttagccacccagacaacagtacggggtgagatattcttataccaaatgcccacatacagatttgcagaattatttggagtaaagaaacctaactcaaaaatttggtttggggagactagagtttgtgtttgagataaggactgggatgaagttatgttataaattgcatagcaatattgggactgaaaccagaagaaggataacagaaatatattgaacatcgacatgctacacaatacaatctcttgtgaatggactatttttatcaaaataacattcttccatattattaaattggtatgactatatttatattttcattatattcaattttaatgtttctcaattttcctt

SEQ ID NO: 236808 - DNA, 685 bp, Cannabis indica
aaatatatttttgacaaaacaaaacaatgccactaaaaaataattgaatgtagatgggaatggtacaaatttatttaattagaaaagacatacaatagttcaaagaagagtaaaataggtgtgatccataatacaaaaataaactaaaaactaacttatgccctaaaataaaccttcacctgcactattccacttctttgcagaagctttagcacacaattccttgagcccaggagtcttaagaatgttctcacatgtcgccaattgagagtctagttttatcatttcctgatgtagcttttctcttcgcttcattatcattgttggaatttcactttcaagtctttttgcttgaataccacggaaaataggtttaattaattcccatacatgggaagttagaaaatcaatttcgaaggcaacactttctttaataaaatttacattgaaatcccattctaaaagaagatcgatggtgatgtcagcaattttagtatcgcgcattcttttcaaagtcttgcacaaaataaaatagatgacgctcttcccttctttcgataattttatatcaccatcatcagaactaatatctccatgctcacttagtaatctttttaaaataggtgctagcggatgaggtattttataaccttcgacagtcacaagctttaactcaagatcagtg

SEQ ID NO: 236809 - DNA, 766 bp, Cannabis indica
tatattcataatttttattttcattattattttttaattttatttaagtcaggtccaggtacgagtctggggttagggttgtggtccgagtctgggaatggggctggggccagagttcgggtcccaaggttcagattgggatcaaaatttaaaatattgatttaagaaaaaattttatggaagtgttttttaaaattttaattcttaattaaaatattgaaaagtgaaaaacagttttatagaacatgtttttaaaaaatattttcaattttctaattaaaataaacgattgattaaaaaattattaccaaacccatcctaagattttagatatttttttttaaaaaaagaaaacaatgctagctctaaaatataagatgaagagaaagaagaatttgttatggaaatataatattgggattcgaggcataccataacataaatatcacactcaaagcaaccaaactgatttttacatattctttttaagcaaaaagtacaactaaaatctacaataaattaaaatttaaatctaaattattaataaactgaaggacacaagtaaagttaatttattattattgtatataatttaatatactattcggtggtggtcctaagcagtaggcactaagcactactaatacttaagacgaatattttgttttaaatttttacaataataaataaacatttttaattatattattatttaataagaaaattgaaaaaccgtgttttcgcaaatgtcagttgtatataagaa

SEQ ID NO: 236810 - DNA, 803 bp, Cannabis indica
aaaataaaaaataaataaatgtaatgcatttggaccctctacgtgtccatatttatgagttaacggaagtggtagtaacaggtgtaagaaaattataacattgggtatttttgcctccaaaaataaagatattgtatttaagtgtataaaatctgaaacattagtatttgtgccgcaatttactcccacattttacatattagatattagatttttttcgaaagatttatgaaatctctcgtatcttcatttttattgtttaattatttatttattaagaaaattctaatttcttaaaaataaaatataaattttattttaattttgaaaatgaatttatatatatatatataaaaaattaattaatagtctaaaaagttgccctcaactcaagtgattaagtagttgttttacaacaataataagcaaataatttgaaaggttgaactaattcatcacatatttttttgttgtaaaaagtatattttatataatttatagggtaaatagcggcataagtacccaaagttttgagtttgtaagtggcataaatccagtgattttttttaatggcataagtacccaatgtttgtaaaactgtaatttttctctattttcgtcagtacaggctccgttttaaatttattaaaaaaagatttggaagtaactgatactacatatttttcgtttaaaccaaattatctaaaatttgggtcttatatgtgtcctgtttaagacaataacagagtctgtactgatgaaacaggaagaaaattacacttttataaacattgggtacttat

SEQ ID NO: 236811 - DNA, 1489 bp, Cannabis indica
ggtccaatctgtaacttttgcaaaacacggggttcaaaatagtatttaccctttaatattagcttatttgaagttttgaatttacaacggacacttgtagactttgggaggttgtagcactccccaaaaaagttttacaaacatttatattatgtatattaagtatatttaaacaaaattatacctataagattcaaattctaaattattagagagaaagatgtatagtactaacttctacatcttctttcagcaaattcaaaaactaaattcttttttgaataaacgacatacatagatttaaaacaataaagttagacctcatgatcattacataaaatatcaattggtatggaagaaggatccaccatactcgaaacattcatagcaaaagcccacctagcctatgggctgtaaagttacataatctatagacagataaaaaattacaacttaaaaaatgataagagagacgtttaaattgggtaacatagttaccaatactctaactggaacaagttcttgtttgcatgcatcctgataaccatgtctgactcactctcaatcatcacaaaaaggtgattcacgaaactgttgtctcaacaactaacagacaggctacaacttctccaataagaggatcagaaaagttgagcttgttggtagctatccacaaaattgcctctgtatgatccctagctaaagtcaccacacacatcgagccacagccaactttcacatcacagttgatcttgacacgattacaggtggaggggtccaaatagaagatctatcattcctcgatgaatccaacagacaagaactataatctatgtaacaaaaagagattggattaatacaatgcttgaggttaatcagagaataattgtgtaccttgtcattacgggctttccaaattgtgtccgaaccataaaggaacaaatcttgaactatccccgcctctagttttaagactccaaaggagatacacctagtcccagacccgagctccaaatttgagcaccgaaataactccccagggggacgacctccataggtgacctgcaaaattgcagtagaggaatagatgccccatcgtttcctaaccctccccacaaagagggcaagagacgtcctcaatgttcaatcttctagcgaggagagatcgaataggtaaagcgtgtgaaaggatgctccactagagaattttgtggcggtctaagatttttgagttccacaatttattccacaaagtaggagcaacactacacaagggggcacgctgctaagcttgattgaggtaagcggattttgtcaaaaattgaccatttgattctttagtccatatccagctatctctcccttgcccactaggtccgtggctaaaagtattagttacaaaaattacaatttattgtgactaaatgtgtttttagtctcaatatttattgtgactaaaactaaattagtaacaacttgcaactaaatg

SEQ ID NO: 236812 - DNA, 767 bp, Cannabis indica
aaattattgaactttttaatgtgtcatggtttcgagctaatctattcgtgcttatgtgtcctattttcgggcttattgtgccgtgtcttgttgtgtcaaagcccatatttttcatgtcgtgtcatgtctaagttcatattttttcgttccgtatcgtgcctaagcacatattttttcgtgccgggtcatgctcgtgttggtttcacgtgtcaaaaagtctggcccatatttacagcactaacaacttattcaagttgaggcctattggaaattagaaccaaattactcgtctaattttgctgtcacgactgtgcagaaaaagtaatgactttgtcaaagctcagttttcagtgtgttttagttcccatacccttgctgtacaagcagatactgaacaaggtttaggcatgttactatctgactagtgctggcttcaaaagcgcctctagttgtcatgaaatagtttaggtggctgatgtaggtagaacacctagggacaggaagtaaagggcagtgggagtatcataatgcacatcaacttttgcaaatgttggaaagcaaactactaaatgtaaacgaacatggttgattcacattcaacagctgtgctgaatgtggaaggttcaaattcaaacttcacagttttttacagtaaagcttctttgcagactttttgatacaactccttgttggtttgcaaagctcttatcttcactgtgtgtttgctttgattttgagcttatgagttgcctttgtgttcataaatc

SEQ ID NO: 236813 - DNA, 731 bp, Cannabis indica
gtcagcacctaagcaaacggagatcctaacacttaaacgggcaacaagtgacagaccagcttcctcttggccgaccaaccttgggactgcaccatggtcggccagcctgccctccacagggcctagccggccaagagctgtcctgcaagatttcctgtgcacttctacacgtgaacaacatcttttaggctgtgaattgagtcctcaaagtccaactgaatagctgaataatatctaagttcaagggcattttggtcttttgtaattaactaatgaaatattcaaatatcttgggtttcaagttgtaatctaggatttaggcttctcctatataaaggccttaaatctaatctagaaggctaagctcagttaagcctaacacttgcctccaaactctaagtttaagcctcacaacttctctctccttcacttcctctctcacacgcccatacaagcatcatctcaacacttgagttttgccattcttaattcatacattgtattcttgagggtgctatagcagatcccatctatagtgatttggatagtattaaccctcggtattaatacaactaaaagaggagtagatcattacccgctatcacaagggggccgaatctctataacaaatcttgtgtttattacttttcattattgtttgtacaaacatgtggcaagcatcagatctaaacgaccccgtgttgggttttatgccctaaataaaacacatt

SEQ ID NO: 236814 - DNA, 1305 bp, Cannabis indica
tttttttttcttcctcaacagcatgcttactaccttgattttcaggtgagatttcttattgacttatcgtgaattgtaaacgaaaaacagtctgccctttcttttcattgtaaaatctttggaaagtgtctaatgctgcaaaatctgacaaaattttcttttattattcatgtagaaccgacgaccagattacctatcactcttcatggagaaacttgtgtcatgggattcagtcagttctagacttgaagcagcaaaggctcaagctgctgaaagagagttagaaaaagagaggaaaaaggaggagaacaatccatcagacagtgaagatgacgaattattagtagacagtattagtgatgactcagaagctgaatgatttctttctattttgccgtgacgtgagaatagtaatcttagaaattcctggtaaaaaatattatatgtgaaggtgatatagaggtcagtgtgtgtcactactcaggactcatgagatactcataccaagattttgttatttctattgtattgtgaatgtctatgcttgagtatgtagttctctgttgtcatttaaaataaatttgagaacactttcattctctgaacatgtcatgtacaaaatattaatcttaatcatgtaacttgtctttagcttcttgttcggctgctttttaaaaatcaaataatctactaccaaaattcactattgaatccaatcttctctgtattggagagcaataaataatcctgtttgtaggatttcattatcttataagagaagtcttgagagataaaaggctatctaaatctgaaagctttgtatggtcagcacgaggcggtccaaacaggtcccaaaatcgaagagtctcatctgcacccgctgataccacagttaacccatctgggctctgcaggcaaaccagaaaaagaaatctgaagctttaaagaaatcccagctagattttaatgaaacatcggttgtagtatatccaaacctgcgaaagatggagaattcgggatgcatgccgctttaagtctcccactttagtgaaggatggatacctccacaaacatagctgattaccaaggccgccataaccaaatccatgtccactcagcagctccttgtgatgcctgttccactcaagtccacatatctggaaccacacagagaagccatgttttacacaggcagaaaaagatagtgatggattctcggtcaatgataatgttggttaaaataattgtttaaacacaaatgagaacaatgaaaatacaccatttacctgagcataggtctctatg

SEQ ID NO: 236815 - DNA, 1151 bp, Cannabis indica
taagcttctacttttgcttatagctagaagtataagataagtataagttttgacttatttttatcgtttggataattattatatgaagatgttttttttttttaatgaaaagtgattttcaaagtgtttggatatcattaaaaaaagaccttttgtgagtaaattaagaattatgtaaattattttaatgttcaaaatagtttctcaaaagtttgtttaggaaaagctacaaattttagcttcttctaaaaggacttttaaattaaaagggacttttaattttttatccaaacattcctaaaaggatttttttaaggtaaatagcggtataagtacctaaaatttttaatttgtacacggcataaactcaatatttaatttaagcggcatgagtacctaatatttgtaaaactataattttctttcaattttgtcactacagactctgttttgaatttattaaagggattatttcacaaatacataaaaacaataaaaaaatcacaaaaatacggttgtacgaaattttaaatatttttacgattttatttacagaaaatatggtctttttatattgtactttaattaatttgttgttgttttgatattatttagatgttattttcttgttagttttatgtagttttcttgttgttttgtgttgaatctataagaaaccgtaaaaatataaaaaaaaaaattaaacataaaaatataaatttttttacaaaaaatagtgtctcatataattattttcttattaaatattaaatttatgtcatttacaaacttaaaactttaagtatttatgccgctatttattttaaaagttaaaaaaacttatagaaagtaaatcaaatagggcttgtaattttcattaggtcgagaacgttacgacgccgtttctgaaatgaagaggacattttgggccttatagggtccattcaaggtcggtttgaagtaaactcggccttttctctcttttctctctctaatacccaaaaccagaaactctcagacgaagttccggttcactactttcctctgcttcaatggccacctccaatggagtccaagtttcacctttaggtacccatttttctataataaattgtcttccttatttccttttaatattttttttttatttt

SEQ ID NO: 236816 - DNA, 1099 bp, Cannabis indica
actacctctttggtatgaaaattttaagtcttttcttctctaattttaaaaacattcttgaaatctacttcttttgtttgacttatgttaattgaaaccagtgaccatagaactaatggctaatgcagatcaaaccaaaaggcatcttttagattggaagaaacgtgtctgcattattgaaggaattacacaaggtcttttgtatctccaagaatactcgaattttcctattatacaccgggatgtaaaagctagcaacattttgctagataatcaaatgaatccaaagatttcagactttggtttggccagaatgttcagaaaagatgaatttgaagcaatcactggtcggattgttggaacatagtaagtaattagagtgagtactctatagcatgtgttgtatgtttgtgctttttcttactgctgaccatttaccttgtgcctatgcaatattcagtggctatgtaccccctgagtacattagaaaaggcatatattcaatgaaatatgatgtttatagcttcggtgttctgcttctccaaatcataagtggcaagagaaatactagtgactatggtctgaatgaaaatctacaccttttggaatatgtaagttgttttctacttataagttttatcaatgctgtgattcaaagagtttccaataaaaatgtgtatattgaatgagtccactatttcaggcatatgaactgtggaaagaaggtcttggagcacaaatcgttgatcaaacactagatgactcttcgtcaacttgcaaaatagaaagatgcatgcagatagctctactgtgcgtgcaggaaagtccggttgataggccatccatgttggaggttttatcgatgctcaagaatgaagctgcagccatcattagtcctaagaaacctgcattctccattaatgaaagtggtgagttaaataaagaatgttgtctatgcagagcaagaggagagctctattctattgatgatgcaacaatttcgctgttacaaccccgttgagggtgcaagtaggcatatacaaaattgtaaatgagattgttactagtctagttcttaaaatattgacttgtgagatga

SEQ ID NO: 236817 - DNA, 3484 bp, Cannabis indica
tactgaataataaagaaaaatattatactgtaacattactaattaataagctttctaataagaatatgatgagatatatattactactttctgttgatgtataccttctttcaatcgatgaatcttcttgatatgatgaagtaataataatttcactcagccatgatattactaaacaaaaagtaccacaaaaataatatatatgatataacaaaatagatgtggaaagatatatatgatttccaaggaagggacattttaaatgagacaaatcgaatgcgagcatgcatgaatgtgagcatacctgcaagcaagcgcgtgcatgtgtatgcatgcaagcccgttagcgtgaaagtgttacgaagtgctgaatatgctatttaagtgagaggacaaaatgtgaaatttgaatacatatggacaagaatgacattccaggaggaatcaaatgacaaaatgtgcaacagagaggcatacaacaacacattctacaaactctgaaagcaaaggtacgagtagcggagacaacacacctccaaggtctgaggacccgaccaaaggtacaacctcattcctgcaaactggggacgacactcctacaatcggagaccacactcatgcaaccagggaccacttggcaccagaaaaaagtacgaggtgtaacctgcgacgtgcagcttgaaagcgacaccttattcccttgggaccaccgtgtacctcatgtcattagagtctataaataacttgaccttgagagcaatagaaagttcatcatattctctcaattttaagatagcaatttgaattcatgcttcatctttcttttcttctaagatctgaacttgaagcatagtttaattttccgaccaacaagttagttgacgagttctcaccatcaatagtttggcaccgtctgttgaaacaacaagcttaagccaagtcgtttctttacacatacaatcaatacaaaatgcgtagatgctctcgtcgccttcaggttgtggagattcgccttgacgatgattagttgatcgctttggggcaagaccttcctccacacgtcattagagaagaaggcgctaattgtcatagacctcaagtaagaagagaaaatgtgaacgttattcggcctcaagtaggaggagagggggcaagcaggtgaagatctcaagcaaggcaagtagacaatcgttgtgaagagatcgcggtggacgggcagtgcaacagagttaccgcctttgacacgaccaaaggtgaaggtggggcacaatggaagaaggtctcatcatcatgaaggcaccctccacggccaccaccaacactatgagattccagtacctcgcgacattgcccgagcaagaaaaacccaaactcaccactgtgagatgaactaaatgatctttgctagaaaaaccaaagactggaaactacggtggctaacatgcaaaaatcgacagagaagatttttgagattagtcaataattagtctctgcggtcaagaaacatcgattgtgagagtcggtggaggaatgactaaatcaatgcatatggcccagggcttgttaatctcaaggatcaatgcttgcaagtcttggggtatatccatgcaactcagaggtcaaccccgtaacaactcaggagtatagttagtaagatcaaattactaagttacaattgtcgaagaattttcataatgatgcgttcaaaattagatcttgtcataaatataaaatccatagatctctatcttatcattctaatgaatttttgaattatccaattattttgacatatatcgagagagtttatggtaaaaaatactaagactgttgaattgtgacaactggatgtgcgagcccataagccattgtgcgagcccttgagctattgtgcgagctcataagatagtgtgcgaggccataagtcgttggacaagttagggagtatttggctgagccgtggagtatgtgtgtgagtcgtggagcctttacgaaagtggctgtgaagcattcgttcaagccgtggtggagcatccgtgcaagccatggtaacatcggtgcgaggggctcgcatgcgaggctacaagacggtgagataggggcccgcatgcgagcccgtgaaggactcgcatgtgagtgcgtaagtgtggtgatgcgaggctgcaagacggtgagacgacgactctcatgcgatcccatgaggggcttgcatgcgagagtgcatgtgtgtgcgagtgcgatgatgcaaggttgtaagattgcaaaacaagggcttacatgcaaccatgaggggttctcaattgagcgtgtgcacgcgtgcgagtgtaacgctgctgcaagaggatgcatgcgagacaagggctcgcatgctcatatgcatgcgtgcttgtgtgtgcgtctgtgagaatgcttgtaagcatgcgtgcatgtgtgtgcatggaagcccgttagcgtgaaagcgttataaagcgtcgagtatgttgcttgtgtgaagaggagagaaggtaaatttgaatgcatattgagaagaatgatgttggagaaggaatcaaaggataatgcatggaacgaagagatatacaaccacaccttctacaaaatctaaaactaaaaaggtacgagtagcgaagataatgcacctggaaggtctgaggacttgaccgagggtactctgcaatctcactcctacaactagggaccaccctcctgcaaccggggacacactcctgcaaccattgaccacctgacaccagacaaacatacgaggtgcaaggccacctcccacacctataacatgtagcatgaaagcaacaccttgtccccttgggaatactgtgtacctcaggtcaggtcattagagcttataaatacccctttctgagatgtgaaagggggtcagaaaattattcttgtaacttaaccttgagagcaatagaaattttatcatattctcttcagtttgagataacaaattgaattcatatttcatccttcttttcgtcttagatctgagcttgaagcatggtttgatttttcgaccaacaagttagttgacgagttttcatcatcaacactaatatactacaaaaatacaaacacataatattttaataaaaagatagctaatatataaacacgttgagtaatgtaaatatatatttatttaacttttcagtttaattttatttatgcttgttatatataatttatacttaatttgattatattaataataaaatatatatatatgaaaaaatatatttttaataaaattgaaaaaaaaattatgttaaaacacttgtaaattttacaataaccgactcctgagggtcttatggcatcgtttattgtataataactgatgacatagctagggttctatggtatcggttattttatgataatcgacgccataggtccctcttaggcagagacggatacactaatgatagtgtgggggctagcccccagtaaaaaaaagtta

SEQ ID NO: 236818 - DNA, 1906 bp, Cannabis indica
cctttgtgacaattagattattgtgtaatattgattacatgttagtctaattcagagctgattagataacatgtaatttagggcctaaaagatctgaaaagaggtaggttaattttataatatgtcattcacattgagaaagggagtagtaattagcattaacaattgggtaattaaatcaacatgattctttgcccttatttctcatccttgattaaacaccgttcttgctttctttaattttcttgttaatctttatttcaaactttgtcaaaattatttttatttaccaaatagaatcataaatctagtttagtggtattcagttcaattccttgtggttcgaccgcacatgtgggagtttactacttgattacgtgcacttgggtattgttcatattttttgtaacatataccatatatactacagtcccagcataaccgaaattaaaagcgagcccttaaatagaaaatatcattaacgtttggactaagctttaaaaagttccaaactcgatttctaattcaaaatcacttcaaattcaacaagtaaacatcgaaactagtcccatagctaataaagaacaattctataaagtcagaatctccataaccactctaaatcacaaagccactatataaaaccaatcttttttaacttataacaaaattaacatataccttaagctttccctcttcaaagatttgttatccccctactaccagagcttagatcgctaggtttcgggttgaaaatcaaagaatgtatataaaagggatgagtgttctgagatataaaggttccgtttaattttgtactgttatattttaaacttataatatataagcttatcaaaactgataagttttaaaataataatataatattgataaaaatttcattattgatagttatcctatcattttttagccactaagaaacgtctatttctagggtatttgaccaactttgagtactccaaattatcttggtatttctaaaattaacttacctcaataatcccattaatatttttaactaatactgttgtgacatttttggcctccaataaagtcttcagggttgccaaatctaaaaatattttttatttcacaaataacttacattattatatccacctatttcagataaatcttcgtaattaacaattatacttatttatcctcttatcgcgtcttcagggtcaccgaacttgaaaatatttttattccacacatagctcatattacatttacagatgctatataaatctacataatttataatttatgcttattactaacttatagcaaatttaaattttatacttaaatagattagtaggatcataatcttacttattacgtgattaatccataatataaatataaatcctaattaccattaggcttatcgtgatattatactgtcctagctggtgaagctagtatggtgaaagggctagaattggatatgaagttgtggcatcatagactttgacatatcagtgaacaaggccttaaagaactgcacaaacaaggtatcattgaaaatttaaattcttgtgcctaaccattttttgtgtgttttagggaaataacataagttgaagttcactccaaaaggcacacaactaaaaagatacttgaatatgtgcacgctgatctttggggaccatacaaggtgcctactcacttcgataagcaatattctctttccatagctattaattatagtcggtgtgtttggacctacttgttaactaccaaaaatgagtgtctggaacaatttagaaattagaaaactcaggtggaaaaccaaactgatcttaaaattaagaaccttaggactgataatgggttggagtttgttaactctgaatttgacaagatgtgtcaagagttt

SEQ ID NO: 236819 - DNA, 833 bp, Cannabis indica
tcctagatgacaaccgcttcatataatgagcaacaccgtagcaataaggctgaaacccaaaatcttttaggggtatagttttttatttttattgacataagagcttttgagatagtatggagatgaccattatttctgttagtaatcatgtacacgagagagttaatgcaagaagactcatgcaaactaaggatcagatcatatccctccataaattactcagtaaatagaaacactatagactttctttaggatcaagtggtttagtacggatgcatctttggtgcactttatacatcgataatgatccatatcttgtcataaatgcatcgagagattgccatatttgacgacacagtgtccttgtttgatgtagacactttttgtattaggatgttgactcatagaagtgtcactaatttcttgaagcataggattccagtttgaattcataaacatgaaatcttcttctcatgatttctcaaactacatctcccctttttggttcagtattgagatggcttagttttcctttattttctgaaactacttgaattatcatttattcatttattattcagcttgcttgcagctaagtgttctgtagtctctcatgtggttttaacatgttcttagactgcataggttagctaagaaaataaataagtatttccttaacaagaagtactatattaggatatagatgaaatattccttgtattctaactgtgtacataacaataaagaagagagtaagatattatgtatcaagtgtaggattactttaggcaaattaaactccaaattaagcattttgagtgaatgaagcaaag

SEQ ID NO: 236820 - DNA, 559 bp, Cannabis indica
ttaaacttgacattacatatttatcactttatcaagaaaatacaaacaaaacaacataaaagactacaagtatactactctaaaatagacttgataatgttgttagtctcaatttatcggggatcacaaacaaatggaagattagtaacatgtttagtgctctaatataaacatttttaacttaataataattacaaataccgattatttataggttcctaaattccattgatatctgggcatttgtgtggggccatagattgcaaagctttctcaacttcagcagcaaggaaagacttagtaatgtcattattcatttctgttgtaaccatcgagagtattgcactcaaagtagcagagagagggtataattcattaattgcagaagttgtgaaaatggctgcaaaatactcctgtatagcagtagccatatctgcctttgaactgacttgaattcctatcccattgtgaagaaatttaattttattattgggctttttaggtgaggctttagcatggaaaaattttatatttcgatcaaaatatcaaaaattgcttc

SEQ ID NO: 236821 - DNA, 1155 bp, Cannabis indica
gctatgcttaacacttccaatgtgaaagaggttggtgctcttcaggagaagaccgtttctgttggcatcaatgaggtttgtgtgcctatatatgtttagaagtgttattatatttatatatatgtatattttggtggggtttgtttattattgttattgttcttgttttgattgaacagggtttgaagttgttgaaggcttctcttcagactaaaatggttcttactgatgtgttcttgaagaaatgatcatcaaatatttaatatgctcaactcttgaattaatgggaaacattatggatgatcatcttttgtgttttaggggtggggtttgttacataattagttttatatatggaatgttttggtgaaatgtttcacatgtacatattatatgttctcttatatgtattttgtatctctctcaagatattttgtataaggacttagggttcaaagtagtatactaaattatgatatatatatatataatgtcatttaatttcagaattaacattgcgcgcgctttctgttttcttaatattttttcaaatatccagttatctgcaattacaattatatgaaaatttgtacataggagtcacagataattggattttaaaaaggttacctttaacttagacattattcaatttcaattttttttttttgaagggatgggtaacagtcaattgaacccaatcgagaacagttccaattaatttagtttaaatgtatcgtttatttattttcgtgatattttattttattatatctgtttctttggtatatataatataattaaccattaatacaagtgaaaattatttttaagaagcatataatcttacccggccccaaaattttctatcacacactagtagtacactaaatccaagaaaaatgaagtaaaactatgaaaataataataatttgcaaattacatgtgaaagaaaagttcttaattaattgaaaattccactttcaactctcaagtactaacatagtctcttaacaaaacacataccttaaccgataagaagaaccaaaaagaagaagaatgcagggaacaataataattataaataaaaattaaaataataatctagaaacaatgaagcaagaagaacttgatatgatcatctttttcttctta

SEQ ID NO: 236822 - DNA, 643 bp, Cannabis indica
gtcatttaacaaaacaaaaggtcaaaaaagtaactttcgcaaaacacaaagtctaaaatagtatttacccaaatataaaataataatctatactttgtatataaataatttttaacatatatactggtaaatttagggactgcaataatatatatagataatagtttaacgggaaaaatcctataaataaacttttgtatatattaaataggtttttttatgtttaattactttaaaatacttatttttttacatttttacgaaaattcacatagcaaccaacaaagcaacctatatcgcgaataaaattcacatagcaacctatacaaaaaccaccaaagcaatccaaaccttaaatttaaaaaaaataataaaaaaatatattttaaaaaatatataaattaattctcctatattaaatatgttaaaagaaaaataatacatagctacttataatttaccccctgaaataattattttcagaacttacccctcaattaatattttctgcctccgacatcattgtcacagccttaataattaattttggtggcccttgcctgcattgaagaattttatcacattgcataagataattttgacccttggtttaaattattgtaaaatataactgtagatttag

SEQ ID NO: 236823 - DNA, 3162 bp, Cannabis indica
aaagagaaacaatcggcctaatagtaatagacaagggcaacgagccttggaccacctcagaacaatttaaatttttagtacatttcacattgtccaatgaacgatcagaaacatacaaccacaaaccagtagaaaaaaaagggcctttaaccgtacccttatcctcaacttgaacctcattaccataaatgacaaccggaggcgtgccacaacgagactacggcttgggaatccgcacaccttgcttcgacttccccacagtaataggagagcatcctatcactttcttgacatgcctcgaggaccgaacaaccttggatcccgttctcaacgaaccaccaacaccatcgccagccatcgccggaagggcagagcctcgacttcgttgaggaacaggcaacaaggaagaagcacggctgggaaaaaagaattagcacctgagaacacatccagatacgatgatgaagtagacaaccacagtccaaacaggggaaaggggacaccattttcgttctcaatcgtgactagataagagaggttacaacctctgcgttggtggcccaaacaaccacaattatagcagaagatacctattttttaaaatttgaactgaagccatttctttacaccagacaccaagtcaaaaaagcaacccgagaattgaggtttagcaatttcaatctcaaccaatatcttaagacacttgctctaggaggccggtttatcttcctttaaatccacaatcaagaccttaccagccaggcctcctaagaaatttccatttgtcgtggaaaaatattcatgtgggaggtggtggacctaaatccacagtctcatacaagcaaaatgtattttccattcatctctcgaagaccaagcctgaagaaccagagtataacctcttatgcaccaggggccattctcaaatgcccaatttctatccttagcaaggtcaaaaccaaattcaaagcagttagagttattgtactcctcaaattaggccactacagacacaggtttatgccaagttttagccacaaagtcaatgactgtggcttcatccacaagcattggggccaccacttttccaaagagacaaaaggttgataataccttgagagaggaggcacaaagagtcaaagtgacagaggcttcatttcctgaaaagcatttaccttttgcagggggttagtagcattaactaactccattaaaatagacaaaaaagatatagtctccaacaaaaagggagaagataataaggaaaaggataaaaaaaaaagcacaaaacacccacaccacacgagtcctagtcacaacacacaatacaaacacaccacacccacacccacacccaacaccactcaccaacacagaaacttgcacaagacccacaatagaccaacgaaagaaagagaaaagcgaaaaggggcacgacaagggagaagcaaaaaacagagagacaatacaggacaagaggagcaagggaaaacagagttaaaatggacactaaaagacagtagagaaaacacacaaaggcaaagaaatcacacagacaaaggacgtcaacggagaagagaaccagaaagaagaacagggacacaagactaaagagtagtagatgaccattctcgacaaaaatcaacattacataaagaaaaatagtgttaagtatctccaacaatcaccacatcttcatataagccaccacctttaaaaatagcatggattgcattggagcatacactttaaaaataaaaacaccagttaagcacctccaaacatgtcaagagctttgcactgtagggagataaattcccataaaccagctttgagaaggtttcgaccacttgttagaatttataccttgaaaatttataaacattttgattataaaaataacttgaacaatttaatatatagttgaatgttgaattatttattaataatttctatgtaaatattgaaaaaactttattcatatatgaggttatgactttacattgtacgaataattaaatttacaagttatgaataaaatagccagaaacatattaaagttatagaatttttaattaacggttgctagtacgattcactaatgtcaattacttgatataagcaatcttgattcggatcgctgatgtagatggacatctcagtagaggtattgtctataataaagattatatatgataggaccgatatgtaattaagttgtctttatcaaactagtcatttattataaagacctaattcatatcataaagacgatcaattactagattgacttaaatcttgagaaatcatgagctcatgtttatgttattagtttctttgattcactcgttaaagttttttagagaagataattcttacaacttctgttttgggaatctaataatgtggatggctggaaacttaaattccaatatggaatcctgacttttaaacggattgaatattgatttcctttatattttaattatggaactgaaaagttgtgcacgaatttagatcaaatggatctaaattatactttcactggcaaaataattatactaaaagataaagaggcaattagaagggtaaaatagtaatttaacaaactctaattatggaccagtataaggagggttagtcactgatattgattatatcaatgggtactgtaattaacctcagtaaatataattctgtaaatactaagtgtgcaatttaataatggaattaataaagagaaattatctaaaatgactttttttttgtcttattataaaaaatgacttggtcaagtttcaataacatttttatttgttttgttatgtttaaagtacccttatttatactttcatctctatctctctctctctctccctctctccttttttcacttcttcttaagctactctctttctctccttcttctttctctctttttatttctctctcttctatcaagctttaaaaataaattttgatcacgttgttattcagatgaacttaaaaaaaaataccattgcgatctactcttcaatgtgaacattttaagatgtgggatatttttttgctatttcgagaaaagaaatcatttggttgctaatatagtaattagttactgttttataattttttaaaatcttagttaacatcattcatttt

SEQ ID NO: 236824 - DNA, 1969 bp, Cannabis indica
aaatactaaaaataaacatcatatcgacattaaaaacgtgttccggagatccctgttataaaaagtttacaaaagactatatacgacaataattcaaaatacaaaattaaaatacacagcagatacagcgcaaaacaactcatggcaactcggcacacaggccagtggggtcaatatgtacattgttggagaagattgtcatctcatggctgctctaacttttccttgcccttacctacaccacagagcactcgcgagtcacatagactcatcaagaaaagtaataaggaagaatacattaaataattaattatacattttattattataaaatgattaaacaataacattcaatagtagataatataaccagccatagaaatagacatgctcatatattgcattgcctaataaggcaagcctgtgtcataatttaatatcatatataatatcattgcaccacctaatcaggtgagcccatgtcacaacctgacactaatatatcgcatcgcctaatcagataagcctgtaccatagctggcattctcatgtcattgctgcccgtacctaataatttacgtcactagtatatcgcattacctaattaggtgagcccgtatatctcatccatggtgtcatcacattgtcattgtctaatcagacaatcgaaaattatagaacctgtcactgcgactctaatatgaaccctaaaagtcaacattcaaattcttttgtaatatggcatgcatcaaagaaaataatgttttataaacaacttcactttgaccattattttgtgggtgaaaagtagtagaaaacaaaagcttagtatctagctctccccacaaagtcttctaaaatagctcaaaaaatgcttttggacatgccatgcaattttacaattttcttgaaaaacaaatcagcaatatgtgatgcatcataagttttttggcatggaatgaaatgtgccatttttgaaaacctatctacaaccacagatatagaatccctactctttatagacttaggtaaacccaaaacaaagtccatagatatgtcaattcaaggttcactaggaataggcaaaggagtatacatgagacttgacctgagacttatcttttctacatgtaatacatttctcacaaactttttcaacatctctagaattcatgcaagatttctaattagatacaccaaaatgccccatcaaatcactccataagattctttaacaagcaagtcatgcaatgaacttttaggcacacataacttattttctctaaacaaaaaccatcatgcctaaagaattttctaaaagcttcttttttacacgcattgaatacattagaaaagtcataatcatccacatacaaatctttaatgtattcaaaactaagaaattttgcatctatggtagagagtaagacatacctttgagataaagcatcacccataatgttttccttacattgcttgtacatgatgacataagaaaacgtttaatgaactcaatccacttgtcatgtcttctatttagcttttgttgacttttttaaatgttttaaagattcatgatcagtgtgaatcacaaactcttttagttattgccatatttctaaagcccgaaccaacacatacatctctttgtcataggttggatagtttaagactactccacttaattttgcaccaaagtatgcaatacgatgaatctcttgcaatagaaaagttccaatacctatccctgaggcatcacactcaacctcaaaagttttagtgaagttaggtaaagcatgcaaaggcgcattagtcaattttttttttaattaaattaaatgccttctcttggtcatcatcccacttaaaaccaacatccttcttaataacttcagtcaaaggtatggctaagctacttgtttaccaaattttttgaaaaactaattatttaatattagagctaaagaaa

SEQ ID NO: 236825 - DNA, 2316 bp, Cannabis indica
ctagccccaaacccaaatcgagagtggaactctggcccaactgtcatatacacagaccgggaccaagacccgaacccaaacctggacccacacctagacctaggacccgatccaagacccagacgcggacctagatagggatccagatatgaacctggactcgaacccagactcggacccacatcgggatcaaaactcgggacctagatctggaccgagaccctaacccagacccatacttggacccacacctgagatccgaactcaaacctggacccgaacgcagccccataccaggattcgaacctggaccgaaacccggacccaaactcggaccagatcttcgaccaaaacccagacctggaccataacccgaacccagacactgaatcaaaatcaaaattgggactaggacccaaacccgaacatggacccaaatcgggacctaggacccgaacctggattagggacttagatatgggcctcagaacccagacctagatcggaactcaaaactcgagactcagacccgaacctggacctagactcaaacccagatctggacccagactaagatcggatcctgagcctgaactcggaccaagacttgaaccccgactaggtcctggactcagatcgaaacctagaacgcaaacttggatgggggacttggacccgggacacgggcatgagtactaggattgagacccacgacccgaccccagacccagcccctgacttaggacccggaccgagacctgggacctgaagtggaactagatagggacccgagaccgagacccaaatctggacccggggcttggacctaacccgtagtaagtgtttggatctgggaaacatacccaaactcaaacccggactcggaccaagaccctgacccagacccagacccagacccgtaccctagacctgggtccgagtccaagtctaggtttgagtgcaggaaccggaatctgactaagacccagacccagatctggaccaggacgcgaacccgaatcaaaactcagataacgactcgggacacaaacccaaaatcagacacggacttgtacccagtaccaaacccaagacccggaccgagatttgtgactaagacctgcacccaggagcccgacaaagattgggggcccaaactcaaaattagaaccagaatcgggacccaactgggattgaatccaagacccgaccccggtctcagtcctagacccagacccggacacgaacacaaaccaggatttacaatccgaatcgaaatgagaccgggaccaaagattgggatatagatcatgactcacgactggggcctagaccaaacccatagtcggtgtctagatcttggaatcgtaccaagacccaaacctggtgcaatttctagactaggacccaaatcaagacttggactcgcgacccgaaattggaacaagaaccggaatgaagaccttggaacaggaattggactttgacccaaaaatgaatctagatgcagaaccgaacacagacccgaaccccaactgggatcgatagctggacccatagttgtgttaggacctgcgaccaagaacgcagaacccaggacacatgacctgggaccttgaccagaacccagacccatacaagaacccagacctagacacagatccagagcaagacccgaaccctaaaacgggctgaaaccgggacccagacccagaaccagacccaaacccagactcatacacgaactcggactggaacccgagacttggaccaagaccgagatcaggactgggacccagaccaggataacgaccgagacctgaacatggactggggctaggacccagactgggactgggactgggacccaggaccgagactgggatacaggacccaatactcagacttgagacctgagaatcgaattgtgacccagacccagacagcgccaagacccgagacaaggacaagtaccgaacaaggactgggacctgcactcggactaggatgataaccaagactgggacctaggaccctgaccttaatcggggaccttgacccatgactcaggacccaagacccaaaccttgacccaaacttggacctgagacccgaaccaagacccagactaaggacctacaccttgacttggaccaggatctagatttcgacccaggacccaagacacgaggcttggacccgacccatagtcggtgtctaaatctaggaattggaccttgacctagacccagaccgagactagaacctgaacccgaaccaaaactcgaactaaactcgacatgtggttggtgtttg

SEQ ID NO: 236826 - DNA, 1032 bp, Cannabis indica
acgaatcactgcacaccagaagcccagaatctgatcaatcgatccagctacaatggctcagacaacctatatgttggagatggaacaggtttgcccattcaccatactggtcattcttgttttctgtctaaatctaaccatattcttgtgttaaacaatctccttcatgttccaaaaatcacaaagaaccttcttagtgtgtctaagtttggtagagataaccatgtttactttgaattttaccctgatttttgtcatgtcaaggaccaggtgacacacaaaatcctcctgactggtgctcacaagaatggcctgtattcttttgatgaagcccagtttcaactacagcctttcccactgtcatcctattccagtttcagacctgctagtgaagtccaagccaatcctgatattgcccaagccaatgtttcctttactgccaactctgaatgtagtcaaaataataacaatttgtttcaaatgtggcataatagacttggccaccctagtgagaaaattgtaaaatctgtgcttaacacttgtaacattgctgtcagtaataaaactccttttactacttgcaatgcttgttgtctaggaaaaattcacaaatttccttttccaaaagcatctgacactgtgtacaatgaacccctacaacttgttgtcactgatttatggggtccctctcatataacctcaactaatggctataaatactacatccattttttagatgcctacactaggttcacttggatatatctccttaagaacaaatcggatgctctcaaaaagcaccacgacgaagatgcatagtcttttgagaaaataactatcgaaattttagagtcatcgatggcttccaagagagctttcgaaatctcttctcctcgctccagtttgtcaccgatgtatgtttcaatgccttccttcttaagttttttcgtggagatgactagtaaaattagcgagagtatcttctcctttaaaagagataaaaacatcatattttttctttgaataagagat

SEQ ID NO: 236827 - DNA, 1433 bp, Cannabis indica
ataaagtttctctagtctctccactctctagtcgatatatatatgtaaataagacatttgagttttagaacttaagaaagagaaacagagtttgttccttttgcttcgatggattcatatataaaatttttgtttctgcatacatttcagaacaaagtgtgcatgtttttataatataggaattaaattcactttgagctttctctttaaagtgattcttttacacacaatttttctcttttgcaagtcattttggaagttttggtatcaaagaatataaccaacacaaacgctttagtccaaaggaaaacatcaaattcctccttcctttacaaacaaagtattatttaaattatcacagttaatcacattactctaatgctattcaatcttgaactcaaaaaaatgaacatctccactcatggatgttcaatcagaaaaaccaaaatatttctgttatggaaaattctgtcacgaacattctttcaagagatcctgtctttttcttttccttttcattttctttgtacttttactaataggaatagctgcattgatcattgtctttgtcataaagcctaaaagccctatttttagcctccaatcagtaaagcttgatttatatgagttgaatcctcatttgggttcaactcttttcatttcctctgtcattactttgactctaagtgctcaaaatcctaacaaagttgggattagatatagtccttctcgacttcatgtctatcatgaaggattgtctattgggacaattcgggtcccggggtttctacaacctgctcacagctataacatgactgttccaacaaggattttgtttcaatctgtgaatgtcagccatatttttgatgtggcttcaatgcaagaagattcgaagaaaaacatgattcagatgaaaataatgggagatgttaagactcacttgttggcatttcatgtaaccctgttaaagattaaggtttgttttgtgatctgatatggatgtgttttcatgaacattaacaattaatcaataatttgaaaagcatttggaactcgttttttcaggttgccttggaatgtgacatagacgttgatgttaaacaactttcaatccaaattgaagtttcaaacataaaaagagtaaatgatcacatggtaggcattttctttgagcatgctctttcttgtgttttgtgtttgtccattcaacaagttattatgtaacttatataaacagaaacttttcaggcatccttatttcctaccactgctcagaccatcttcagaaagtgcgcattagctttttacatctaacgctacaccttcaaatgaactgttacgttaaattcacaaacttcgagttcattttgaagatagattcttctatgtttgtgacataacgctctttttttttgactttttatttaattaat

SEQ ID NO: 236828 - DNA, 1111 bp, Cannabis indica
tttgagtttctaaagtagttacaacggtaattgcaatagggattttatacgattttttgatgcaatttaagttgcaacgctagttgtaatatggatttttatgtaaaatttcttaaaaaatgtaaaaaaaactggtttgaagtgtaaaaatgaatggaaatttatttagaaataacaataatatggtgttcattttattttattttaacaagtcagcatcaaatgttgtaaatcataagagaagggatttgttgttttcttagtctggattggtcctttatgcatatggtttccctgccaactagctagctaggaagttagctggcagacaagttggtcacagcttaaataaataaattccaatatttctcttctcttcggttctcataatattaactttatgatcagatattcatacatactatggtgaactgtaaatcgtaaaggtcaaccatatcatttgcattccttgtcaaaacatacccacttgtattattatttattgcgcacaaaaatgtaggtttctttttcactattttgtttagtcataattaacttataagattatattaaatttaaaattttgataatttgatataatttcttctaataatatgattaacctattattatactatactgaattattgttttttttttacttttagtaataaatgtaaataaattaatattgcactcttaatttttttaattatttttaattaattaatttattatatatacatatattattataaggttagttttcaaaatatgtatttcattttaataacttggatttcaatataaatatatatatatatatacatttatatgtatgtaaccattgataaatttataaaatactgatcatcatatgattttaaaatcattgtcatcactgtatctcacttgtagtcgtcatcacatttaaagctattgttgtcaacatatctcacttataataatcactattttttccaataaatttactttgtacacaaaacaaatcatgcgttaactatccacttttataaatcacaaaattttttaaaagaaatttacgaaataaaattcatttttataatgagaaaatagatagaattgtatc

SEQ ID NO: 236829 - DNA, 1010 bp, Cannabis indica
agtagtaattaatccaattccctgtggttcgacctcacttgcgtgagtatactacttgattgcgtgcacttgcgtagtaattaataattttcgcaacaagtttttgatgatgaaggtgatgtttgtggttcgaccatcaaacatcaccttcttagagattatggttattgcactttgtatgatggaagctatgtggaaagaaagaaactccattgtccatggtcaatccaagaactcgatatggcaggtgttatctaacataaatagaaaaatcatggaacaacttcatgtagtctcaaatgaagtggaggatttctgtgcttggagcccccctccggagtcgtggctttgctgcaattgtgacattgcctgtgatgatgaaggaatggtagtagcaacagtggttcatgatgaccaaggaaggattgttacaatcaaaactgagagaagccatctaacagatcctttaatcggagaagctgttgcagtatgcatggctgctgaattgatgatagagaagaaggttgcccaagtcgtattccaaagtgacaacattgaagtagtcaaggccttctcctatgcgactgacagggatagcaatttcaaattggtgaatcttagaagccgttttcaacagcgttgcaagggatttcagaattgggaaattggacatgtgccgagaagatgcaacttcatggctcacaacattgccaaatgggcgcgggagactagtgttactgggatcacgctctgcaatgagctgaatcatgaggtgctgaatgattatgttgagtggaacaaacacgcaggctaagatggcgacgaaatcttttctgttctgctcgtttggttttggtgttagttatgtttttagcttttgtagtttcttcttctgctgtagccttaagtttttctggtgtttttctttttctatcctgtagacgttttgtttggtttttacttaatgaattggggtgtttaacaccccctccttcatcaaaaaaaaaaaa

SEQ ID NO: 236830 - DNA, 695 bp, Cannabis indica
ccttgaaattgcaagggtgaaagcgaaattgctttcgaaagctaggcgtgctactctgatcaaattcataggtctttccatgcctatgtatgccatgcaaccaagctctataatagacttgtctcaaggattgatggcatggtttgtgatttctgatgggactttgagaaagggaaccatgggatccatttgacagcttggaataagatttgccttcccaaatctcggggtggtcttggctttcgtaaaactaaagagatgaatcaggtcttccaagcaacgtgggggtagaacttattatgtggaagttagtctctttgctgcatgattatgaaagccaagtatctcaaaaagaaggagcttcttaaatgtatgtacaaggactcagatttttggttttggaaaaatgtggtgaaagcgagtgacctcttaagagaaggggcttgcaaaatggtgactgacggtagggatctactccaatattggtggaggattggtgccctcctcttcaagattggatcaagttgaactgtgatgttaaagtggaattggaaagctcgtgtgtcgcagtagttgctataggccattttagtgaggtggcttgggttaacactattaccttggatttttcagatgctctgtgcagcgaggcgacatcgtgttgcttggcaattgatatggcaaagctcaaaggt

SEQ ID NO: 236831 - DNA, 1009 bp, Cannabis indica
cataatcgagatgtgaagtggatcgtaattaatactaccctctctcacaaacaagtacgtaagaatggaattctgcttaatgacatgagtttcagcagagtacctaaaaaacgactgagacaatatggaaagagaatctgtgcacatatgtatacttactcacaattcacaaacacactcatttacaggcttacagctacaggttagaaaatggtatatatatttgtatggatcaatcaaacaacattgtatgcgtacagcccgtctatgaatgaaaagcagagaaaaacagagtcgctcgttaataaacagcgcacaaacggtttttgcataattttttgattcaaattgctgttatgacatattatatgtagagttcatttttgttaataacacattagcatagcatcataacactaacgttaaaacagaagaagataacaaagctgagattactactactaagccaacaatattagatacttcatttcagcttttgtattagtagaccacataaaaacaaaaaaactttctagtactgatactaatgttagcttcagctgcactagttcttgccaccaacaaagcctccgccgcctccgccgcctccaccacctccaaaaccgccaccaacacctccaccgaagccaccgccgccaccaaaacctcccccaccaccaatccctttccccattcctccaccaaatccaatgccacccccttcgccagaattacccccaagcccaccaccaatccctcctccggaactactgctgcctttgccaattcctccaccaaatccgcctctaatacctcggccaccgcctttaccacccacccctgcaccacctcccactcctttgccgacgcctcctcctactccaccaccaccttgatgattcttgtcatcatttttcttatgcggcttccccccaccgccaatgccgccacctaacccacccccactgccaaagccaccaaagccgcctccgctgccaatgccacctgc

SEQ ID NO: 236832 - DNA, 1199 bp, Cannabis indica
taataatcaatagtacaatataaggttatacccatatacttagtacatttattgaaataaattgactaagtataaatacatgcgagtactattgatagtaatactttaagctttcgccattccaagctctcttgatcattgtaccgtcgagatcagatagtcggtaagtcgcattgccgattttttcagcgattaggtatggcccttcccagttatcactaaaaactccatgtgctgagttacgtgtgttaggcatgaccttttgccaaaccaaatctcttactcgcagactttgttctttgaccctcgagttgaaatagcgagttgttcgctgttgataggctacatttttcaaatgagcctgatcgcgtttctcttcaagaaaatcaagttgtaccaactgattttctatgttactgttgatgttgaagacatctctcctttaagatcctgctccagccttgactggtaccatggcttcgaacccgtaagagattgaaaagggggtttcaccagtcgtagagcgaggagttgtattatacgaccatagaacttgtggaagttcttctggccatgtaccctttctttcttcgagcttacctttgatggtatgcttaatgatcttgttaaccgcttcagtttgcccattgctctgaggatatgcgactgccgaaaaagccttttgaatccctaactcatcgcatagttggcgcatctccttacaataaaagtgtttaccattgtcaaaaattaatttataagggatgccaaacctgcagaagatggcgctataaacaaactcgcgcaattcggaggttgttatggtcacaagaggcttggcttcagcccattttgtgaagtaatcaacagggactactgcgtattttactcctccttttccttttggaaattctctgattaaatctatgccccaaactgcaaatggccagggactagtgatagaatttaattggctcggttgcctatttacataggttgctattcgctgacacttgtcacatcttttggcaaagttagctgcatctgcccgcaatgttggccagtaatatccttgcctcatgattttttagagcaacggaattaccaccagcatggttaacgcagatcccaccgtgtacttctcgaagtatgtaatcgcattcaatcccattgatgcacttaagtaatggctgactaaa

SEQ ID NO: 236833 - DNA, 620 bp, Cannabis indica
cgaaagagttagagggagagtgacagttttaaatagagagggtattgtcgagattaaagatttttggaatgttaaatttttacattattttaagacgcatataaaaacactttattctttttttaagcatatgatgtcaaatttcccaaccatatgaaataagtggtgtccttgcttttgaattaaatttttaactttgattgtgtttgaagccaaaaaaaaaaaaaaaaaaaaaaattggaaatgccatatgtggaagctgggctcaggcccagaatgatattggacattgacattccattgggataataaaattgaattggattccaaaacatttgcaaattgcaatttagagattgaggcctatccattctctccatactcccaaaacatcactactaataactttccagtgcttaaaaaaagataagtctaataccatcatagaaattgtgaggattacatttctcatgaaaggtagatcaccccataaatagaaccaaagtgttgtgtcaacaccaagagatcaaactttttccgatcggtgtccgggcttttgccccactagtcccgtagggttggtcctagtagctcaactgagagacctcgtagtgactaac

SEQ ID NO: 236834 - DNA, 2043 bp, Cannabis indica
ttagtgtttactaaagtatcatttataggttgttaagtattttaatgataaaatacattcaagggtagaacggtaaatttgtccatattcagtgtagatcatctatagaggatccttgactattaggattgtgccaatggataatcataacgtatctatatcgtggtacatatagagcgttctatataactgacagtgtattcaattccaaatctgtagtggagcaaggcggaattaataagttgagaatttacttggtgaattctagatctacttattgaaagctcggttatataggcccaatgtaattcctagaaacctaattatgtataattatgatttattatatattgtggattaaataggttgtaatgaactaatctaatttagcataaattatgaatttttctataagtatataaataaccgtaaattattaattacggagatttattttgaatatgtgggtataatgtgggttattgatgaaaaaacaatattttttagacttggcaaccttggagacccaatgagaggccaaaaatattacaatgagtttagttggaaattttaatgggattgagataacttgattataaaattattgcagtattgagataaattaattatgtggtgctcggacatcacattattatcatgtggtatatttatcaattaccagcaagtacaaaatcgttcgagcaacatagtcaaaactcatagtgggaaaaataccagagtgcgatatttagacttatttggtagaaattattaataccctagtagctatttgtgtgaattatctatggtacactttagttggatttcggttaattgagtggaatttaattaagctattaaaatgtgatagaatttgtaattatttattagtcgagatttatttacaatcctttatagtaattattttttagaatttcttagttagtagaagttggtgattagtttaattggcttatttgttttaagtgataatttaatacccgttagttaaaaaggatttatatatacatatattctttagatatactgttagttaattagatttgattaattgacttttttatcttaatattaatttcctaactctaggagatgacacctagctacgccactcatcttagtgattcttatcaattagccatcatcttaattttacccattaccataacaaaagaagtccatatctctcatttctctttgctcatatacgaccaagtatgcccataaccaccatcaagcttatttcctttactattattaaattaataaatattggcctttgaagatgagttctatctagagaaatttcttaagagaagctagagcaaagttctcaaggtaagatctcatcctttggtgttatgtttagttttgattgatgggaaaatctaagttcgaaactttggccttgaataagttaggtatatatattgatagtattaatgattcatgttaaaatacaatagataaagtgtagaattttattttagttggttattcttgagagttatggaattcatattttctaatattcatatgtaagcttgtggaggttattttattatgggatttagctcactagctactgtttttgttcaatacatataaattgaaattttgtgtagttagataatcttattgcaggttttggggtatgaaaatagaaagaaaattgagttttagaactttgtacacgaacatgtaactggttgtgtaattctgggtactcgattgccaagtgaaaccggcacacttattatggattcgtttacctggttgggtcggttccgtgtcacctcaattttcatgccataaggtttattaggatatttgaccctatttgttgataggacaagtttatttttcaaattttacacccgttagtgttttggttgaacacttataatattataattaatatgacttagggatatcagacgccaaatttcatgcttttcaggtcagcaagtacgtacaaatttagatgtatatgtaagataagtatattgtactgcatagtac

SEQ ID NO: 236835 - DNA, 1137 bp, Cannabis indica
agtcatcagtccatgaagcagccagagtgacgaactcgtgtataagagccattagtccgtgggtgtaaggacccaatggaggcttgaagcggggacgttacatcaagcttaagcaactagagaatcaaggtgctagggcttacctccacttgaaaatactacaatttccagcggaaatccaaaaaaaatggtgagggttagggttgatcttgctggtccttgtggtggtcgaggaaagagaagagagagaaaggaatttcttgattttttttcttatttcctctaattgataaaatccaaaaagaaaatagacaatcttgctgaaactaaacatggccagttgtccaaagaaacatcagccacctaacccccttggtaaaattaccaaactaccattttacttacaacctaagcaaaactaagcctaggggtaaaatggtcaaaagccataaccctgctcaaactcggtattcaaaatattccttatgtttgtctcgctaagaattaggttctagacttacccatgtgactcaaacgaccatccatcgcatttttcgtcatcgccgagcaaatatcataaaaattgcataattcatatataacataaataatacctctagagtttaataaaatctctggaattgagaaactgtaactctagtgcccaattctagaaatgggacccacaacataataaactcacataattataaaaatatcaataattaacgctaattgcctttactagtccatattctaaaatgtggtcattacactagtattaaatgtatggagtatacattgaactgggaccaatattgatcttggtaaagatattataatcttaccattgtatctttctaagtcattgtcactggttgatcttagatcaaaagatctttatcctgatatggttagagttggtcgttgaagctcgtacaggtgaacacatacagctttggaacatgatagtacaattgagtgggagcactaatcatagatatggaatctatagcttttatctggacatagaagtgaaagataattgccttcgagcttggcttaatagagataaatggaagagctcttatttcagtaattatataagtttactgaaatatcatttataggaagcta

SEQ ID NO: 236836 - DNA, 670 bp, Cannabis indica
cattgcctatataaatggctcatgtatatttagctcaagcaattcaataaaaaattgagatacaattttttgctttttctctgtttctctcatatggtgttagagtcatatccttagcaggcttttgatttacacctaacatggcttgtgataaggtaattcaagattggtgagcaaaaatagccaccattaccaattagttttgagatgtagccccatgattctcaagttctcaacagtgttaaataccaccagtgtttaatagcaatgcttataactaaatcatatggtctccagttttaaaaacaaaataacatattagcttagcttcttaggactgattccacacggtcaaatttataaaaaattattaatgtatttggctttatgagttttaattgggctagaattatgtatcacgatacgacgacacaactcaaaaatgacacaaaataaatagatttgtgtgatgtttaataattgtatcgtgttcgtatttgaatttttgatacgtttaataatcttgttgtgtttgcattatcgtgtcgtgtcgtgtaactacaaattaatcgtgtcgtatttgtgtttgaggtttcaacacgtataataaatgtgtcgtgttcgtatttactttaattggtcgtgttataaatgtgtcaattcgagcacg

SEQ ID NO: 236837 - DNA, 725 bp, Cannabis indica
tatgatttgatgattctaaaaaaaatgatttgattctatttttattctaattctcattctcatgttatttttatatttttattcttttcaattaaacgacacctaaaattaattttagagcatcaggggcaaaaaaaataaaatttggtcttttattaaaaataaaatcattaatcaatacttcataaatttaatttttttaaaaaaaaaacagtatctcataaattcctttacatttatttaatgaatttaaatattgtaaataaaagtacaatcaaaatattattcaaatttgttgatcgatctatcccaaaaatatgtcttctttcttcaaatttgtcatatcgaacaatctccaatctataaaatttaataataacattcatctattcaaaattattagaaaaaataacagagattgattcatttaaaaatttatctttcttgctttttgagatgtaaatttgttaatcaaatcattgtattcaagtgtatctagcaaattaatttcaattgacaacctagctaattcactcaatctctcttgcaacatagtcgttcttaaataagacttgattaattttaatattgaaaaacttctctctgtcgatgcaattgtaattagaattgttagtgatattctataggcaattaatgcatttagaaatgaatcaatttttttttaatgtaatcaaatatctagattgaactaccatttttatttg

SEQ ID NO: 236838 - DNA, 964 bp, Cannabis indica
cattgaagtcaaagtcaaactctatcctctaggaagacatcccgaatcaaacagcgtctgagaactgcttaagtgttaaagacgattcctaaggcaaaacattgtagatgaccacttcagcgtaggtagtaaggtaaacctgccctcaaaatgaagatatcattcagatttaatccatactgttctgacattaccttttccctataaatgctaattgacagctaatccttgtgttgtcccatcagccacataaaagacaagtcgtgtctcaccaaactcctacttcagagcttagcctatgcacatgcatcaacatcatttcctacacctatttcaaaggtcgtgtaaagcctaaaggtaaagggaagatgtactcatcattcaaaaaatatctcatttatcaatctataaatacaaagggaatgtaagaagaaaggaattcagaaaaaaaaaacagagaatatagaatatataatctcatcagaattgggcgcatatactatagaatatataaacttgccttctactctatcaactactgtgcttaatttaaagctttttggtcgtaggttgccaattatatagaatgctctatatgtaccaagatatagatacattatgattatccattattccaatcctaatagtcaaagatcctctatagatgattcacactgaatagaaacaaatttaccgttctagtcttcaatgtgttttatccttaaaacacttagctacctataaatgatatttcagtatactaatattgtaataccctagaagtaagaaatggattagaaaaaccataattatataattatgaataattgagaaattatattattatatagttcaatatatgagaatttatttgattaattaaatgttaagacctcgttggtgagccaagggcattttagtaattatgatctgagaagggtaaaatgatgaaattaatttaatt

SEQ ID NO: 236839 - DNA, 722 bp, Cannabis indica
ttgcagagtagtcaagtgttagctacaactagagcaagagatggaagaatcacttcgctctactggagcagcctaaaccggttgcctaattcgatgcaactcttcttcttgatgaagtatgatagtttgcatttcaataaacatctactaccagtcggtaggaggattactattactcacccatgcattatccctaagattttatggaggcattggcaatgtcagtggaatggtttgattagcatcatgttgtacatgcttgccctatgatctagttaatttactagggcccattctttcaaataccctgaaatcaaaaatcccagcgagttaggcaccaattccacacttgcacactttatgccaaaatcctaagttaacacatacaatttattttgaaatatgacaataattattcacaattaataatcatgtttttcattaaataacattatcttctagatgctcatatgctgtccattaccaaaagtagtaaacatttaatcacatatgcagataagtatttactctcaacacttactgcactatgagtcgagcttgtctttgacgatgattgtacatgtttagtcggtcttcaggaagtttaaaaaccttggtgctttgataccaaattatgacaccctaattaaatggatattgggttttgtgctctaaataaaacctatttcaatataatcaaatttactaattaataaaaagtc

SEQ ID NO: 236840 - DNA, 1084 bp, Cannabis indica
tctcggcggccgtgacttctttttcaacctttctcagaatcttatctccaagagtgaatatgattgcactatgagcttttacaagaatctctttcttgtccttctcagatataaaatcaggaagatatttttctccaagcagagcctcatacaatccttggtgggccaacagagccttcatcttcattctccacaatccaaagtcattcgtaccaataaactttttcacatcatatttcgttacagtcatgattacgaaccaagatctaatactaatctgtagtgaatcaatcaatcaccttcaatgtaattatactggaccaacactcacacaatcaagaacaatactatcaaagaattacaagaaccaaagaacatattaaagtagtaaaataaagaaaagataacagtaggtttaacgagttggagccttgtgcaatgctctatatctcggtccgaacaacaaccatgtctttattgatatctgtgttttcaaggttacaagaatcttttcaaactattacagagattacaagataaactttctctctctagtttagagtctttcactctaaccttacacactcacaattttcattcaagttgtccaatggtctgattccttatggattaaaaaggtaatagttatttatagatttctatcattgtcaaaattaactctgattctatcgttgccaattaatggcgccttaaattctctaaatcagcctcaacaataaattccacatcaactttagaaataggttttcagtacagagaaattggaagagaatgcacccattctagatgtgcgttcaagactgacaacaagctttctcgaaatatgtctctagattgatgacaagctatccgaagactttccttacggaagacaagctatttggaagaaccattggactggccacaactttatgaacacatcttttcggatgaacaccaagtttcccgtaacttcttttcggaataataacaagcttttaggatgacgaaacttgtaaccataatcaacattattaatttttattaaaattatataaaaaattatttaaataaatgaagaaaa

SEQ ID NO: 236841 - DNA, 787 bp, Cannabis indica
gaagcagtctaggtacatcaggaagattattcaaaaattcaacgtagaagatgcaaggagtacatttgttcctttaggaggaccgtttatgttcaaaggaacaaagtcctaacagtacaaaagagaaaaaagagatgaaggatgtaccctatgttgtggttctttaatgcttaatgtacgtgatggtgagcacgagaccagatatagctcacgctataagcatcttaagtcagttcatgtccaatccaagcatggaacattggaaagcccttaaatggttattgagatatttgaagggcacttagagttatggtctgacctatgagaaaggaaaaggagaattagagttaaatgggttcatggatgcacactacgcctcaaatagagatacaaaaaaatcaaccacttcctatgttttcttgacaaaccagaactatatatgctagaaggctcaattacagtccatagttgctctttctaccacggaagcagatttatggcgactatggaagcttttaaggaagtgttatggcttagagaaatactttataagttgaaacaaatcaaaggaagagtgactgtgtatttggaaagctttgtaaaaatctggtttatcatgaaaagagcaaatatatagataaaagactttactgaatcaaggagaagatataagaatggctagttgatttagagaaggtcagaattaaagataatcttgctgatgttggaaataaggtcttaaccttaaacaagctcaagcattgcttgaacttgatcaatctcaaaa

SEQ ID NO: 236842 - DNA, 864 bp, Cannabis indica
ttttaacaagtagctctttaacatattttccttgattcaaataaagacatgtttcatctctatgcacctcaattttaaggaaaaagtggagtggtcctaaatcctttagagcaaacatgtcattcagcttatcaatgaattgatttagtttagcgacattgttccctgttataattatgtcatcaacataaattagaaccataataagattcccaagtactttgtagaagaacaaggaggaatctgcctttgattttgtaaaaatttagcatagtaaggttgctcttagcctctcataccaggcccttggagcctactttaaacagtagagagacttagttagtttgcacactactttaggttgattttagtcttcaaaactctgaggttgtagcatgtaagcatcttcttgtaagttaccatttaagaatgcattattgagatatccagctatctgattttccaattctttgaaacaacaattgaaagaatgattcccattgtggaagcttttataactggactataggtctctccaaaattgattccaagtctttgattaaagccattggcaaccaatcgtgccttgaatctctgaaaaagtgccatctaagtttctcttttctctgaaaacccacttgtttccaattaggggtgtacgtcggtcgatttggtcggtttatgttacattttatttaacccaatgtaaaaaattgggttacaaaaatctaagtgcaacccgccaaattaagaaaaaaaaagttttaacccgcccagtgaattagtcagtttagtcgagttaacccatccaaaccgagcactaatgtttatttatttatttttacattcaattgttatatttta

SEQ ID NO: 236843 - DNA, 548 bp, Cannabis indica
tgcctttcattttttctttcaacggatccatgatgaggggaagttacacaactgtcaggcagtggagtgggatgaaattgcagtagcaattacacccaggaaggagattgtagttgttttgttaaagaaaaaagatggaaaccagaaaaaaactgtaaaaaactgaaaaccttgaaggacttgtaactgccacagagcactcaactcttcaatccaactcttcaaggggctaacaaccaaaaaaataaaggtataattttataaatacacaaaaataataaaaaaaattacaaaaatactgtttcacgagattttaaacatttttacaaatttttaattttatttacagaaatccggtctttttatgttaaattcatattaatttattgttaaatttttgtaatctgtatgttattttttgctgttgttttgatgttatttagatattattatcatgttccttttacgtagttttcttgttattttagtgttatttttacgaaaaactgtaaaaatgtaaaaaaaaaaaattcattaaacgtaaaaat

SEQ ID NO: 236844 - DNA, 1072 bp, Cannabis indica
taaggaaaaaaggaggccaaattggcaatagtgcttacttgctatactaaagtagagactaatatttgggactctttttagtgggaaggaagaagtataaaaccaatagtcccaattgtcatatgtatacttcgcagaactaactggatacaccaagtccttggaatgccttttcaacctatagaaactagccttctctcaattgtttctcatattttgggctttggccttataaaaatataagatctcttccagggttggaacaaatttcttcttttagaaacaaaaaacataccatccagcgagaaaatcatatacttagggaatgaatttttaaggggccactccaactactgccaaaactccacgaagtaacatctcaaaggaaggtgagctcccattttaacataccccaactccaagaccgaagcctccttcagagcactggcttggtttctcttttaaaatagacattctattctagaatagtcctggaataggttcaagtcctctttgtgtctagtatttttgttggttgtcataaggtcagaacttattcttgtactggtccatctcccacaaagatgaatcaaacacaatatttggggtaggaacttttgccacctcttcgacttcttcgatgactttcattactctcctctaagcttgtctcgacataatggaagcggaaaggaatattcgaagcagttagttacccaaactaactaagatagtaagggcaaggggaaatccttctccataactgcttggaagaggtccccacctgatttactatctagattcaaaatctctagggagcatttgttacaggtaaaaaaattggaaacacaagagttagaaatgaaagggtcaacaggttaattaagaccataagggacttgaatataggaaaagaaattattttcatcatttcagcagaaaatgggtacgatatggtaaaaaatgttaacttttatcaacattcagggcaacctaaagagctgaccaaaaaattctacattaatccaaaataatatcctaatcacaagttcaaaatcatgattcttaaaca

SEQ ID NO: 236845 - DNA, 816 bp, Cannabis indica
gtagtactcatcctaccagattaattattgcctaacaatgaaagtgttgttgttaatcaaagtggtattattgcgatttctaatgaattgcatctaaataatgtgttttatgttcctacattcagatataatatcatttccgtaagttgccttactaatgataataatctttctgtcaaattctacactaataactttgtcattcaggatcgaaccaacaagagggggattggcaggggtgaatccaagaatggcctatacatcttggatcaaatacctcattacagcccgattcttgctatttctgctaatacttggcattcaaggcttggacatccttcgaacaagaatttgaaacttttagataacaagcttaattgtaatacttccaatttacataaagacattccttgctatatttgtcctatggctaaacaaaagaggcttcccttcaaaaataaaaccacttttgctaataatgtctttgatttgattcattgtgatgtgtggggtccttatcatatcccatctcattctggttttagattttttctcacaattgttgatgatcactcacgtttcacttggatatatcttttaaagcaaaaatctgatgtgcccactgtgattcctcaatttttgacttatgctgagactcaattcaactgcaaaatcaaaaagtttaggtctgacaatgcacctgaacttgcctttaaggatctttttctaaaatatggcaccttacatgattttacttgtgttgagacacctgaacaaaatgccattgctgaaagaaaacaccaacatttattaaat

SEQ ID NO: 236846 - DNA, 518 bp, Cannabis indica
aatcatcataagcaaactactatttttggagctgcactactttatgatgaaactgttgaatcgttcatgtggttgtttgatacatctgctaatacgatgtctggaaaaaaaaaccaaaaactattcttacagatcaagatgcgacaatggcaaaagcattggctgttaaatggctagaaacgcatcatcgtctatgtatatgaaatttatatcaaaatattgcaaaatatttgaataacatttttgaaaatttttgagaattctctaaaaattttagtagatgcttatatgattgtgaagatgaagaagcatttttacaagcttggaatgagatgttcgtataatcttgaagataataattggttgaagcgtatgtttgttgtaaaagaaaaataagctttggtatacggcagagaaattttttttgcagagatgacaactactcaaatgtctaaaagtagtatgaatagtgttataaaaactatgttagctataagcatgatctactacgatttttt

SEQ ID NO: 236847 - DNA, 1348 bp, Cannabis indica
agaattctaaagatggaaattttcctaaaatacaattacaaaatgaagattatagtgtttgttatgtgtccaaagttgcagatgtgaaaaaagacatggcactcttgttgaatattgcagcataaagctttgtccaatatttaacttaagattattgtcaccaaaaaataaatgacatcaatctttgatgtcatatggtatttgagtctgtgtggtatttttaataatatgatgtttctctttatcatctttctatggtgtgatatttgtaagggaaaatttcaatttggttcaatatatgtactttgttaaataataatttaaagtttatattttgcaaagttgatcaaattgatacaacaaattaaattttagttagttaaattgttttttgatatgagctgatatgagtattttataagttatggttttggcctatatatatccaaaattattattgcaatcaatttggacatcttaattttcaatctcttctattgctgaaagagcatgtggtgtaagagcaccctaaacgcaatcatactaaaccaatcaaagaataaaaactatacttaattgaacgcaatgagagaataaaactatttaaattgaatctttattaataagaataaaaatgatgaggatcaaacctcattacattaaatctcacactgaggaacacttatcaaataatctatatatacaactctctccacagacacacacactgtaattttggacaatcactctctaaacttgtctctgaattctgaagtatgattgcattcctttgacttgagagaactgagacatatatataggtgtcagtgaggctttgtttgggttggtgtcaatgttataactaatagttgccttttttgttttaactgacaagtgctaataagatgacactacaaaaaatcttttaattcacgacaaaacttgtgactaaaagttaaaaaagtgtgactaattataaattattattcttatgttgtgattaaaaggtccgagactaaaggaattaggacaaaaattacaatttattgtgactaaatgtatttttagtcacaatactttgttgtgactaaaactaaattagtgacaacttgtaattaaatactatattttagtcacaagcaacattttgttgtgacttttaatcacaaaaaaaatatgttgtgactaaaaagttatcattaaaaattacaattttttgtagtgtgaaactactgacttgacattaagtgagtttaatgccaacagacactacaagaaatatcacttttgccaacacatttttgtgctgacaaaagttggtattgcgctggtaaaatagaatttacct

SEQ ID NO: 236848 - DNA, 1073 bp, Cannabis indica
gataggagccaagatactaacaattgatcttgaaccttccattccaagaactcaggattatagattcaagctaactgatctgcatcgtttaagaattaaggaggtggagcatagtcttgaatgtacctcatcagcctgttaattcgaattgcagcaagaacctgttgtttccatagaaggaaactgtgatcattcaacttaattgacaatgtgtgattgaagtacactggtgaagactcatcatctctggatctggttcgtgttgcagtcgagaaacctggcggtggtccaggataattagagctggaattcatgttgccaacatttgccatattcgccaccaaaggtgggaaaggctctgataccatgttagtgttggaagcttttctcaccattgacacaaagaaacaaagaacaacaaacaaaagaaagagaagaaaaaagaggaaggagaagagaggaaagaacagagaaagagtatgaaggaaagattgttattctcattaccacttgagctgaggagtacaatttatatacaaagcttactgagctaagactaagcaaaacaaaccaaacaaaaactgtaacagaattgaacaaacaaccataacaactaactgacacaattaactgtcttgacataagtaatgtcatatattattatgtttgtcaccctttcgttattcatttagattcatttagtatgtgcatattttttcgactctttgagtgtatgtgtttttaatgtcctactagattagatacattattgtaggaatttattcttaaattaacctacaccagagcaaagacaagtcaataattccaaggtcaaatctaacctttcccacagagtcaaacaaccttattgacccaatcagattttgaagcccccaaaaaaacgacagcccattatcattttcctacaggtcgttttatatttaatctgaaaccctaaaatcatatcacatatagatatatgtatcatcttttatttgtccaaacacattaacacaaccagcaaaaataaaaaccctagccaagtcctcattcttcaatgttcttctctgaag

SEQ ID NO: 236849 - DNA, 915 bp, Cannabis indica
ttttgtttattgattttcttggggatttttttcttgatctgagaattgaggagagagaatcatgtaaaatcaaaattattttctggatttgagattgcttatggatttaatttttattttgtgtttttacgttgatttggatctaataaacacaatggtttggttgtggtgttggttgcagtggttgcgatggtagggtagtggttgttttggtggtggcagtgctgttggttgaaggaatgaagaagaagaaatgagaagtggaaaaaaaagagtagaataaaaaaaaattgttttccttttaatttatttttaattgtaaattaattttgtatttaaattttaattttttaaaaaaaatatttacgtgggccaatttatattgtgccacgtgtacactgtgtccacgttggctgaactaaagtgagccatgttggcaaataacggagtcaagggaatggaagtgtgttcttgctaacaaaatgctgggtttgggggttttaccgctaaaatttgggttttgggggttaattgcaagtaaaatgaaactattgggggttttgccgcaattaactttaaaattaaacaaaaagaaaaagaaactgccctaacaaaatatgcctccctctctctcctctctctctcatctttgccaagccaactaaatggccggccaccagttgctactgacggaacccattggccccaaaaccctttctcctccttcactcactctcctgtctcgctcacgtctacctcgaaacccttacaaagaaccaccaatgcctcctttatctcaaatttgaaacaacaaacccatatctaaaacaacaaatctatatatgaaatattccacacgtttcaattaaaaaaccaaaaacaacaacaaaactcatatcaatctcaaaattagat

SEQ ID NO: 236850 - DNA, 892 bp, Cannabis indica
aactccggagtaagttggggagggaagttggaggaagaggaggctgccccaataacggctcggagctgagaaacatggaagacggggtgcagcgctgcactaggaggaaggtcaagcttgtaggccacttctccaactcggctcaaaacccaaaaaggtccatagtagcgggctgccaacttctcattatgacggatagccaaagtcttctgctggtagggacggagtttgacaaacaccaagtccctaacctcaaaacggacctcacgacgatgggaatcagccgtggtcttcatgcggtgttgggcccgaaggaggtgcatcttgagatcatcaaggaaggagtccctatcttccaacatttgatccacagtcaagaccgccgaaccgcccacaggataacgcaccaaagggggaggatcacggccatagagcaccttgaaaggggtacatccaaaagatgaatggaagctagtattataccaatattctgcccatgacaaccatttggcccacactcgaggcttttccgaggcaaaacaacgcaaataagtctcaaggcagcggttaactacctctgtttgaccgtcggtttgcgggtggtatgccgtactacgctgtagaagtgttccttgctgcttgaacaattcagcccaaaagtgactaaggaaaacacgatcccggtcagagacaatggaactcggaataccatggagcttgacaacattgtcaatgaaagcttctgccacagttttggcagtaaatgggtggcggagagaaataaagtggctatacttgcttaaacgatcaaccactaccaagatcgtatccacaccttcgaattggggcaaacctttgatgaagtccatggtgatatcatcccacacttggg

SEQ ID NO: 236851 - DNA, 1232 bp, Cannabis indica
atttataactggcccaaatcgggacttgattttttttataacaaattagaggttattcttaaatagagtatcttaaatagaggttctactgtaactacattcattcatctcgccctttacataatggagtagccaccacgaaaataactctacgatataaagaatactgcgataagaagaatatctatacttagcgttttttcctccaaagatggagaagaaggaaaactcacattcagcaaaaaataaccttcttagttagcataatcgtttaaaggataaagacaaagagcagttgggtagttactagatattatcccatttgcatataaatgaaacgtgggggatgtccacgttttatgagcaattgtaagtgaatagatcccaataaaaataactgtcatcatatacacctataaatagggacggaatccaaaaaaaaaaggacgacaaaattgagagaaaatactattatttacttttattgaattgtactttgtattcaaataaatattcttaataagaagtagagtgtgtagattttaactacaaaaccacataaaatatctggtgtttatttattattattatttaattttgtagtaaatttattatgtaaaaggctatatatttagttaacaaaaatatgtgttaacaaattggtgctttcattaagagccttggtgataaaaactcaaaaaaaatctctcgttataaacacaattacaaatccataccaatggcagataacattccacacaaagaaagtcatccagaggaaactacccatcatcttggaaaagaacctatgggatctcaaagaaccagtacgactgaaacaccacgttctgggaggaacgatggaaatttcaatcatgctgatgaacaaatcccaaagagaataagtgaagatgcttatgatcctaccagatatgtcccgctggtagaattagaaatagacaacttcaataacgcctggctaaatcaaactgacgaaacgctgagttagagcgagaagccacgacggccaggactgcacaaaaaacagttcctcaaacctaacctgatccaactgtaaggagaccccgaggaagacctcaaggttctaggaccaggaggcaagagaataaccaagggaatcccacaaatgcttaggaagaacaacctgggaatgtgagggatgtcccaatggatagagaaaatcaacctaacacaagtaatacaagaaatca

SEQ ID NO: 236852 - DNA, 1322 bp, Cannabis indica
tttttttgaaaaacgcgtagtcatttcattccaataaaaccaaggttagacctcccggtcgttacataaaaggttctccggaatcgtagaaaccggaataataccatacaacttgttaacaaaagcccaattagccacattatgggcagcaaaattacaagttctacgagcatacacaaagttacaacaaataaaagagggagaggactttacacaaaaggagatatagttctcaatcgcccaatgagactccttcccattaagagcgttgatgactactctcgagtcactctccaccaaaacatactgaaaactagcttccagagccatcgaaaccgctgcacaacaggctgctgcttctccacacaaagcatccgagaaatccaacctagccgtgtgaactcgaaccaccttgcccagatggtttctagctaccaccgctgtacacatactatctaagcccaccctgacatcacaattcagttttatccactcctgaggaggcgctgtccatgtctccctcaaaggtggtgtcgggggaggtaagaaagtatcatgaagctctgcataagaattacaaatctggtcaatacatttcagaacattcgaacgagaaagagtatgaataagatcatttcgcactctccagatagtttctacaacaatcgacgcatacaggaaagttgcttccacttggatccccctagagttgagattccatatgaatttgacccagtcccaaacccgaatcccgttattgcagataggatagataccccaaggtgaagatcgccataaatgcatcgccacctcgcaagacaagaacagatgttccatggtttcctcccctaaaccacacaaagggcagcaggtttcctcaatgtggaaccgtctacctatcacagatctgatagggagcgcattagataggatgcaccaccaaaggatcttatgcctttccaaaattttgctgttccacaacctgttccatagagacggagctacctcacaatgatgggccctagccagagcttgagacagataagctgatttgcttgagaattgaccatttttttccagagtccaaacccatttatcttccccaatgccagagggtttaccgcctttaactattgcagtaatcgtttctttgtcaaaaaggccatttagctttgggatgtcccactctccatttgcaagcagcaggtcatcaacacattgatcattggttattacccctactttaggtctcgggataaaaccttttagatggggaatccaggggtcctccatatgctcgtcgtcctaccatttgttacaac

SEQ ID NO: 236853 - DNA, 859 bp, Cannabis indica
tcatcacatggcagccaaggatccgaaagaatatgaattgttgacccatttccaacccgccgacgagcccccattctgaccatatcaactgtttcaaaaatacttcgccaaacaaaactaggattactacccagttctgctctcaagaagtccttccccgcgaaatatctagcttgaaacaggcgaccaacaagagtatgaggcttacacagcagacgccacccttgcttactcaataaggagagattaaaatcatgaagatctctaaatcccatccctccttttgacttgtgaatcttcaacttatcccaactcttccaatgaatccctttattgttctgtgaagaagatttccaccaatacttgcacattaactgctccatttcattaacagtcttcagaggaagcaaaaaaacattcatggcataactaggcaaagattgagcgacagttttcagcatgagctccttacctgcctttgacaaaaacttgccttcccaactctgaatctttttcctcatcttatctttcaagaaacccagaagagcatttttatttcttcccaagatgttaggaagacccagataagtacttgcatctcctgcctcttgaaccttcagaacagagcaaattcttgcacgaacatccatcccagtattagcactgaagaaaacagaggacttattcagatttacctgttgtccagaggccaactgaaaacaatgaagaagctccatcacattatttgcctcctcctccgtagcacggcagtacaaataactatcatcagcaaaaaacatgtgggtaataataggagccccacgagcaactttacaacccctaagctttcctcgcctct

SEQ ID NO: 236854 - DNA, 719 bp, Cannabis indica
ttcaacttcaaattctatttgagctgccaaagaaaatatcaatcttatcatcttatactttactacaagtgagaagatttcagtgtagttaattccttccacctgagtaaagcccttagccactgagctttctttgaactgcactggttcattctcattgattgcctctttcaccttgagaatctatttttacttcacaatctttttattctccaactttggtacaactacccaagtcttgttattctggagtgaatccatctcctcatccatggtatggagccattttgacttgtttccacctgaaatcacctctttgtagcttctgagctctttaattttagtttgttgtactaccgccagtgtaaatgcaattaggtttgcctcaacaaaccttttaggagggtgaatcttccttctggctctatcatgagccaactggtaaccttccagacctacctgtccggatccttctgaaacatctgtttggtctttgttatcttctggatctctactagctttcacttttgtattgtctttcagttccacaatggcttttgactgtgaactttcttctggatcttttgttctgtattctatttccaagcgtgtagtgttcttgtttcccattttctctgcatcacacggagacagactacagatgtcaagtgaggattttctaaatagttaaaaatcacattctagcaatcactaccttt

SEQ ID NO: 236855 - DNA, 1146 bp, Cannabis indica
ttttgcgtcttttagaaacgacgcaaataaaatactatttgcgtgtacggtttatacgtcggttttataaaccgacgcaaaatctttttatgtcactaaaaaaccgacgaaaatactcctttttgtagtagtgaatggtagctcgaattcgaacatggagtactaggcatctgacttttgtaggaagagtggtgcttattaactctgttttgatggccattcactcgtattggagtcaaataatggtgctgccaaagaaaattgttgctgagattgaggccatttgcaggagtttcttgccgagtggcagccaccaactcaaaggggttgctgccatagcttggaggacaatttgcaaggagaaatcagcatggggtttgggcctcaaacaggtaactgaatagaatattgctgctatgtttaaatatgtttgggccattactaaaaaagaagataatttgggggtgaaatgggttcattacgtatacataaaagagcaatcttggtgggattagaaagctaaaagcaatgatagttggtattggagaaagattgtggcaataaaagagaaagtaaaagagatcaatgatttagaagaaagggagcacttgagtaacaagtatgtcatcactcaaggctatcaaaagctcatcatggccgaaccaaaggaacattggccgagtattgtttggagtcggctaaactatccaaagcatagttttattatgtggatggccatgcttaaccgactcaagacaaaggataggattgccaaataccaacccgaaattgataaaatttgtctattgtgcagcagggaagaagaatcgatggaacacttttttttaactgctcttttaggcagacttgcttgaatgaaatacaggtttggctgaactagaacatgtgcaaaaggccgctgccaggagtaataagatggcttgaaaaggccaagatcaacaagtttcgaagaggtgtaatggctgctacacttgcagctttggtatatacattgtggtgctcctgaaattcaatcttttgggaaaacaaaattgtaaaaagggatataatcatagcacaagtaaagaatattacaaagtgtcgaatctcttgtatttggccaaaaaaaagtgaccaatagagata

SEQ ID NO: 236856 - DNA, 1942 bp, Cannabis indica
cgatgtccaatccgatagggtccgatgtccgtttcgtttttgcattgatttgttataggtccaattggtccgatgcccagctcgataggtagtctcgatggtcataatcaaggaattttttgttatggcccgatgcagtctgatacattgtctgatgtggtccaatgcattcggtcaaaaaaatatgccattagttctggcttagtgtagtctgatgcccagtccaatagggtccgatacccgtccgatagtgtagaaaagaagaatttaattgtcaaatttaattaattattattttattgatataggaaagaaaataagagatttatattaattgagattagagtatttaacaagaatatgcgttaattattgaatatatatatatattttttctgttaaaaaaatggaatttctttttgcattattttatttgtgaaaaaagtgaggtgtgtggtgctcccaatgtagcctttctgtatttatgcctaacactttttcaaaaaagtacaaactatttaattcttgggttttttttttttgcagagacctccacatctaataatttcactgtcggagcattacacaggctgtgtcacttggcgcgacggtagttattactacccaaaaattaaggccaaatttgaagaattcagactattggatagggtaagggaatcccctttcaaacagttcttcgagagagagccattacaattttcaagagcattgatttatcagttgatgttgcacaaaatcaaatctgacaagccagacgaggtacatttttacttggcaaagaagagatgtagatttggtagggtggagtttagtttggtgatcgggttaaacttcttgcctggacctactgagaaagaaattgaagagaaaggaagttcggactagttaattattgaatatttcaacggtaatccttccatcagctttgctcaactacgtagagtttttgagtgctccacagaagttgatgatgtctacaagatggggatggccttgtttcttatgggcgtcctcactggtaaggaggagaagactgtcgttcctccttttgtcattagaatggttgacaaccttccattctttacgagtacccatggggaaagatttcgtacaacaagttgatggaaacttgtaataaagactacttacatgtgaagaataagatgcttaagaagattgaaaagagagttagtcagaaggaggctaaatactcatcttatggctatactgtagcattgcagtattgggcatacgaggccatcctagagctgggcaacgagtatgcagtgaagaagttgtctcgcttttcgagaatggtgaactgggagagtaaaccaaaaataattcatattaatttccatctactaatatatttgtttatttttcagttgacagtttactctatgttatgtccccgagcgaatgagattgagtttgtgagttgcatcactggcggtcgggcgcctttatttgttgacttggaggaacttgtgttgggtgatgatgggaaaccaacagaggatgctatgtgaagccaggccaaaaagcttgcctcaacattggaagaacgagtggatgcagcccgaatatttagagactctacaccacctgcactgtctccaccacgagcatcgtcttcactaccagatgagtctagtgttgccccatctgtagcatcataggatcctcctctttgcccgtcaacatatattcccaacacctcagtggcttgcgaaccagtataccctaccattatggtaaggttggagattgtggagagggagcaaattactttgagggaaggctataccgctctgttaagagcacagacagtgattatggattagttgaagaccatagtgagactattgcaagatcctggaaggccgacaccatatacacagtcacagccacagccaca

SEQ ID NO: 236857 - DNA, 1087 bp, Cannabis indica
taattcatttaaaatatttcttttttcttttttaattatcactaatctatataaatttttactctaatataactttaactcatcttttttatcaatatcatcaaagaatcttcattaattcgctctccatctctatctcactattagccatgtatgcatgacaagttggtttattaaatgctttattagtttgagaaacttagttatgtttttgttggataaaacactataacgaagccaataatactttttttaaatttatgaccaattttgaaaataaatatgttattgtgtataaccgatttatttatttaatttttattcaacttttcaaaataatcatctatttatctatctatatatatatatataaaaaaggagagaaatagagtggtgacatgacactctataatctctccaaaaccatctttctcttctctcctcgattctctactaagtgatattttactattattttaataaattttcatattttttttcgtttcttcaattttttagagcatacattcttcatctttctcattctctaatcttatatgttttttttaatattttttttcattgtttagaataccataatgagcgtagcaatgacatcaatagacaacatcaaaatctcgactttttattggtatatattttcttttcatattttataatattttttttagattactaattattgtcaatatgatttatttattcttaatttctcactcatcaaaatatttcttgataatttagagacatacctactttttatttatatcgacaactttactatctttataacttcaaattattcataatttatttattagcctcgattttctattagtattttttctctatatttttaatatattttttggtagattattaattaatgtcaatataatctatttattcttaatctctcactcatcaaaatatttctcgataatttagagacataccgactttttttttatgtcgacaacttcaatatcatcataatttcgaattattcatgatttattcattactctcaattttctaatgcaatacataattatttattgttatg

SEQ ID NO: 236858 - DNA, 991 bp, Cannabis indica
ggggtagtaaacaatgtaagtctacttacaaatgggtgaaagacaatggggtcccaacagtgagaaggtacatcaaatattggttatattgtgttgatttgatttgattttatattaattatttcgacattcaataattaattttcttaaacttgttttgtttaacagataaagttgacttcaactcatgtaatactacccaactactactctgacttggaaggaagaaagagtactgaacacttttttcagtgcaatcaatgagttgaaggagtacttttccaaggagttaaaatctcagttcatatcattttctttgaaacttatggacaaaggagaaggtgaaggtcgtagtgagaaggatttggaggaggatgttgcagaggaagtgggaagaaggcagagtgcagccgcgccgtagatgagtccacgttgaagacgcctgccgattcgaagaccaatgttgttgcgcattccgaggagaatgttgtggaatcattatcaacgcctttgttatctgctacaaaattggatgaaattaaaggtatggagtaaaatgtagatttcaaagaatgttatgcagagaagaacattgaggatgacgactttgatatactcaaagacgcatgtttttggaataaaggcaaatccctcgtgagagtgaacaagacacaatttgaaaatgtggctttaattgaggatgactttaatgagaaggcttatgaggaatttatcaactcaggcaaaacaattattggaccgttcaagaccaaggaagcgatgccccgtaagctttttgggttttacaagttcattttcaccagtacattagatccagggtaagtaaatgttattttggtatttgtgattatcatatacttataaaaataattaataacagtcacattcagtataattgaatcagatatgtgcttgcaaaatatggaaagtatgaagtggacaaaaggtgcatggcatcgttgtgaccctt

SEQ ID NO: 236859 - DNA, 757 bp, Cannabis indica
agggtttcatggctatttataggtgaactagctcaattaattaggctgtctattataatttacacttacatttacatacagaatcaatatcttctcttaaaaagtggtatatcatactgtgttaaactaattaaaatttgataagtcaactaaatttttatttataaaaaaattaaatctttaattcagacaacaaaagtagttaacatatttaatataaagaggagtgctaccgtcaacttcatgttataacctcttagtcaactttcacgccaaaaacacatggcggtatattttttttcaatttttttttcacgagagtgttcgttatatttacaaatttttgaaatatttcgaatagtttatagtgccgaaaatacgtttgatgtttttttaacacgcgtagtaaactaaaatattcagaactctgtgttcggtactgtaaactattcgaaatttttaaaatttaaggggatgatactgtaactaaaacgaataccgctataaaaaaataaaaaaaaaatgtttagacatataatttcgagcgtagaaattaattaaaaaattataataagaagttgtaattaggatttctcatttgtaacaaaggatctttattcaaatattaggtagagaaatgctaggctgcaataatatcgggtctatacgtaatcactcaggtatttaaatatttatattaatttaattaggttttaatatgtgaaatatagtactataatatttttgaactcattta

SEQ ID NO: 236860 - DNA, 637 bp, Cannabis indica
gaatggaggcacataataatacaatagaactggcatatgctcgttctcacattcaagaatcaaaacttagtttcttgtcaacagcttcaagattctggcctttcccatagagttcccaaacccactcaaccagtgtcaccttgcttggttcttctttcaacacgactgatcttcttccgcagctgatttcaagggccaccatgacgaagctatacatgtccaattttttagtagccttgccagtggtatgtaacaatctttggcgccatgtaccctcttgttcccgctagcacagttgtgtccgattcccttttgtggtcgactagtcttgccagaccaaagtctcctagcttggcattgcagttcgactccacattgcatcacttgacttgatatctctatgaaccacgcactgttcccattcttcatgaagatacagaagggatgaggccaaaccaagagctatcttatgccttaattcccacggcagtttgagtttcccaccaaataggtgtgtgtcatcaaggcttccattgggcaaatattcatagacaagaagtaacttatcgcgtttgtgacaccaaccaataagttgaacgaaattcctatgccttaaacgacttataatcttcaccta

SEQ ID NO: 236861 - DNA, 1027 bp, Cannabis indica
atgtaaattggattgaattaattggcattttatttgataagtgatagtctgaaatttaattgagatttaatatgcatggaatgacatttatacccttgtatgtgtgaataggtgaaaattggccctaggggcattttggtctttttgcctttattgattatgtttaataacattgatttttgagatgaaggaagtcaaaattctggatttgtctccctctcacccgacccctctttctctctcaaaaccctcttcttttagaaattgattttgggaagaaaacttgattcttggagtgaattgaagctagcttttgaagaattaagcttgattgtggcttgaatttgaggtagttcttctcctcaccccctttaattgtgaatttgttgttgagtttggaattgaaagtatgtttttttttaaagatttgagtgttcttgattatatgatgagtgaattgatgtttgattttgatgaattggatctctattgcatgaagttgttgttgatttttttgtgaagttgtggctgtatgttttaggggattttctaggttgaattcaggtattaattggatagtttgctgctggaaattaaatgttttgggtgtgcttgaagcacaattattaagcttgaatattgttggtttaaagcatgagttatgtggttatgcaattgaatttacaggggataatatgagttttgatgcatgtttatgtgttttaaactccctaatgtttgctagcaattgaatgttataaattggaagttttgtccatgatttgggatgaattggattgagttttgagctgaaaatcgtgtttgaaggtggttgttttctgggttttcaacccaggtgtcgcgatatgctctgagcatgccgtggcccgcctctgctgatggaacatgggggttcgtcccaggtgccgcggcatgacatgggcatgccgcggcccgccctggtgtttttgggcattttgagttgaatttcaaaaattcataacttttgattccgaactccgatttg

SEQ ID NO: 236862 - DNA, 802 bp, Cannabis indica
ggcataaaacccaacaaagtccgtatctgaacgggtggcacgtgttcgatgtgcctgttggtgatccgatgtgatcgtgaccaagagtcccttcaattttcagctaattaatgctctgattaaatcatacctcgagacgcgccaattatttgcatgcttttgacggttacccttctccaagtacttgattgcatttgatttttcaatatttgcttttggggagaaatcgaggcgtttgaaattcgaaatagttgtaccttttcactaatctgcttataaataggacaaaaattcctaataaaccatttttagcatttttcttctttagtgagttcaaagcaaaaacacctttctctctcgaattcttcatggaattagtagaaagagccgatcaacgtcatccgagcaacctcaaagcttcgaacagtgagtaagtttcttatctttttctcctttaatgcttgaatctttcattttctgggtttccattgtagaaaattcaatagtcttgactttgttctaagaaaactgtagagaatcaatgttttagaaacatgaaacttcgactgtaatggatcatataacttgactgttgtggctttctgatttaaacttcacgatattcggttctcactttacccatttgaggtttagtgaagaataacccttaattcgagtgtttgaaattctgggttatgaacttaaatcacgcaaaaatttcttctttttaatcttttgattggacctggtcggtatgctttgcttgttttttgttcgtcatcccggccaaatactcatcttg

SEQ ID NO: 236863 - DNA, 1069 bp, Cannabis indica
gttaattttttttaaaaaagaacatttattaacttaattgttagatttagggccattttgcatcttggcccttgatattaactaataattgtgggtctatttccgtcatctactctattttattttcttcattaattatattaaatatatattacttcatataaaaagaaaaatattttcacacatttttgtgtgaattaaaaaaatttgctaccatacttttttgaaacatcatgaatatatacgtaagataccaatatcaatttattatttatttatttgaaaagaagattcgatgcaaaaccatcaaaagtaaagtaaaataaaaatatatttcttttttttttaaaaaaaagtagaaaagtaagtggattttgttttttcctttctaaaatagcacgagaaaagcttaccttaaagttgtcatagagccacccaatgcaaatttggtttcttttggcatgtttctaataataacaatataatgtgattgtattcaccattattttttctctcttaccttattttttaatatatttttagtgtacttttaatggatattgcctataaataagtaaattttagtttataagcttaatttttctttctatctaattaatttaatctcttatttttacattatatgggttgggtttgtttctggaaaaagattaaaaataaagtttttggcgaaaaaaaaaataaaattgagtttgacataaatattttgtattcaaacatatttttgatataaaaaggagatattttttgacatttttttaattaagtagttaaacttagtatagatattaaaattttctttgattattcgtcattgaatcaaaatctaataatttaatatttttaaaattaatatttttagtaaaaattgtgtagtaaccctcaacaattgttaaaattaatatttacaatcaaaatctaataattaatatttattcaatgaataatacctattgaaaagtgttatatatatttgtatatatactcagtatggagggcacgtaaccctatcaaaatatgtagattataattacatatcttactttta

SEQ ID NO: 236864 - DNA, 1123 bp, Cannabis indica
acattcttcaggtaagcccctccttttaacagatgcttcttagtgtgtctgtggtagaagtgaactcggtagctgcatcatgtcgtcttggggcttttagagcttttccaatctggataacacaacctcatctctatttgtcagattagtattattgtaattgttgttgttgttgttatcatttcgcaaggtatatgtttggatccgactgtccggctctcgagtatcggagaaagacatttggatttagatgagagaacataattcctatttttttaagtgaacgaattgagcggtttccttagtatatctatataagtatatttattgacatatataagtatataaaaactatttaaagaaaacgctaccccagagtcgccaaaatatttagggtttctagctaaatatttaattataaatatataataaataaataaataaataatagcttatgatataacgcataataaataattataaacttaatacaaattatataaataaacgtaattatagcataatatgtatatatatgaattgtaagtaaaattatgtgtatatattgctaaataagcatataagtataaatatatatagaatatgtaacacacaaatttaagtacttcggcagaatatcatttgcctacatctacaatagcatttaagctatgattaagttttattaataaaatggagatctacaaattttaagaaattattcttcataatggtctcaactgtgtgtaaatggctattttagtgaatagaagtggtattaacgcaaactttgcttgtgtagagagaaataagatgaaaaggaaagaaaaagataaaataaacaaagagggtgcatataaagacacttgtttgaagtttatcttttctgaaggatttgaggtgaaagattcaatggagtttgtatacaagcatgttgttatgctttgacgcttacaagcagcctgtgtagaggaagagaaagcaaggataatttctttcaagattgataagacaagcttgatgggactagacgccttcttttcctatttatagaggtagcttatcgtgcctcttcgaggtgaaccttatctttgtaaaagaatcaagtggcagctgcttttac

SEQ ID NO: 236865 - DNA, 1148 bp, Cannabis indica
taaaagagttattattgtgagaaacaatgtgtgtattacagtgagaggaagaagaattaagactaggagaaacttgactctttaacatacagggatgttgtgtgttggaggcaagtcaagttgagttgtgtcaaacttgtaaaggccattgtcaagtttccatggagtaaaatcctcgaagtaacctgatctttcacaacacaataagtggggtgaaactcaaagaaaacactattatcatgggcaaattgggatacactaataagattttttgtaatggaggaaacatgcaacaagttattgagaaccatatgttgagatgagtaaagtgaaataaaagatgaatgaccaatatgtttaatatgcaaaaacctgctctattgcccatgtggatttgttgatctccaaagaactcattgttggtgttcaagttttgagctatgggtgttaggtgatttgtagcacaggtatcagggtaccagcaggggtttgctacggtttgagctgtggcaagtgaggcttgcaactcaacaatgttagcagaaccattgaattattgaaacgattcagggccagtgaagttcttgtcaaaatggtaaaagtaatgctgcactgtgtgacccattttatggcataattgacattgtggcctttggccccaaaccgaaaagatgcccatgccacgagatggaccacccctgaaattaccatactgtccacgagcttgggaagagccacgagaagaattggatggaaattggggaaaaccagggggaccattgaagctttgtggtgggtaggtgaaaccaggggggaccaccacgtgactgattggatgatgtggggtttggaggagatggtcctgatccacgaccatgggcacatttggtgtgagccaaattcacttcacttttggtgatatcaagttctttagctgctttgtcaagaaacacttcttgagccattagaagagcttaaatctctgcaacactgtaggcatcagtacgagtgttgacagaggtaatgaagacattgtaatcgcaagttcggccattgaagattgcgtcaatgtgatcttggggagatgtacgatgtccaatagaagcaagagtgtcaacaatactcttgatcttgagaagatcatcact

SEQ ID NO: 236866 - DNA, 1373 bp, Cannabis indica
tcctccacaggagccatgagagcggtggcttagaattacaaagggttgggacagacctttacggttcgtgaacttaagaccccgttggtgagtcagatgcattttagtaattttaacccgagaatgataaaacagagaaatttatattatgatgtgctattgaactatattattatacattatgcatgtttagttctttttcaggtgtgttctgacaagttggcacggtatagtcacaaccgggtattttgggttgaaccgagttcagggccgaaatacaaatttgggatagtttattggcatatgtgattaatctgaaatttatttgagcatatttgtgtgtgtggaaatgatataattgcccttgaatgctcatatgtatgttatatggccctaggggcattatggtaatttggcctatttgtatcatttgtagtaaaatagaattatttgcaaaataagggattaatttttggtttgctctacccaaaccgacccctctctttctctctaaacctatctctaaatttgtgattttgcttgagagttgcttggatttgagaagatgttggagcttgattttgttgaaagtttgaggtagcttttacagccttaattttaaattgttattgctgaaattgaagttgaatgttatgattttaagctttagatgttcttgatatgcatgtatgttgatattggtttaatcttgataccttacgcttgattgagttagaaaattgatgtaggatgcttatgtagtattttgagatgattttagggattttattatgtttttaattgattatacaaaatgtgaattttattgttattgtgagttgagaattttggcgaagtatttaagctcttgaagttgggttcttggtgaattttgctttagtttgaagcctatgttgtatgttgtttaaatatgaactttgagggtttatattgttggattttatgcatgaatttgtgttttaactctctgtgttgatgagttataattatggagtatgattttgagttttgattatggtttaggttgaattgagtatgatttggccatgttttttgaagctggttttgaggttttttgggtttggaactcaggggtcgcggcccgcctctgtttttggcctaagaatcgaacccaggtgtcgcgaccccatgtgggggtgctgcggcccgcccccgtgtgtttgggtagattcgaacgcgatattcgaatattcataactttatgatccggactctgttttgggtagttcgtatatatcattggaaagctcgttctaagctctatgtgaatatctttgatttgaattgccattcttatattttgtgaaaagtggaattagggattaacccta

SEQ ID NO: 236867 - DNA, 898 bp, Cannabis indica
tttggcaaaattcgctaccgatgttgttctaggtgatgcagtagggttcataacaactgacgccgtagggtccatactgcgtcagttttttcataacaactgacgccacagggttgttataaaaaaactgacgccatagggttgttataaaaaaatctgacgccatagggttgttataaaaaaactgacgccataggatcttaatattttttagctttacaatttcgcttttagcataatttatatatattatttcattattaatataattaaattaagtataaattatatataataagcataaataaaaattaaattaaaaagttaaataaatacacatttatattaatctaattgtctgtatagtagctatctttttattaatattttatattttacattatgtgtttgtattttgtaatatattagtatatttttataattttttaagttatgtttcggataataaataatgtgtaattttatgtaatttaatattttttatacatttaaatttttcaagaccaataaaataaaacattaatttaaggaccaaaataaatagaagaaattagagaaagggctaaactttgcatgaaattttttgaaaactttaaacattaataacttttgacccgattgtccatttgaggcgatttgtttttttaacttgggtattttttcgcgttctacacatcgcaaacagcctggccaaccattttgtccaaaaaacactcttttgtatactaaaatcatgttatgcaccctttttacctaatttttgtgttttattttgctattttacttaaaataaactaataaaattctaatgttaaatattaaaatcaatgtttgtgatgcatttgataattctaatacaatgaaatgtgcaatacta

SEQ ID NO: 236868 - DNA, 1300 bp, Cannabis indica
gaaatccttgactgctgcacacactatttcatgccaaagcttcttgaaaaaacctgcccaggtattagagaaataagattcgagttaaactcattcggtattatacctgtattaaagaaatccttgactgctgcacacagttctgctcctatttcaggccaaagcttcttgaaaaaacctgccccatacccgtctgcccctggtgatttaacatctggaatgctaaaaaaaaacagctctgatttctttgttggagaaaggcttgatgaggcccagctgctgattcaggtcaagtctagtaccctggatgatacaatcagtattcaacttattataaatttgatctctacttcccatgatacctcgaaaatgagacacaaaatgatcatgatcaaccacttcaggaaaataattcacaacttcaccatgatcattgatgaacgaagtgatactattttcgagctttctctttttcaggatagcatgaaaaaaaaagtgttttcatctcctttgtggagccaagtgaccttgcttctctgcctcaaaaagctgtgatacattttttcctgactaataaagagatctgctgcttctttttccatagcaagaaaagaatgatcctgtgggtgagcttgagattgtaatctggcatcaagatatttggactttgcatcctgataagacctgcgaatatcaccaatagaaacatggttaaattttctaaggcaatgttttaatctcgtgagcttgaaataagtagccttaagccccttagcagcaatcggcttcccccagttgtgcatcactgttgctttaaagtctgggtgttcactccagaaattaaagtatttgaaaggcttgtaacccatcttgattgttgctggattagagatagtacaagaacaatgatcagaaatagtttcccattgatatagagctttcgcatcaggaaaagcatcaaacgagtcttccttcgcaaatacatgatcaatttttgagaagattctgctgtccccttcttgattattagtccaggtataattagatcctaaccgtggcaaagattcaacattagctgaggctaaccaagaagaagagtcttgagcgtcattgaaggtaatcgggttgcctccaactctatcgtccacattgaatactgcattaaagtctcctaaaatcaaccaaggtttcactggcagtttgctttgatcaagaacctcccataaactttttctttcatctatcgtattgtgaccatagacaaaagtaacacaaaaagctttatcacaacccgtcatct

SEQ ID NO: 236869 - DNA, 872 bp, Cannabis indica
agatttacaaagcacgttactacctgaatgacacttttatttctactgaattgggacaaaatcccagctttatttggaggagtatttgggctactatgcgactggttaaagaaggtgcaaaactatcaattgcagatggttctcgagttaatgttcttaaggatccgtggcttccccatgagtccaatccttatgtcatagctgagaatcaagggcttcaaaataagtttgttaatagtcttatgactgttggggaaagatcttaggatgttgaactcatttcagacatgtttttggaaagagatgtgggtttaattctaaacattcagttaagtgcttttgtggaaagagatacatggtattggaacatggaatcgtcggggttttacttggttaaaaatgcttataaacatcttcaatcgagtataggaaattggctttatttggaagacaataactactggaaaaagttgtggcaattggctgtccctcctaaggttcgtcatttcttgtggcgagcgtgtttggtagtcttccaacgaaggttcagctccaaacgaagcatatcaatgtggatcttttttgctctttctgtgcagcagccgcgcctcctgctggtgcatcagatgactttgcagcctgggtttttggtctgctcgaagggaatcaagttgatgtggtggtggacgctgctatgatcagttggagtattcgaaaaactcgcaatgagttgctttggcagaagaaaacacgttcaactttggatgttatgaagtcggctagatcaatccttgcaaattggaagattgtaaactttgagttgccttatgcttattttgctacgggtgatgttactaatagcaatctttggg

SEQ ID NO: 236870 - DNA, 1154 bp, Cannabis indica
gctgggcttggctcacgggtgctctactgtgctggaaagggtaaatcggtcactgatcagccatgagtgcaagggcttgacgatatttgtacatgttcgggccacactagaccaagtggattgggatctaccagtgatgtattttgtaactctgattttgccgcttaggttagctcgttaaatgagcttgtaatattttgtgaaaatatttacgggatcctgcaatatgtatcttgtggtttgtaaagtttaaagttattacaagcttaattttcattttgtttcaaataaagtttaaatttctcgcgcttatccttctagtaatcccgaattaggggattagggtttcataatcggttcgcgtagcatgcctaatagttagggcgttacactatctgtttcaacgatgaccctctgtcaaaaattttttctttatccaactcaaagcttctctaactcccataacctcagccatttcaggaattatttagcctacacgacaacaagtaattgcctcaaccaaagcgccaacaacatttcgagccacacatgaaactataagtagcagcttctgaaaacaaagctacatcaatatttatctttaaaccagtcccaactggttccagccaacgatcacaaccatcaacagcagtgaagaatgctacagtcggaacctggttactatcttgtgcatgagaccactagtcaagagaatattgggccaaaatagacacccctttcaaagaagcataatgtcaaccctttcaaattgattttgacattctatattacagagacctcaatcaagccgctccataactctattattcccatgctcatttcaccaagttaaaacattcttaatagagctaaaatcaagcaatttgcactcatcaagtacttcttaaaaagtttccatagcgactaaccttctattccttcccctacttttttaagtcaggctaactatttcttcaaagttaccaatacaaattcaaggtccactgacttcttttccaatcttccccaaaagttcccaagaaaacttttgttgtgatgcatccaaattactataaaaacaagtcaaagtttaagataaaaactgcttacctgcaatctctgcaacaatgtaacaatgtggccaggaaagtttg

SEQ ID NO: 236871 - DNA, 802 bp, Cannabis indica
gtttcaaagcatccaacaataagtttagtggtacttcaagtgagagtattggcaagcttgacaatttaagctacttagatgtctcctcaaatcgtcttactggatatatctctcatgtagtaaatctacaatgcccgagcttgaagtacctagatatttcttataatatagatatgttattgaaattcaactcaaaatatcctatcatcccctcatttaatttggcaaccataaatttggcttcttgcaagttaggtcctgaacttcctaattggctcctaacccaaacaaatctcaaacatctagacgtgtctaattcaagtatttctggtcctcttcctaattggttcccaaatataactttcaacttgaaatatttaaatatgtctcacaaccttcttagcaacaccttggccaatttttcactttcacaagaaaataatgtaatagttgacttaagttcgaaccaattccaaggttctgtcccaccttctcttcttgttaacacaacccgcttgtatctttccaatacaagttcactgaattcagttcttccctatgtgaagcaaaagagcaggccaggtcaacagaaatacttgacctctctaataacaatttatttgacaatattcctaattgttgggagaaatttcacacaattggttgtacttaatttaggatacaataagttattcggtaaatatccctaactctattaatatgacaagtattaaaactttcaattaaggcacaataacttttcaggaaagtttccttcgtcgttgaaatattgcacttcact

SEQ ID NO: 236872 - DNA, 623 bp, Cannabis indica
agatctgaattttgatgagactatgagtttaaaaaagaaaaaccaatctcagaaattattaatcttgtctaccatgcaactggaaccaatattctaccagtgcaattctattaaatacaaaaggcttgcttgcagtggtcaaagcatacctgaaaaaggaaatactggcagtggtcattactaagtgattgagaagatttaataatctggtgcagatctgtatccatgagttcatacaccaggtagacatccttgaaacttttcctatggataggcaccatgacatctttcagagcaatcacattttcgtgccgaagatgacgaagcagcttcaactctctcaaagttctcagagcatcgattcggttgtcaaagacattgtgtattttcttaattgcaaccttctcattggtttccctattaacagatgagcaaacaatgccataagctccacgaccaattggcttgatgggcacatactttgtatcaagttcaaacaaggtttgccacatgcagtagtaatgctttcctggggttctaatcccatttggaggctctacaggagttgccattcctattcctagagaaatgaaaaacatcaattataaataaataagcaaaca

SEQ ID NO: 236873 - DNA, 637 bp, Cannabis indica
acatcctcagggagaaaagtaaatttttctattggaattgaaagccttcttcatcaacagaaatatatgtgacagttttgatatctttgttcagccatgggaacttgtcttgaaagataaatcttgtgagttcaatataaagtaattttccttttggtcttaattgtattgcatagcaagttatattgcaatgtaattaaaattatttagaatggtacatagcagtttttatggtagggtaatatattattgtatggtgcatagctgtttttgttattaaaaagttacaattatggtattttacttgtttagtatagtgacacatgttatacatataagacaaggtgcttaaataatgatgtattttttgaagtattatccctattacctacaaagacattgtttcaattgaaatgtgtatctaaatcttggaacaacttaatatctgatcgttctttcatccaatctaaattaccaaggacaaaacactctatctcagaattcatcttccaagacaagttcccatggctcaacaatgatatcaaattgtcacatacgttcctgttgatgaagaaggctttcaattcaaatagacaatatttaattttcaccctgaggatgttgtggtattgtcatc

SEQ ID NO: 236874 - DNA, 849 bp, Cannabis indica
aagaataaaggacacgctgggaggttccggccaagccgcatctcccaagaattatcatttgccttcggagatttctttcaagaaacgcctataacaactagcattactttctagttggttctcactacatgttccctaaccctagcatcattcaactctaatttggaggtggattttgaagggttgggtttatacaggatggttgattctgtaggaaactcaagttcaaaatcttttggatgataaattcctaaactagagtgggacatcgctgcaagcaaaaagtggtcccaatccctggagagaattttatcaaacctgaaggtggtgagttggagattttgaaaaaacctacgtattgcctgaaccctagtatcgagctaaatatagtttaaccctaaaaaactaccaaaaccaaataagatggcaacgatacaaacaaattaagcaacaattaaacacaatgaaacaagcatgtaaaggaagaaagaaacttactgtttgaagttagggcttggggaaatgaatggttgtacagtcttcaaatcttcgaatgtagtaaggatctctttggaagatgaagtcagaggaaactcattgaaaaaatgtcaaggacaaggatggaatgcaaatcctcaagcaaacttgatggtgattcttagcgaagaagcttaagaatttttttttgctcttttctatcttaggaaagaatcattttttagaaggagttttctttgtttggaaacttcttgtaagagaagaaattctcttatggaaagtttgtttttatggaaactttgactattattattctacttaatgagaacgattgtgtcttgataagatcag

SEQ ID NO: 236875 - DNA, 1307 bp, Cannabis indica
attacttcatgtttgcttgtcaaccttgtgagaattgcttcgactatattttgattcttccagctccattcttgcaccaaacttcttaaacattctaccgtagtacaaattggtaggtcccttacttcaacaattgcagaattcaaaaattttacaatgttgaatgtcatgttcgagtatctattggtttgagagtgagcttgagcccatttttcgtacccgatttcttgcaagtagggtcgcaaccacttgtcaatcttatatagttttttcatgtggtgctcgaagcttttaacagtgtatgccttttgcctctgcgaagaatgtatttaagatatttttttgagtttttcttgaatttgcttttaatgttttttaacaggtgaaacgtgcaagctccatgaggttattctaggtaaactttgatagttgtcttttttatgctttcatgacaggaaaatgtaatgatcatgttttctcttgcaccataacactttctgaacttatcaaggaaccaactcccaagaattattattatctgaatcaactatagcgaaagctaatgggaaaatatgacctttctcatcttgagtttttgcaaccagcaatattcctccatatgttgactttaagaatgtcccatcaactatcacaacaggattgtaatgcaactatccttttcttgaagcattcaatgctacaaaaaagaataagaatttgctatctagagcctagatttgtaagatgcaacaagtaaagatacttggctagttcagagtaagatttaactacatttcttcccactttttattttgtcttttgtgttgatctccaagctttgatgtatttgactcgcactccatgaatttttaacttatttataatatctataactgcgattttaatcttgatatttttaaatttgtacttgatcatatctgcaatgatggttgtggttgcttgacgttgatcttttaatctgatcttcatatcacagttgtgatcgtcatcaaaagtcctagttataatttggcttctgtttccattccttggtgcccttaacttccacttgcaacttttgtcaaagcactgcgctacgagctctcttttgcaagattttttcacactgtattgaaaatattttctagcgtggtggcttaacccaatcttcaaggtctctttatctttgtatatttgagacagctattttttgatggtttttattgttgattaccgaatcttcatcaatttcgttcacttctgcatcgttgcttgcttcatttcccatttctattatttgattggca

SEQ ID NO: 236876 - DNA, 478 bp, Cannabis indica
aacaagtgactcttttctgaacagctgtagttaaaagctcaagtaatagggcgaatgatcggaagtcgatatctcaaggttgtaaagtttagcagaactaaacaattacaaccaagtaaggttcgctaaacctctgaccaagcaaacttcaatccaattcaaagtacccctacccatttcccaagtaaatggataaccacaaagctccatgtcttgtaatccactgtcattcaaagcttgttgaaagccatttattaagaattcagggtatcgattccctccccttttatcttcatgagcacacacattattcatgtgccccattacacaccaaggtaagcttgaattagcagccaaagagcgcaaaaggttccaagttattattcgaagacctctattcggttccccatacagccccgtaaatctccaatccactataccttcaatcgaaacttttacatcaatgtaattaattgag

SEQ ID NO: 236877 - DNA, 775 bp, Cannabis indica
taataatggtaatagcatacttcctttaaattgtattatttagagaattataagatcacaaggtctagccaagtgagtttttaatattcttgggaaagcttacaagtattttttcaaagtaatttctcttcaaagtgtaagaaaagcggtccctttctcaatgaatgtccttactactgatagaagaaaggtaatacatttaagtcctagaaaataggagcagtaaattaaattccttattttggtggaattggttgaagatttgctccaagttggcaatcccacaaatctccatatggcgagttaatctcgaatgaatagggatcctgtttgctatttttgtggaaaaaatttaggaaagaatctagagaacatctacttcctatcgtatttagttgtgcggacagttcattctgcacgacatgatcatttgaacggcataccacgagatactcgctccgtttaaataatagttgtaggatagcttcacttagatgaatccaaatttaagagggatttagttagcctatttggggcatatgctccaatcagctcttaacatacctatcacgtgttaccttgtgaagtgccatgtcatcttatgcaaaatttgggataatatttttctccaagtctgcgtgggaaaacctagtcacgtgggaacatatacgttctgtgcattgctaagacaggtaacaggtgctagggttcacgtgtcgttcaggcaatgtcgtttgctgttacggaaattatgaacactacgcaagtatacgca

SEQ ID NO: 236878 - DNA, 1565 bp, Cannabis indica
tagtgataagttgatttagtcacaaaaaaattagtcgctgaaaacctattttcttgtagtgaacagaaaaaagtacaagggcaaaactctactagagtcattgttcgggggaggaataaatcctatttattatttttctttcaaactcaattgcttatatttaaaacagacacaaaaattgaaaaatgtcagtttacaactgatgcaatgtggcagcagtcttgaatcgacggaaaatttaaattgttcattttacgtcgattttagatgttgaccaatattgaagtttctagccattgaagaacaccaagaacagaacaaaacaaagaaagaaagataagaggaaggagaagaaagagaaggaaagacttagcaaaagattctcattgattatcaacaagtgttacagcatttatagtctagcattagaagaagtctataacagactttcctaactaactcacaatacaaggacatgtgtaaacaaacacaactaacagctaacaaccatgtaacggttttaactgtcttcaacacctcccttaaactcataattgaacgatcttcaattttgagtttgtgtctaaactcaggaaatctttgactggaaatgctttagttaacccatcagctaactgatcataggaagagatgtgtttgatttgaataaccttgctgagaaccttttcacgaatgaagtacaaatcaagctcaatatgtttcattctttgatgcaagacatgattctgagttagcattatagtgcttaggttgtcacaccatattgtaggaggttgtgtgagttgaatcttgagttcagagaacaagtattgtagatatgtaagctctggtgtaacactggcagcactcctatattcggcttcaatgctggacctccaaatggtctgctactttttgcttttccaagcaatcaggtttgtgccaaagaaaatggcaaaacctgtggttgatcttcgatcatctggacctgatgcccagtcggcatcacaataggcaaccagatccaaactctcagacttctgcagatgcaacccgtgatctattgtgccactaacatatctgagtattcgcttaactgcatgtagacaagggcttttgcataaactgacagaccttgtttacactaaacgagagttcaggtcttgtaatggtcaggtattggagagcaccaacaactgacctatacaactgaacatcttccaatggttccccctggtatgcagataatcgaataccactagtcatgggtgttggagagggtttggcattgttcatttgagctttgagaaggagatccttagcatattttgcctgtgacaagtgaataccagctgctatttgggtcacttcgatcccaagaaaatatgcaagaggaccaaggtctttaagggaaaactggctgttaagagctgcaacaattgactcaatagtagcattgtcactccctgaaatcaagatatcatctacatacactagaataagtgtaataaaagtagatgtatgttgaataaagagggaataatcagatttggatgatgtgaagc

SEQ ID NO: 236879 - DNA, 612 bp, Cannabis indica
gacactccaacaatatgtaaaggggcagggcaatgcccatgataagctcgattttcctagtaactccagtgactaaggattataacaatcctctacaggaggaagggacacttcggttatctcgagagggaacacgtcacaagaggacaagtggcagttaattcggtaaagcagttaagtaaaagaattgcaaaatgaataaatattggcttgctatggtcgtcaaccagaagcatttaaagacaaactgttaaaaccaggagtagtttacctggaaccccgagatatgacaaggattaaccctggatattggaacaattgtaggagtatctcagggattgaccctgaacatcaaaatcagatgcttttggaagattgataaaataaacaattcaactggagaagttattatgagattaatgattgtaaatcgcatcgctgatgtaatattttgaacttcagttgtgaataaaataataatttctttcaacaagtaattataaaacgtaaaccctttaaaattacttgaggggcatatttgtatgatcaaccggaattaatttcgaaatacataatacaacgcaaacccatcacttcaaaaataaaaaaaaa

SEQ ID NO: 236880 - DNA, 901 bp, Cannabis indica
caaaaccctaattagataattatgtattattgaggaattatattattatataatttaatatatgtgaatttgtatgatttatgctatgttaagtccccgctggtgagccaagggcatcttagtaattttgacccgagaaggctagaatagtaaaattaatgtattaacgtgcttatgggactatattattatatggtatgcctatgttgtcctttttaggtgtattctgacaggttggcgcggtatagtcacaatcgggtatttcgggccgaacagggttcggggccaaaacacaattctgggattacttgttggcattataattatatgagaacaatctaaaatttatttgagtttaaataagcatgaaatgacttaaattcccttgtgtgtgtgtgtgtgcatgctttatagccctaggggcaaattggtctttttgacatattgatttattttgataaaagaagggactttttagaaattgggaatgaattttctgattttgtttaccgcttacccgaaccccctgtcttcctcaaaccctcttgtttttcaacattgaattgaagggattgcttgagaaattgctttaggaagctttggttcaaggtgattgtgtgtgcttgggaattgaggtaatttttcatggctttaatttgtgttttgtagctgaagtagtagttgaaaaacattgttttgctaagctttgattgtttttgtattgcatgagtgttaattttgatagagtttgagggtgatttcttgatttcgttgtggattatattgttgagttcttggctcaaatttcaggaaattttctaggttaaaattcatgtttttattggtgttatgctgctaggaaaaataatggggatcgtttggttttgaagctcaagttctt

SEQ ID NO: 236881 - DNA, 824 bp, Cannabis indica
tccaaccaaacgccaccttaattcttccatattactaactcttttttatatatataattctcattggtttttcactcaacattacacctctccttctattcaaagactcgaagtgataggcataacacttctctaagtagaagaaacaagagagaattacaaagtacttgttcatgcattttcttcacaacttcaatttgaaaaaggagataaactagttttttttgttttaaatataacttatcaataagaccttaagataaacatgttcataatttgtcaagtataaaaaaataggataaatagcggtataagtacataaaattttaaatttataagcagcataaatttaatgtttatttttagcagcataagtatttaatatttgtaaaactgtaattttcttacagtttcgtcagtacaaactccgttttaaatttatcaaaaaaatatttaaaagtaattgatactacacgtttttatctagactcaatgacctataatatgggcattgtagttatatgtgtcctgtttaagacaataacagagtatataatgacgaaattagagaaaaattacagatttataaacattgagtagttttaccgttaaaaataatattaagtttatgccgcttacaaacttaaattttttaaatatttatgccactatatatccaaaagaatatgccttttttaaaaagtttattcttccttacattcaaagataaaagctcatatttttcttcattattcttgtaagcattctcattcctcctcttcatggtcttcaagctaattgtttcacaaaatacactaaggctg

SEQ ID NO: 236882 - DNA, 1205 bp, Cannabis indica
tttatactttcttaattttttttctttttttactgttttttacttattaaagcttcaaaaaattttttttgtctttttatatatatttgagtcaattttgactctttttttctttttattatttaagtcagatactttactttttttttttctttctttctcttctctttctctatttttcttctttttttttttctaatttctctttgtgtcccttttttttttctcaaactaatttttttttatctttgtatatatacaataagtgtacatttttatatcttatttttttaacactctttttcactcttacaaaaaaattaagagcactcctcctataatatttttctatcttttacgtaattaataaaaatagtatatttttttgaatgttttgtagtttatttagagttaatctatgaatgatttgtatattttaaaaagattgatgtcttgatatttttcttttaatttctaacaagattttctataatatgagattgaatattataaatacaatacttagtttgacttctgtgttttttttaacacttccgttttactatactggggttgcatcatttattttttttgttgtgttttgtcttttttttattattattttaagcttttcatattattttttatagagtcaaaactaaatttataggcttttattagttctatttccaccctataaaatgataagtacaccctattagaaaaatacttatataattttaaaaattactcttgatatattttttaaaatcttttcctcgcattattttatgttaatttcaatacttattttgatttattttcatattttttttcctaaatcatgtacacatattttttttttttactttcttaagaaaattttaataggtatattttttaagaatatgaaaaaaaaaaaagtaaaaaaaattagtacaattaaatatataaattttatataaaataaaaattattaaaatttggtggctttaaaagtttttggggtgtagataaaatttctttttttacagggtcgagactggtttcatgaattttatatgattttcttatagggctgaaactggtttaacagattttgaaagttttgtaatgggattgcttcattttatgatttttttattttaagtttctttatattattttttttttctaaatttaaaactgattttcacatttatatt

SEQ ID NO: 236883 - DNA, 1824 bp, Cannabis indica
ttgcaagtaaattgatagttgagggagttttgccgcaaattactcttaaattttttgtttttattttaatttttattttgtaaaatatggccacgtaggataatttttattgacctgtcattgccacgtgggcaaaattaggacttaacgaggctaaatagacggcaccttaaaaatgtaaacgaaacagtactttggagggttttcccaccaaaatatgaagttggatggtttttcgcaagtaaattgatagttgagggggattttgccgcaaattactctattttgttaaatgatcaaatgaatattatattttccaaaatggtaaaaatatgacctttagttcaattttcaacaactttatttttttgatataactaaccttaagataatttctgaagatacaaaaaatgtaaccagttttgccataacatctctagatcgaattattattaaattttattttgacaaaaaatcagttcagaatcctatttatacaattttggaaaatacatggtccattttgtcatttaacaaaatagagggtccaattaataacttttgcaaaatacagagtccaaaatgatatttaccctaaattttactacctacaaaatgttctccacaagatgttattttccaaaacgtccttgcaaagtctgctacttatgaaaatatttatatttttttggataattttattggacactctattttggcatttgtattaggaatgtatattgccgcacattttttttattcacttttttatgagaacaatatctcctttgtttggacaatagggataagttttctcttttattctttttgtttctctctacatatatagtaaagttaaggaagcaactttgaaattagagtcgcatacgtgggagttgtatctcgagttattccgataaattttgaggacaaaatttctataaggaagagatggttgtaatatcctgataagcctaatagtaaatatttagggtttatatatattatgggataatcaagtaataagtaagattatgatcctacttatctatttcagtataaattttaattttattataagttgataaataagtgtactttattaattacgaagaattatatggcatgtgtgaatataatatgagctatttatggaataaaaatatttttaagtttggcgaccttggtgactcaattaggagccaaagatgtcatcacatgtttaattagtagttttgatgggaatattatgataagttgatagtataaatattagggttattagaagtatgttggggatagtgtcctagaaatagagttttttagtgattaagaaataataagataattattattaataaaattttattaataatatattaatattattattttaggatgaatattattttgaatcatgtgttttgtaaaagttattcattggaccttttattttgttaaatgatcaaatagatactatattttccaaaatagtaaaaatatgacctttagtttaattttcaacaattttattttttgataaaactaactttaagataatttttgaagatacaaaaaatgtaaccagttttaccataacatctctagatcgaattattattatattttattttgacaaaaaatcaatttagagtcctatttatacaattttggaaaatacatggtccattttgtcatttaacaaaatagagagtccaattaataacttttgcaaaatacagagtccaaaatgatattcaccctaaattttactacctataaaatgttctccacaagatgctattttccaaaacgtccttgcaa

SEQ ID NO: 236884 - DNA, 704 bp, Cannabis indica
taagtaaatcttattatattgaaatgagttttatttagggtacaaaatctaacaaaagagtcatcgacttccctttcctttgtcaaatactcgagccaatcaaccacttgagctcatccatactgatgtatgaggagcatcttatgttgcctcaatggaaaattacaaatattatattgtttttgttgatgactttagtcgattctcttggatatttcctatgatagtaaaatctcaagcctttgaactcttcattcagttcacaagtttggtggaaaagcagtttaatgtgtctattaaaagggttcaggctgatggtgggggtgaatttcgagtctttgacaggtttcttaaagatcagggcatttggtttcagcattcttgccctcatactcatgaacagaatgggagggtcgaaagaaaacacaggcacatcacagagacaggccttactcttcttgctcagtctgggctagacatgacctattggtggcatgctttgcaatgtgcttctaatactattaacaggatgcctacataagttctaaattttcttagtccttatgaatgcttatttcaacaagctcctgattatggcattctcaagtcattcggctgtgcttgctatccccatttaagaccctataatcatcacaagcttgattttatatcagaagaatgcatctttttggggtactctccta

SEQ ID NO: 236885 - DNA, 2553 bp, Cannabis indica
gatggtaataattggttggctaaagggttggttgattggctttctagttcgggatcaaattatacttggacaaataatcaggaaggcggcgaggatagaatttatttgagaattgatcatgtgttcaagaatgaagagtggattcatacttttccttgttctagagcttatttccaatgggaaacggtctccgatcattgttcttgcttggttacttttgctcgtccccaaaatattggcattaaaccgtttcgatactttaacttttgggctgaatatggagacttcaaggaggtagttatggctagttggatgaaacctattctaggcattgggctgcaggctatctatttgaagctcacgagactaaaacatgttctaaggaagtttaataagaacacaattggggatgtggaagttaactaccacagggctaaagagaagtatcaagaagctcgtacttgtgctcaagccaacccaagggatgctgattgtatgagaaatgaggatgaagctgctaaggattacaataaaaaagctgaaatgtttcacaagtacttagtgcggagaagtaaaataaattggctaaggaagggtgatgaaaacaatgcttactttcatgcttgtatcaagaagagggggaggatagccgaatagctagctttgtcaatagtcaaggtgaagttgtggacaactatagggaagtggtgcagcactttgttaaccattttcatgggtttatgggcagcaagagcactgctgttacaaagctgaatatcaagtgtatggaagcaaggaacaagttgacaatggagcagcaacttcaacttctcaggcctttcactcagaaggaaatcaagactacatttttcagcattccaagctctaaaagcccgggtccggatgggtttggatcaggtttctttcgaagttgttgggctgaaatagggcaggaggtgagtagggctattgcgcatttttttgaaactggattattgccttctaatctgaatcacactgctatttccttagtgctaaaggttgaaaatccttctaaggccgttgattttcggccaatagcgtgttgctctaccatttacaaatgcatctctaaactcctgtgcttgagactgtctgaagttctgcctactttagttcatcaaaaccaaggagcgtttgtcaagggtagatatattgcccataatgtgcttatttttcaagatctcatcaaagattatgggagcaagaatgtttcagctaggtgtgccataaagattgatttaagtaaagcttatgatacagctgactggggatttcttgaagatcttctcaaagcctattgcttcccttccaggtttctaaactagctcatgatctgtctcaaaggagccacttatacaatcacgatgaatggaaggtgtcaagggaacttccaaggtattaaagggctgagacaaggtgatcctatctctccccttctctttgtgctggttatggagtatttgactagaagattgaacctagaagctcaggaggatactttttggtaccaccctctttccaaacacttgaagcttactagcgtttgttttgctaatgacctcatccttttttgtaagggtaatgctcatacagtaaaacatcttaaaagtgccttaattgactttagtaaggcttcgggcttagagattaataaagccaaatctcacatatatctggcaggtgtttctgatgatgttaagagagccatattgcaggaaattcaaattgaagaaggaagctttctgcttaaataccttggagttcctctaagacttactaagtggagaatggaagactgtgacactattttaaggaagatcaaactcaaactccaaacttgggctaccaaacacctttcttttgctggaagggtccaacttatccactcagtgcttctgggtttcaggaactactggatgagcatatttgtccttcctcagagtattatcaaggaaattgagaaactttgtcgtggatttctttggggagtcaaaggaaataggagtaaaattcatgttgcctcgtgggggaaagttttcctccctaaaggctttggagggctttgttttagaaaagggcctctctagaacaaagctactctggccaagtatatatgggctattatggagaatcataagaccttatgggtcaaatgggtcaacactatctacctcaaaggtattgaatcctggcgctattcgctgaaacaaaatacaagttggtattggaggaagctttgcaacttaaggtagattttcagtgaagataacatcaaggaagctagcaacaaagggaaattcattgctgtcaagctttataacagcaaaataaataccccaacaatgcagtattataagaatgtttggaatagattgagcctccctaaacatcagtttattatgtggcaagccttgaacactcaattgcctacccgtgatatcttaccaaaattttgtattcctattgacagccccttgtgttcggtttgtggtcttgatgatgagagtcact

SEQ ID NO: 236886 - DNA, 897 bp, Cannabis indica
gtaaccccaaggcaagtaattggaaaggcattcagatagctttcagatagagcactgctattgggcaccagtggtgcctagcaccttctagatgtgtcgccttgcaattggttagcgatactccataaaaattattatattaaactatatgggacccgatacttaattgcaccaatagcgatattgacacgtagaagggtactaggcaccagtggtgccctttagcatttctcctttcagatatcaccttctgtggtgtccactagacacggggcccgctgtgtcaaaggtttgttccctactttaggcatgtgtagtgcgtgtaccacaaagaggcaaccattttttttccaactcaatattcaatgatattttttggtacagacatgattgcgcacgacacctggcattctcaaatagttcccgctcttacgaacgatcgttattttgtgaattaggtctcactcaattgacccaaagtcaatatatattgtattttaccccatcggtgagcctaattgacatttttaaaccctattgggttcgagtttacccatactcagatttcacttataaatagaacatgatcccttcatgcaaagggatcgatcgtttgaaacacatattttgggatcaagtgctaagaattagggttcatcttctaagaccaaaacacttgtaaaaaatactttaaaacttttctaacttaataattttaactagtggactagagatcattaactctcgaaccacgtaaaaattcttcttttcttctcatttatttctttcttaatcttatttattttatagtcggtctccaaaaatttcaatattttttttaaatatataatattaatatatacacatattctcatacaaaaataattattaaaattt

SEQ ID NO: 236887 - DNA, 1039 bp, Cannabis indica
attagctagtgatattttctaaaagttattatattaaactatataaaattcaatacttaattgaaccaatagcaatatttatatataagaaagtggtaaacagtatacgaatactcattaacatttctctctcatatatatatattggttatcatgtggctcttgattaataacttaactaatagtttcttcttattacaccatcaatttttaacgaaagatgtaaaacatgtattatatatatatatatatatttttttttaaatatagctcatttaataaaaaatgtactctaatagtgtaccaaaaagtgatgtaaacatagcaaattttatgtcaaatttggcacaacatttactttgatgtaaaatttacaccacaataaatgcactacttttttaattacatttatattatttgtattattttattagtataattaactatagcattaaattatgaagcatttatattattattttattatcttacatattaaaataataataaaattgataataaagttattagttttatttttttttaataaaaacattaattagatattaaattttacatcaaaattttacaattgtgcattggagcacaatgctaaaatttgatgtaaatctaccacaaaactactttttgtgccaaatgaaacacaatttttacatctcccatgggagatgttctaacatataacagtaaaattttataggatttttttcatgtatatattaaaatggcaaaaatattacacaaatacattaggcaggccctataaacatttatacagctcagcaaattttttttacagaaatacctcttgctctaaccattcagccgcacgaaccaccttctttaacagcgacatcttccactaataaattagcaggccaactgaaaaaaactaagcgagacggagaatcaccacaaattctagcgacttcacatgagaaaaatactgtaagaaatccaagcacctacaatttagatttatacaaaatcgggcagaaaagctggttcgaaactaaat

SEQ ID NO: 236888 - DNA, 972 bp, Cannabis indica
atggtagatccgaatagtcgactacagagacttaatcctatccagaagcgcctttagcgagtgtacttggtccatgagtccggaagctcatacatgttcctggaggccatagtacttaagctgatgtagagacttcgctcaaagaggagttggttaagttagttatttctaactaattgaacaatctcatttcttgcagccaccaactttaggatcttaatcctaagcctataaataccaccttgactttgtcatttgtacaacaagtccggatatacgagttcaaaactttagagatgagattgagagattgagagagaaaaagattgagaggtagagagagatgtagagaaaagagagagattaggtttgggttttgtaagaagaatcttctgtagatgaagaagattcttgggtgtaagtgtgagagttaaaatactttgtgagaactcaacagagaatctcgtcttgactatattgtacctgttcttgctcaatcaataaagaaggattacggtggtgttctagaactagagtagagccatagattacatcgatctattggacttgaaccagtatatatcttggtgttgattctttaatttctgcatttactattttctggttttcaatactctgtttgtcattgttttactgtcgattgttgttcttggtttgataatcttgtcattactaattgcttgattgttttaaatttcattgatttgatttttcacatttagacttaattttctcataaatcagagcttggtaatcaatcaagatcgcataatcaagattctttccgctgtaaatcttgaagaaacttgaatgtcattaatggcaagattcaaattggagaagtttgatagaacttggggctgcaatatggagagaaagtctaaaaggaatcttagtacacccaaaagtctccaaggttcttggagatgagaagttattggcagaaaaaaa

SEQ ID NO: 236889 - DNA, 1566 bp, Cannabis indica
ttcctgttaaattttgtcgagaaattgagagtatgatgtcaaattattggtggggcactactacggataagaagaagattcattggaaacaatggaaatttttgtgccaatctaaaatggaaggtagtttaggatttcgtaactttatccatttcaattaagctcttctagcaaagcaagcttggaggttattccaaaatcataactctcttctattccgtgtactaaaaggtagatattttcccaagaatgattttctctctgctgcaacttgtggtgcctcttctctcacctggcaagggatctgctggggcagagaattactgaaaaaaggacttagaaagaaagttggtaatggtcttagtatcagctgtgcaactaacccttggattcctggaaatttgatattcactcccatattttatactggtaatccgaatagtgttgttgcagactatattacaccagaacgagagtggaatttcagtaaattgtctgctgatttctcatctgttgatgtgggaaggatactttctttgcctttgtccaataatgctgcctctgactattggatttggcatggtacggggggtgagtatgaagttaaatctggttatttttttgcttgttcctcatctgctgatacacatgaatctgtctcgaacccaaacactgcatggtggaagtctttttggcagctcaaactacctcctaaggtgaaatttttttcttaggaaagcaatacataatgcattgccggttgcagctgaactttttaagaaaaaatctctcacttcagcttcgtgtagtttgtgccttaacgcttgggaatcggtgggacatgcattgttttcatgtaaacatgctagacatgtttggaaaattgctggttttacatttaataacaaggttgttgtttccatgaaaatagaagactttttgttttagatttcagagtgttataccaaatctgagttggaaacgatcatttgcacaatgtggtctatttggtctgatcgaaacaatgtcattcatggtaaatctcctcaacagccgactgttatttctgcaaaggctcaaaattttcttaacaattataagtctacacaacagttatctcttcctgctggtttgtcaccggctgctacaccttccacttgtaaagcttggtcgcctcctcctcccacctgcctgaagttgaatgttgatgccgcctttgatgaagctcgtaacaaaattggttttggtgctataatcagggattcaaatggcaaagtcaaggctgcaatgtctcacccaattaatggttgctgtcaaccacaagagatggaagctaagggacttttttatagtcttaaatgggcaagacaactcaattttaatgtggatatggtagaaacggattccctaatccttgccaatgctctccgcaaatcaactatcgaatcgttcatcttttcaagatttaatatttgatgttcaaactcaattatcctatctccctacagtttgtgttaatcatgtttatcgtgatggtaaccaagccgctcacggtttggctaaaca

SEQ ID NO: 236890 - DNA, 1393 bp, Cannabis indica
agatcctggtaaaataaattccaatattatcaactttgcgtatattgtgatttagcgtgcatgtttatgaatgtctgttagataacatattatagtagcgatattaatgtacatagagatgcattgaatatcatcaatatatatttggctaagtactgattaatgctatgacatcggtacgactagagtaccgagtataggctgatattatggtcaatagtactgtcgtatgaacgttctaaactcagtacgcacggaatgtaggataggttattattgggtgtatgggcgcctagttgtaatccaatttaagtttatgttatgattatgcttttcttactgagtctgtcaactcaaagttattgtttacatgtgtaagtaaaggcacagctaaggctgagcaacagtgagtgtgagcagatgaagattatacatgttggggcagttagacctagagcgtacgatcttcaggatagtacactatattttgaatagtcgctaggcgacaacttatgtaactaatatttgtaatatggttgtaaatatttttaatatgggatctcgatttatgcaaaggttatttattttcatttaaaggtaaattaagtaaagttttaattaatcacgttttctaacaaacccgttgattagcaacggattgcacagctagtataaaatcacgataacatgcctaaactactagggtgttgcgatttcggcagttagaaactgggtcccgttttaggtagtagagacctccttccttatagcctttcactatggtcatggaacccttgcttagtttcatagtacatgtttcaattttactcacaacaccaaggtcatctggaacacttatagagattatatttctaggtaaattaggtagaagtcttacccctgtcaaaggccttaccacaccattaaacattttgaagttcacagtacctgaaccttcaatgtgacatatttcaatgttgcctagaataacctttttacctttagattccatgaaatgagtaagtaaagatttaccattagtcatatatatggaaagtacaatccgaatcaagaatccattcatttttaaaatttggggcaaccatataaaatctcccactttcatagccatcactcaaattggcttctgtttgttgaattaattctctccctaatttgtatcattgtctagatcatcagatttgttctaattattccttttctagtaatagcaagctctcttgaaacatcctagctttacacagtgaaagtaggcattaggatccttaggcctcctagattgagacctgcctctgccttgttttccacctctgttattagggcctctattgtgacttctccctctattgttccatggcttcttttgatgagg

SEQ ID NO: 236891 - DNA, 1079 bp, Cannabis indica
tggtaaatatataattttaaaacagctgtgagttgaaaaagttgtatataagtgttagtaaactaaatgattaaataactgttaaatatataattactaaaataggtatgacatttgttatctaatttatttaaataattttatacatattattatatttataaatattatttattatattataaataacgataattttctcttataatatttaattttttttaaatatttttataataaaataataaattaaacttttatgttgagtagtttttgatcgaagggtttttttttttttttaaataaggatgagattcaatgaatgtaagaagccctaaaattaactggtaaatggggaattttaaaattagatgagggcaattgtgtcaagtgaaaaattcattaaaccaaaattgtagcttcccttaaaagctaatatcccaaagctagggtgggccaacttttcctaaaagctataaatttcacttaaatttttgaaaaagctattttttaaattttaccaaacacatattaagtcataactttttctaaaagtgattttagctttttaaaaagctcccccaaacgggccctacgtacataaccgtactagtgtgggtaacaccgtattgtactcgttgaacatcatacattataccaatacactcagtaccgctacctactagtgttggtagcatacgaatcacaattagcatgcatatattacacatacacatattcattatataaatacattttatgctagtcttatctcatttccgaattcaagcgtgtcagttgacctgaatagaaatcacgtgctaaatgaatgccctatgtatcacatttacgcaaatgagtaaacaacttgctaaaaccctttctggcgacccacattcaaaactaaaagtttctttatcgataaatagcatggcaataccctaaatatcgaggaacatcaaaactaagattctgaaaatcgcccaaacaggtaaaccaatttcccaaacggataaccaatttctagggtcctgcccagtgaaacaattaactggttcaccactacacccattgcacca

SEQ ID NO: 236892 - DNA, 579 bp, Cannabis indica
tttatacctaaatcacacatacacaacaacaaaaaaaaaactcaaaccaaatgtgagaaacccagatcaaaaaacacttcacattcatccaaccccaaatctaaagccctctctcacaacgcctccaccgctcctcttgccgaaaaacttggggcaaatctgaaaaatgctctccctctccacctggatctggaaaataaaacaaaaataggcaagaaaaaaaagctacgaactttacaatattacacaaaagaatcggattgaggctaaacgcaagagaaagaaaatgaaagaaggatgagagagagaaaggaatcggccggttggggtggctctgcgaaaggagcaagggtcggcagcggggtacctggtctggagaagagcggtcggggttggggtccagtaagagagagagggtgaaaggtggggtacctgatcttcggttgaggagcagtcgcggttggggtccggtaagagagagagggtgaaaggcagggtacctggtcttcagttgaggagcggtcgaggttggggttcggtaagagagagagggtgaaggaaatgtgtgttaggtttaga

SEQ ID NO: 236893 - DNA, 887 bp, Cannabis indica
gcatccataaagctatgaagttcatgacctgcggtggcattaacaagttggtatccttgggacaggctttactaaaataaaatcgatgcatgtgcgccatgaggcatttggctctggtacgagaacaggattggctaaccaatttgggtaaaatgactcccttatgaagctgcatgccaataagcggtctacttcttccttaagtgcttggtaccttgcggggtccattttgcagtgcttctgtcgcactcctcgcacattggggtcaatgttcaagcggtgacacataacctcgggcggtattttaaccatgtctgaatgtttccaagcaaaaacatcaaggtttcgtttgagaaacattacaagtttctctcggtgctgaaaagtcagtttagaaccaatttttaatactttagaattatcaaaagactcaatggtacctcaattatttcctctacgacttgcacaatgttcgtataatcgaggactctcgggtccagatcgggcttctccacgtgtggtatctctttgattctaaaagactcatgtcgtgggggaggagccttgagagcagataaatcttattcactgatttttttttttttttgcaatttttaacgcagtattataacattcccttgaatctacttgtaatcctcgcactgatcccacacccgcaggggtagagaatttcatggtgaggtggtagatcgaagcaactatttttatctctttaaaaaatagggtgacctattactgctttataagaagagtgttggtccattactgcaaagtcaatcattaacttagcaataacaggtgttgttcccaaagttattagtaacctgatcattcctttcaattcaattgtatctccagtgaaacca

SEQ ID NO: 236894 - DNA, 705 bp, Cannabis indica
ctatgagtgttgctgttactttttcagtctgacaaggcttgaatttatatgcctatagcgacgcgcaaaaagtgaatgtaaaagagttcagtgacatgtatggagtgtcactaaaaacagtctttccagcaaccttcattagtgacgcgcgttgaagtgtcactaaaaagttttagagttacttaatgtgtgtcactaaaacctgtttttctagtagtgttcacatctttctccatagagataatgccgccaaatctttaaagcaaacactactgcggcaagttctaggtcatgagtcaggtatcgctattcataatctttcaactaacgggaggcataggcaataacccgattgacttgcatcagaacataccccagtccctgtctggatgcatcacaataaactacaaacttatctttgttagaaggcaaagctaacactggagctgtaattaacctttgcttcagctcctgaaaacctgattcacacttatctatccatacaaaacgctgattcttatttgtgagctcggttaagggtgttgaaattttagagaacccttctacgagccgacgataatatccaaccagacccaagaagcttctaactattgtccctattttcggtcttggccaattcatgacggattctatctttcccggatctactttcatcccatctttgctaacaatgtgtccaagaaa

SEQ ID NO: 236895 - DNA, 1129 bp, Cannabis indica
gtagcgtgccttagcattagggcgttacaaaaactatggctgggacatacttgtcgtctttcttgggttctgctctgttcccagtctgtccccacagtgggcaattgcgtttgatatgtccttcctttccacatttgtagcatgcttttgcgcgacactcgccgagatgacgttggtacatttagggcattctggaatgtttcgcccactgctgccattaaatcgttggtcgttatcagttttgtacctcttgtcttgacttggctgcccggactggtcctgtccccgtttcttgtggtcattagaattggctccacctttcttagattctctcctggcagcattttccttccaaattttgttttcactccgctccgccgtaagagccatttcgacaacttgagcataactgaattgaccccttgacacaatttccacatctcgagcaaccattggtttcaggccttccacaaatcgatgtgctcgcactctatcagtaggtaccagatctggagcgaacttcaccaatctatcaaatttttgtgcatactcagtcacagtaaggctcccttggactaatccagtaaattcatcgaccttcgctgctagaactgctgagttataatatttctcattaaagatctttttgaaaccatcccagttcatggtatctacatcctttgtttgttccaccacctcccaccagatacgagcatctttcctcagcatgtatgatgcacacttcactcggtcattcccatcgacccttagcatctgcaaaatgctttctatgcgacttatccactcttcagccaccactgggtctatgcctccctcaaactcaggtgggtgttgttttcgaaatctctctgctaacatctcatgtctagcctctgtagcaggatataccaccgcagctggtgggtctctattttctgcatcctgccttatttggactggcggctccggttgacgtctcaactgacgaagttcttcatcctgcctatgaatgattccttccagtgcggcaaggcgctcttcccatccctgtggtgcttgaggtggttcagtgatccctccatcatcttggcctgtatcttggcctcgacctcggcctcgacctcgaccc

SEQ ID NO: 236896 - DNA, 955 bp, Cannabis indica
gtcacaaatgatggcataaaatttgtgtttgacattgttgtcctcatctctaaggacgttcttagttggcgttccttcttaataagctttggcggaaccatttgtcccttcatgtacaaggaacaaatctccaatttcaaatcatacgccaaaggatcaacctccaactcttcatataaaatcggatgtatgtgttgtatggttgtgtcagttcaaactgtcaacgtcatactgccttcggctttataaacccaattaaaatcctcaacatacaaacaccatggtacgatataacaagaaacacagtcgatcctccaatttcaaacaaaaataggtaagctaggggaaaatgccaaaaaattataaaaaaactaaaaacgacaaaaaaaatcatataatcgacaaactattgacattccatcgacatatcatcgataagaaatgtcaggatttcgagcgatggtcctatcaacagaaggtcgacatatcattgatatcaaattgacaatgtgttctatcgataaatgcacattgcatgtcatacacaagtacaactggacatatactgctaatttttcccacctttccaacttctgttttatctgtcgaggtaatcgacaagctgtcgatatatcatcgatataatatcgataaagtgtggcctcaattttctcctattatcgacaaactatcgataatatatcgacattatatcgataaatacacattgcatgccatacatgtgtacaattacacatttaatgctaattaatttttcttgcattcctaacaactattctgctctatatataaaagtaaatttcatcttcataagttacatattttcttattctttaaccatagagtgttcttgtcttataagttctatatgtctaataaagagaacaaacacaaacttctatatgccgaaaagatcaaacaggaacctagtgac

SEQ ID NO: 236897 - DNA, 591 bp, Cannabis indica
ctcctcctaccacaacattaactagagtggttctcctgccagtaataggaatattgatagtgccaatgttgatggtttcattgttgttgtttgtatttgtctgttttgtagccattttgattctcctcaaaaaatctcacaaagtgttatgaaagcgtttctcataaacggtgccaaatattatcggaggaatttagacaataccaaaaaagatgagtattcaagtcaaacaagaatactcaccagcacctatgcaagtactcacttagaattgtgagtactcaatctttaggctatgaaataggcaaacactcaaatagaaataaaggagacaaaagaattatagtggttcagtcagaacttagtctgcgtagtccacttttggtaatattttttagcttagtttattggattcagatcagccctttatatagaaagcatgtgcccgttgagattacacaaccggccagttaggaccgttattacaataattacaaaatttaatgaataaaaaacatttaaagaataaatgtaagaatggtttcggccattcttgttttaattacagcaacgtgtgtgactgactaagtc

SEQ ID NO: 236898 - DNA, 690 bp, Cannabis indica
ctgacgtatctttctaacattctctcagtctcagctaaaggagaggtcttgggtggtggtcgacttttttagtgttggttattaggttgtgttgttttgaggatttgcttcggttgtttcagggattgtttgtgttttgttatagtatttacaattgcaattgatgttttgcattgaactagacgagtattttggtcactcttaattttttgaaagaatgtgttgatgctattttgattgttaggttgtctgcatcttgctcaaagaaacttggtttctcctcattgttgtgagatttttagcaaagtttttatctagactttagcaagagaaccagttgagaatttttggttgaactttgggcctatgttcattttctcggtagattgtatttgtacttatcatttctattataaatggacaatacatttttctaaaaaatgtttaaatttaaattaatatacttgaaatagaattaatgtttgatgttcttttctattaatgtttggaaacctagtatacttctaatgtttgattgttggtggcttattgaagccttagagtgcatttgtgttctttaagattcggatttctaaatctgaatggacatctgaataataagatattatttttctaaatctcaatattaaaatatgtagattgctattttttttcacatctgatatgttc

SEQ ID NO: 236899 - DNA, 1002 bp, Cannabis indica
taatcgaaagcagcagttatgagaagtattttgatggatttgagcattgtgactggagtaaaagtatcctcatagtctacaccttatctttgtataaaaccctttacgacaagtctagccttaaaagttttgacttctccaccagcgcttcttttcttcttatagacccatttacatttgattagatgataatgaataggtgcatctacatattcccagactttatttcttttcatggaatccatttttgaatccatgctggctgacaattatttccgttctagactagccattgcctatttataggttaatggatcgttattattacaatagtacccatgcttcaaaagggcatgtgtcctatgccacccttgatgacccgcccacaatgtgtcatgacattcacttagcagtgtcctccttagatcgcctaccttcagaacaaacaaacgcccacctttggtccacaagaggtcatcctctaccaataactgagttgtctttccttttcttgcgagagctgtgatgttctttgcaactgggtccttctccaggttctccttgatgcgctccttgatcggtgtacccacttagctagttgacatacccgctaacacttttagagctgctaactctgctttacgactaagggcgtcagctgcctgattgacacatcctaccttgtgctcaaagtagaagtcgaattctaccaggaattcctgtcatcgggcctgcttgggattcagttttggttgcgtgaggaaatgactaacagcagtgttgtccatcttcaccacaaacttcgaccccaacaactaatgcctccacgtcagtaaataatgaataactgctaggagctctttctcctgcgctgtgtaccgcctttctgcttcagaaagcttgcggctctcaaatgccacggggtggccctctgcatgagtacccctcccaaagaataatctgacgcatctatctgtaattcaaagggtttgcatacatctg

SEQ ID NO: 236900 - DNA, 799 bp, Cannabis indica
tgccccccaagtccctgtgcgaacctctatacagatagggactttaccctatgttggtggtcgggactgttgtagcctttgttgactaagtttgcatttttagccttttgaaacactttgcctttgactgtgtgatcttatttgcagtagaaaaatgactactttagttgtcttcactaatgtaggtgaagtaagtgaagaaagggtccgaatgtactatataagtacttttcaggggaaaggcctttttcaattttcatttttcacatttgactttcactaaaaattcacattagaagaagctcctccttctctctagagggccaaacccaccaagcatcattttcctgggattttgatgtcgttttgacaatacaaggcataattaggttagactcagtaattagaaccgagataaacctttctaaggacttattgtaaatagacgtgtgaaggtagcacgtgggtctatgccgcatagacataaatatgcgtatgagcgtaacacgtaggtctatgtgaaataaaaaataagtacaatggcatcaataattatgtgatatttgtttattgtagttatacccgaagttcggtaagcacatcaaaggaggacacatgtcgagctgggaagaactcaaacacgcaaacgacaagtatgcttagcatggaacaactcgttggaaatataattcgcagggtatgtttataacttggctggctgaatagccctctacgagacagaaacgtacgaactgttgggttttatgccctaaataaaactctttacaatctgattagt

SEQ ID NO: 236901 - DNA, 773 bp, Cannabis indica
tagcattatttaatacagtatatattcagtattgacttgtattaatagattgtgtaaagttataatatattattggaactgtccatatctagttcatccttcaaaaccacatatcacataaatttgaccccaacaccgactacgggttgggtccaggtccgggtcaaaaattggggttgacccccgatcctttgtaaatattataatataagctaatacgaatcatttgttatgtattaaataatacaacttacattgcattaaaaattttggtcgtaataattagggataattgcaataaaagtccccaaaaacttaaggttgatgcagattagtcttcaacataggggacaagatctgattcggtgttagaggatggataaccgtcgctttggattctggataggatactctcgaatgagtgccgagatcaatgaaccaaagccttcccaggtcatactgatccactacctttttagaatacttgaatctctgggtaaccctaatcctccctaattgtggatggatagcaagagttctagagccctatccttactcactaacattgggaacctttgattggcttctaaaatattatactccttagtgttattaagtagaaagtatatactgatcacagatggtccaaagtggcactcttccgtgattgacacgtatcaggcattcgagattatggacaacaagagaaaatagaaattaaaaaggtcaggattaaatcaggggcgtacacgtgtcccgttacttatcctaac

SEQ ID NO: 236902 - DNA, 991 bp, Cannabis indica
tctcaccagatattcccaattcggaatcaagatgagtggcctcgaagtggcaagattagaatgataaatccaattcacaagaagcagccatgaaggccaaagaaaagcagaaaacttaaacttcaggaacttgtttcgggcaagaaattgaagaaaaaaattgtgataattaagtgttcgggttgtggcggcaaggggcacaatttaaggacatgtggcagcaacaagaaaacttctgtgagtaattctatactactgctactattatttggttataatatttatcttttctttcaaattagctactatctactattattggtccacttgaaacttataaattgatcactgctactgctactactactatctactgctactagtacttaaacaaaaacacatgtcttaagctaattcaataaatcattttaacttcaacaagctctagtacttaattgatcactgtacaattcctcactttctcagcttggttttcagtattctcaatagcattagcaactttcatcatatcaatttctcttctgtgtagcccctccttatgcattaaaccaaaaattagttttgacattcagtgcagttaatccaatccaaatttgagtgtggtttaatcttatgaatgtgaaatattgaagggacatgatcaatcttatgagactatacatagagtaaatgcaactaacaatcaagaataaatcctttgtacacacacatacaccagtacaactctacacataaattacagtaaaaatcaagaaattgcagtgccttgtgtgatgaactccactagctagtaaaacctaataacatagtattaatacaacactaagaacataaaattcttaggtatatcgtaactcaacattacattgggaaataaagaacagagagaattgggcttcatagaaagtgagtttgatggattgcatacaacataccagtctcgaccaaaagccataccaattctacaaga

SEQ ID NO: 236903 - DNA, 894 bp, Cannabis indica
atattcttttatttttaagtatattctgttaaatcaagaatgttaaaccaagaaatgtcgttagataggcacttttaatatataaagatatatatatgtacgcaatgccaacccttcaatcacacgccaagcccttaaaaaagaaaataaagatcagccaatttttttcatttgtcttttttttttttatttgtattttgttcgttaaatgcttatcacactaaaaatatatcagcccattaataaataaaatggacattaacaaaaaatatttagacttcaattgaattttaataaattaatcaactacatcaaccatataattcaaattgttctctattttaacacttaataagtccaaattttacatttaatctcttatcaaacatacacaatattgagaataatatttttaaaataaaaactaaataaaattaataaaatattacaaaattaactaaaactaatctataaatgctagaactaatatttattcaaaattaagtaaagctaaataaaagtcactaaaataaattaaaaatatttgagaacaaaactaatttaatgcacaaaaaaaagctaaataactctatttttatagagttatcaactgaagtgtcaaatttgtaaataaaaataaacttaaaaaataataccacaaaaaaaaaaagagattaaatgtataaaaattaaaaggtagaaaatttttacaataaattgctcttaattttatgagctcttatgtttgttaaaatttttcaagcttcgtgtcttttaaaaaaaaaatttcgttttcttaacaaaaaaaattaacaatacttttaattttactaggtgattattacgtgccaagccacgtagtgttggttttatttaatattttagttttttatt

SEQ ID NO: 236904 - DNA, 753 bp, Cannabis indica
tttagtccggtagtgaaaccagttactgttcgattgattctcactttagcagtcacatatcaatgggaggtacgacaacttgatgtttctaatgcttttttatatggagaacttagtgagacagtctatatgactcagccaaaaggttttgaagatcccatttatcctaatcatgtgtgtaaattgcataaagcaatttatggattgaagcaggcaccacgggcatggaatgataaactcaaaaccactttgtttaattggggttttaaggcatcaagggctgacacatctttgtttctttatggctcgggcacaactcagattatactacttgtctatgttgatgatattctcatcacagggcctaatgctactcttattcagcaacttattactcatctaaatgcaatcttttctcttaaggacatgggggctgtccattacttcctaggggtggaaattcttcgtgattcaactggaatgtatctatctcaaagcaaatacatcactgatttgcttgttaaggttcatttagatggtgcaaaggtttgctcgagtcctactagtagtgcacacaagttggctttaaccgagggccttccttttgaggacaaaactctataccgtagtactcttggtgcattacagtatttgacactcacaaggcccgatgttgcttttattataaacaagctatcccaattcattcatgctcctacggtagttcatggggaagcttgtaaaaggctgctg

SEQ ID NO: 236905 - DNA, 1142 bp, Cannabis indica
gttccagaagagtttggcaagttgaaaatgttgaaagtcttctcaatagggcctaataaactatctggtatgattcctccctcactttacaacatatcatctttgataagtttatcaatgccagataaccaatttgaaggcactcttccaccctacatgggccttcaacttcccaacctccaagaagtttatattggtggtaatgagttctccgggacaatcccaaaatctttttcaaatgcttctaagcttgagatgcttgatgtttctgaaaatcactttgtgggagaagttccagctactttgggcatcaatcttccacgacttaggcacctcaatttagagaaaaatcatcttggaaagtacttacccaatagcttagagttttttggatctttaaaaaattgtagccaaatggaagtgttgtccttgtctggaaacaactttgcaggctctttaccaaaatctttagctaatttgtctactcaaatcactagtctttatcttggaagtaatcaaatacatggaataattcacccaacattaaaaaatctggtcaacttaatcattttaacaatggaggatagtcttttggaaggtgtcattccaacttctatagggtcgttaaggttcttgcaaattttggctttagaagggaacactttatcagggaagatcccttcatccttaggaaacctcactcaaatctccgaacttagtttatcagaaaacaacttagatggaagcattactccaagcattgtagattgccaaaatctaaagttccttgaactttcacaaaatagtcttagtggatatatacccaaagaagtttttgattttccttcacttcttttactcaacttatcacaaaactcaatcaatggtagcataccagtggaagtggggaagcttaagactatcgttgaactcgacatctctgaaaacaaattgtccagtgaaattccagacacaattggagattgtagcagtctagaatcagtttcctgacaagggaacttctttcaaggaattcttccttcttctttggcatctctcaaaggtcttgtttacttggatctttcgcgaaacaacttgaccggaaaaattcctaaggatttacagaaacttaaagtcttgca

SEQ ID NO: 236906 - DNA, 1147 bp, Cannabis indica
tttattttattttattttgtttggttttattagttgatgatttgtttatttcatccatgttccaacttcacaattcttttatttatctcaatatatgtttttcatgtttttcttttaaatattacaatttacaccattttttcccagttaaagcatttttacttgtctagattttacttttacaggaccaggagatagttttttatgctttaataactctctctatatgtaaagaaaactctgttgtactgccatttagacacactgacttttctaaggaagtgattttggttgttatacaaaactcagagcaatttttcaactttaattaaaactgcttttaaaagtcaaaaggtttagaaatgttaaacaagtttcttttataataatacatcattatcatcaaatgattcccattaaattggattcatcaatcatccttcgtataaattacattgaataatttaaagtttgatcatgttacttaatataaaatctagatttcctttgagatggctcctcggttgagattggctgtttcacaagcttaccaaccttgtacaataaatggagaactaatagagttcttaaaagagaaatagaaacgatgaattttgagaattgtgtttccgaagaatggctcaccaaagattcttgacccttatcaagaaacttgagttggaataaagtgtcgaggaaaggtactaagtattacagtgaagagttcagtaagttttgtgatcagaagatgagtcatatcataacaacactgaattgaactaggccttggtctgaacagcttcttcaagcgtttttttgtggcttggaaatgcatttggttccttcatttgctcgcctttttcgtttaatcctccgttgggaaatgatttgatttcgaaattctctggttttttcctaataaggttacattgattactgaagtttgtagctttattttaaagttgtttataaatgttcaaaatgttcatcacttgaatttcttattagaaaataagtaaacttcatttcttcatgtatgtatgtatagaccatttcttacttttagattttctttactttttgatctttgattgatttattgaagtatttaagctcttcatatgtgtttgttctctttatttaggct

SEQ ID NO: 236907 - DNA, 892 bp, Cannabis indica
atttggtagatatcaaagtctggggagcatagtttagtacataaacaatcactgaaatagtaaaattgaatgaaattagacaaaagtctttaaatttaacaatctcagtagtttgggaggaatttttaacatccaacaagttcatggggcacgatttactacatgtcaaagtttaggaaaaaaaattactaattagcctttattgtttttaggaattttatatgttattatctgtcttaatttttaggtgtatgtatatttagttttgttgtattttatttcactataaataaaaattatattacttagtccaaaaaatttccttcctaatttttcatcaacaaagtttattggtcgttttattaaaaaaattatattataactatttgaataataaaaataaaataaatacatgaatacacctattttttaaattttttgaaatttccaataactatcccggctaaaaaaaataaaaaataaaacagtttgtaatatataaaaaaatcaacttgtgtggttcgctcttatcctcattggcactcgcgtccattttcgcctgtctatttctctttataatttccccacactactgatccccattaatcgagccatattcataaattaattcctcccatatctttgtaaattgtagtatgtcttttattaatgggcctttttgtaaaataaaatagcacaaaaatttgtttacttttcttttaagtggctttttttttctgaataaataaaagctcagaatttttagtggctttatatttttggttaagcatttacatgtaatgtagctgcaaatttaaagaagctaactattgtaggattgatgattatatttatattgaatatatagcgatatgtgcactcaaatacacaa

SEQ ID NO: 236908 - DNA, 1306 bp, Cannabis indica
attgctggagtttggtggatctaactgtctgaagttatgaacttcacttctcaaattgttgttttgggtgtttccacctgcttccagtcctcgtcggttgaaaattgatctttgggtgactcgctccccttggggagggagtgcttttctctaactggccatgggggttgctagaggagtttggctggccatggggaatcctgttggtggttggctggtccctggatggatagaggggggctattgttgagcctgagatccctggccgacccccatgctgctggttaccaagatttggaagtttttgccatttgacctttgaggaaaggtctgtcctccctttggtaagggaagatctgtcctagttcctgaggaactgggttagtcagcatatcgatagaccctccctgatctattaagtcttccttgaagtggatctcagatgagatccttgcctcttttatcagttctctggttgaacaaccttattagattgttggcctctttgttgcggtgatctaactctacttggtgagatcgaaggatgcactcttggtcatccatccatctcaaaaaatttgcgtctttactaagcgagtataccgcagtcagcagcacgtggttcttcaagagattcgcatctctactgagcgaatatattgcagtcagcagtgtgtggttcttcaaggaattggcgtatttgctgagtgaatatatctcggtcagcaccacgtggttcttcaattaggcttacacgacctacagtttccctgagtctggcaaactcaagctcttctcccaagccttggtgaggctcactaattcctggtctcgtatctcctgcatagtaccgggggtgaaacccagttgttattcttgggggtgctccttaaggattcttccttcagtcgaaggcgcaatggtgggcctactcttggaggtatgggcctgtcacttagatccaccgggatgcctgtatcaatctggctaatatagagtcctgccaggtaatcctagccgcccatagacctataggggaggtctggccagccaaggtgtgcaggacctggctagacaaggtgttcagggtttggccagacaaggtgtggagggttggctagaaaaggtgtgtaggacatggtcggacaaggtgtgcagggtcttgcaggacaaggcctgtagaacctagtaggtcaagggctgtaggactgtctagaggaggccagactcgtggcactggttgtggtgagaggatgcaccacatctgcagtgttcattaggattctaattgtgactggaacctgaa

SEQ ID NO: 236909 - DNA, 856 bp, Cannabis indica
ctctctcataagactgccaaaaaaggaggaggagctcagtaaaatttgacaacgattaaaaaattcaataataaatatatataaaaaaatcaatagcaatttaaataaaaataaataatctaaatataaaatttcccataattaattaataaaagctcaaaggaaaatcaaactaatagctaaataattaataaaaattattttttaatacctaaataattaatattatcgaaactaaatattttttattgtctaacaacaaataatataaataatttttttattatataacaacaaataatctaaactaaattttttttctaaatatctaaatctaaaactaaataattaaactacaccaaatatttttattaatacctaaatctaaaataaattaaataattaatctaaattaaaatttaaaatatgtattaaataaacaagtatatatgtatatatataacagtatatataaaatatttataaattaattttaataaataatttaatatatacctaaaggaggtggtgggtgttagtggccacgaggaagacgaggatcgtggttgggaatggttggtgattaagtgaacggattgagagaagaaagaaagaaagtatcgctggtggtggagcttgtatgggggtttcttggtggttattcttcgttgatggtggatgtcgctccaaatgggatttcttggttgttgtccttctgtggtggatatggatttcgttttcgaagcttcaaaggggagattaagggagagacgagagagggagatcattggtgggtttcttggggtatcggcgctgttggtgtgtgtgtgtgtgagagagagtgagagaatgagag

SEQ ID NO: 236910 - DNA, 967 bp, Cannabis indica
taatcatgaatttttactaagcatgttaagtttcgaaaaaatctatagtacaccccgtaaaagcctgttttgataactccctaaaaacaattgcttaacatgtgtataagaaaaaaaaatggtttcacaaaatcattgatggaactaaatgaaaaaaaaatcataaactaaaagaaattgtcaaacccaaaaagggctgcaagactgtgttatgttatgttgtaaagtatgaaaatgaaaatgaagtttactaagcatataaagattcgaaataataaaaaatctatagtacacttcctaaaaatagttagaaaaaatggactaaaaaagttttcctggatacccaaaaatataagaggtgtaccgaaaatactatagaattaccataaagttttcccaatcattgatggaactaaatgaaaaaattcataaactaaaagacaatgtcaaccaaaaaagggttgcaagactatgttatgttctaaagtattaaaatgaaaatgaagaagcaacttacttcctcatccatataatcatgaatttttacttatagcaaataaaagttttaaaaaaaaaatctatagtacaccctgccatttcggtacactccctacaaatagttgcttaacaaagttttcctggatgccaaaacagatagggatataccgaaacaaccatttttaggggatgtactatagaattacactaaagttttcccaaaatcattgatggaactaaatgaaaaaattcataaactaaaacacaatgtcaacccaaaataagttgcaagactatgttatgttaagttttgttatgttctaaaatatcaaaaagaaaatgaagatacaacttacttcaagttgagatcggattcctaccaatgaattacactccatacactcaaaaactatttcttgaaagaaacccagcaaagggcaatacaccagatctctgataacataagttc

SEQ ID NO: 236911 - DNA, 993 bp, Cannabis indica
taaaaaagagaacattttcaatttttgaattagggggtcattttaaccaaatttaacgtgaaaccaatattcatattcaagtgttagtatgaattcactataattagtgagaaaaaatattccaagataggttcgggccacatttcacaaaggggtaccattatcagaaatgtgagattttcaatttttgaattagggggccattttaaccaaatttaatgcgaaactaatattcatattcacatcttagtagtaggaattcattgtgactagtgagaaaaaatattccgagatgggtttcgagaaacattttacaaaggggtacaactatcagaaatgtgagattttgtttatttagattaaaatgattattagtgcttgaaaactatgtttcctcttaaagtgtccaatagaaaagtgatggacaacggtttgaccttctccttgtgaatttttactatttttgagatgtgtagggtgagaatttaagaaaacactaacgagtgtaagagtaagaaaaaaaaaacttgttaaaatttacctaataagaagaacatattcaaattttgaattagggggcattataaccaaatttatcacaattttttttttttcatattcctatcttagtagtacgaattcattgtgactagaggagaaaaatattccgagatgggtccagaccatatttcacaaaggggtaccactattagaaatgtgagattttaatattttgaaaaaaatgattgttggtacctgaaatattctgagatgggcccgagccacatttcacaaaggggtaccactatcagaattttgtgattttcttatggttgttagttcttgaaaactatgtttcctcttaaagtgtccaataaaaaagtgatggataacagtttggctttctccctatgaaattttactattttcgagatgtgtaaggtgtgattttaagagaacactaacgagtgtaagagtaagaaaaaaacttgt

SEQ ID NO: 236912 - DNA, 1291 bp, Cannabis indica
tcctaatcggcatagacctaatttgcctatcagataaccaattccccactaggtgtaacgtgtgtgctaggatggcatgttagaagcaaagtgatgcccacaagttggccaaatggtggttaagtggtggcacattttgtggtgcatgctggtggcatgctgatgcttagtttgtatgcagtggtgtttttgtaaatatcttcaatattgttcggaacgggacgggactaggtattcgccatttatttaggtctacaaatagaatggtgcaatcagtttggcgaaactaggtgatttggtatatggttcttgccatatgtctacagagcaaaaattatctatgttcctgatagaaggctaaaagtttagaatgctctttaaggggttaccctggtattagctctctaccaccccttgcaccttggtgctaagtgagctactactagtcagtgggactagtaggacatacatatgaggaccacgaggggactcatatgtctccatgagttggagtactcatcgacattattgggctgacctggtagtgcgtttaagaagctgctgaagatttactagtacgtttctcttggcttgctggtatgctgcttgcacgggacgtggcctagatcctccaagagacgttgtggtgcgcctctgccacgagtccacgagctcaacacgagatgacacaggtagtcattcgtgggctagcttgcatgcacgcatgggatggatgcaccatgatggaaggggacaggggtctagtgtatggaactagtttggtggcttgtctcgagggcctgccaacatgcgtggaggcatggcgcatgttggctagagtggggcatgatagaagcgttggcacgtcgacttggtgttggcatcttaccacacatgctaccttggtcacgagtgacaaggtgagcgtcggtgttgggatttgccttgtcatagtgggaacatatggatagtgcgagtatcttggctagaaacccgatgcgcggatgcactcttggatgcttacgagcatgacttggcaggagttgttcgagagacaaaagtgtgcacgaggcacacgatcgcgtgaaaaatgagcccattgttactcagatggttggaaggctgaccttggcttagagaagtcaaggtgcggcacgggtgtttcgctacctaaaaaggtgaggccgtgacagttggtatcagagccaagttcatctcagtaggaggtgaacctggttggcctatcctagagaggatgtaggtgtgtggaaggatgctagaaagataacta

SEQ ID NO: 236913 - DNA, 754 bp, Cannabis indica
atatttatatatattagtattttgttccgaaaggaatgaaaagcacatccacacacagctagcatacatgcttaatatggtggacctaatatggacctataatgatgacaatcattacaaacattttctatcgatcgaagctagcaagctttttatatataaatattgttattccggtatatgatcatgtatttatttatatctattctatagattttttatctatgttaaaattaaaaataaaataatttattattaaaaataaaataatttacgagaaaaactatcataaaataaaatatacgtgcctcgcactaattttttgttagtatatatatatacagtcaataattaattatatttttacattatatataaattgtttgatatattgttgatctttaccttaaatattaactgaggcaaaggttatataagagatgttttatttctctaattaataatttgttacctccgaaagatcagtgacacaaagggatatctctattcagaatcaatatacatgcacagactagaagaagaaaaaattggccaaactaacaatatgaaattgtaaaaattataagataaccacattaaatttatactatgcaacaaagtcatgtaaatttatagttgcacaatgacgataatggtagttttatggttacagatagtgtaatttttggttacttatgttaccaaattaacatagttattttgctgaaattttttttagaaagttattttttac

SEQ ID NO: 236914 - DNA, 1073 bp, Cannabis indica
gttggatcgattggatgactgaaataaattagatcggatcagaaggtaaaatctaaccatccaatatataattagatcggatctgtatatgcctaaaaatattaaatgtggtccaatgaccacgtctatatgaaatatatctaatggatagaactgatccaatctaacattcactgaatgttggattgattggataactaaattaattggatcggattggattgtaaaatttaatatctaatatataattagatcaaatcccaatagccttaaaaatatattaaatataatccaataaacactcttaatatcacaccataaaaattgctattgatatgagaaagaattgttctaaaaagcatatataaataataaaactttaatataacaaaacaaaaacactaattttccattccataaaaatgccaatcaacatcttctttatctgaacaaattaatcaaaagaggggccataatagtactgttgcatacttttcagcgctatgttttttttttgaacgattattatagagcattcctattaggcactaggtgtttagcacatttttcgacatgtcgcgttatgattgactagcgatattccctaaaaactactatattaaattatatgggacccgataagagtattgttattaagcaccagtagtgcctagcaccttttcgacatgtcgtgttgcaattggctagcaatattccctaaaagttattatactaaactatatgggacccgatacttaataggaccaatagcaatattgacatataggagggtgctagacaccacaggtaccctttagcatttctcgacgcgataattagttagaccaatagcaatattgacatgtaggagggtactaagcaccactagccagtattctttagcatttctcattagtatatatttagttgccaagctattctaatttcagtagtatctctttgaaggttgtttattattgattaataatatttttcagtcgatctttatttttgagaaatttacatggtatactaacttttgttaattttttttacaaaaatactaccaggcg

SEQ ID NO: 236915 - DNA, 879 bp, Cannabis indica
tctcgggtcaaaattactaaaatgtccctggctcaccaacgaggtcttaacgtgtcatatatcatattaattcacatacaataaattatataataatatacttccataattattcacaattaactagttagagtttgctaatcaattcttttaatcttaaggtattacaacagttgtgaaagagagtctagttttatttttagagatatatattattagttatttaagattattggatgatgattatttagtttgtattttttgtattggtttttctgcaaacaatgtgtttacttatgcgattgcaaaattattgagatagtgattatttatcaagtaaaaaaaattcatcactaatgaaaaatgtgcatttcaatcctaatatattattttatgtattttttgttgaatgaagccataattttttaagtataaaaatatattataattttttttttatagaaatatatgtacacaaaagcgtatttttattgtattatttttagtataattatagtaaagttttttttctttaataaaatatataatacaatcaattttgagttctctcaaattatattgttatcccaaattttgtactctgacgtggcatcacaagaatggtgacacgtggagcccacttggagcatctgctcgggaagatagaccgagcaggacgcctcgctggcacatccagaatgagatattcagcgatccctgcagagcgctcaacatttagcgaattcagctttcgcatcatgagtcatcagctcaatccctataactcaggcatcaccttacatggatacggcatacacatgatccccactatcagtgtattcagcctcaatcccacgatccttgcattcagcatttatc

SEQ ID NO: 236916 - DNA, 777 bp, Cannabis indica
gtatgtttcaaataaatataaaattagaggtaaatttgattaattgattaataaaagagacatttttcaacttacccccatataaaaagatatggaccgtaccgtaacgtgccaatattctaaaaggtaagtttataagcctataatttcgtaccgtgctcagactcgtaccgtactttactcaagcaggcccttttttttataaatggaaagcatctcattttcttatatatgggtggaatagggcttcactttttcattttttttacaattcattttaatcactaaattatatatgtattttttttttatagttttaattttttttttacaatttttcaataatactttatatataatcatatagaaaattaattagaataattataatttgaatattcattaataaaaacgtatattattattattattattattattatttccgtgcttcaagctttcattaggcccttacactcacaaaatgacgactcttatacatgagtacgtcactatgactactttagtgtgctttgtcttactgtcgtgcttcttaagaaaactttcaaggaggtcacccattttaaaattaccccaggtcaagcacgcttaaccgtagaattctttcgtgatgggctaccgaaaaataagatgtactttgttgatacaagtagtatcaatccatccatttaagatgcactttgttgatacaaggaggtcacctattttaaaaattaccccaggtcaagcacgtttaaccgtagagttctttcgtga

SEQ ID NO: 236917 - DNA, 1101 bp, Cannabis indica
catgaacaaagtgtgactccacatattattttataattaaataagatatattttatattattatggttctttttaatcattatgaaatataaatatatattaataaataagagttaattcattttatgcttttttttaacaaattaattcatggttatggttttctttctctttgtatttttaaaaaagtgaggcataatgtgttagagttttatgtccaaatgttaatcccgaaaattaataaggttaactctcaagattagccgaccctaaccgggagattagcagagacacactcaaagaggtaccccaaatgtgtgatcttacttgactacatatgtgtctcgacaagcatgctcgagaaaaagttactcggtcatgctccaagaacatgtcacctggccatgcaccaatagcatgtcacttggtcataccttgatcttccagatcttccaccacacacaaggactagtgtgggttagtagaataaaatgtatatgaatttcttattggaatctcaatacatgagaaaaacaattttaaattattttttgagaaaagattaaatgagattaatcctttttagattttctaaaaagttacgttaaaattttgttattagaattttgtttatacggtatttaaataaatctaataaaagttttatttaattaattatttaaattcaaatcatttattaaatcatatttaattatttgaataaataatataaccaagttcttttatagatatttatttcctataaccgattgaatgaatctctcaaccaattgagggaatctctcaactataccttgagagaatatccactagaaatatctataactactttttaaatttaaatttaaataaatatttcttttttgaactaattaattaaataactaatccaaaaacaaatctagtggggcaatactcctatcactatgttacacagtgtaggtggcgtcacccttgtctcaattaagaaaatattggtgtcttttgtccaaacaaattttatcttttccagcaatttatttaagtaataaatttgaaaaaaataaattattcatttcaaaataaataattactattttg

SEQ ID NO: 236918 - DNA, 1499 bp, Cannabis indica
gtagttcatgacccaacgtccaggttgacatcccagcgccatggttgacatatgacgtcaacctagatgcttggtaagtgtaaaaacgtccaagagatgtactttaagaggcctaagtgatatttttaatattcacttggtctatttatgtgttccagcgaagctggtcaccggttctcagagatgttactattttacggaaataagagactcgaaactcttcatttcagagtgagctagaaatgagaaatggaaagttgtgaaattgacttctcggacttcatagatctctgttattttgagaaactagatgaatggtcgaaactatatctaattcggataagcaaaacccaacacactagaccgtttgtcaaccttcacgctgggtacttactcccgagctctcgggattttttttttgatacttccaacgcttttgaacttgaggatgaggtctcctatcccattttgaaaattttggattcaatggtcgcataagatttagcatttgagcaattgaaggcagcgtcccaagttgattatcaacctttgcgttgggcccaacagcagttcaaccttggtgctgggccctatttctaggggcttgagattgtggttttatctccaagttttcttgaatcatcattgtttttgatgatagaaaaaaaatgccaaaacactttatgctgaacttgataggaaacagcccaagttaacaatatgttaacctgggcgctgggtcccaattttggccctccagaaattctgtttggtcctcaaaaatagttgagtcttaatattttctaaaaattaagaagctactcagaagtgttctaaaaatactccaattaaaatggcctaggttgacagaatatcaacctaggttcagggtcagccccaggtgtcaatttgggcgttgggccttatttttgttgcccaaaaattgttgtttcttttttgaaaggacatatttccatatttttgataaagaaaaaaagatgcagaggttagatcttagatcggatacatggaaggtgctcagaatgacagattgtcaacctagacgctaggtgctcagggccccaggtgctcaaaaatcaacttgctccgattctaattttgatgcctcaaatatgtttgtgtagacatctagttgatgttccaattcaatttttgaccctttttcactaagacaatcccaaaaattgaaaccctagctgaggatgtcaacatgggcatcgggtgaaaccctaggcggacaacttggcttctgggttgtaggttcgtgtaatttcagctcccgggcctttgattaggttgctccatgtcttcatggtacataatattgaaagatagcaggttggattcaagttattgaagttctaacttcaatttcaaagatcccaaagtcaacttaggcacaagactagggacccctcccaggtcgactgctatgactcaggtctactgctatgactcaggtctacttaactctatga

SEQ ID NO: 236919 - DNA, 1157 bp, Cannabis indica
gatacaaacggtgttttataaaacttctcaaaataattttgttcataaattatgaaacattcttaaaaccaattatgaaaccaaaggcccatcttaaaattaattgtttctatctatttgcaaatgttgagaatgttcaaagaactttaaagttaacatgtaataatattaatattgtacatattgaatcaaatagttaattgtgttaaaatttatattgatatatataattttatattaaatattgatgctgtgatttttataaaaaaaaatagttaatagtatatttttagttgtgtatgtaataacattatattattattacaccatgtaacatttaggatgtgtatatatgtgctctctttaggagattaaatccttttctttttcaacttatttctaattatgaaaatttgtgtcgattactgtttttataataataataatagtaattgatagttataataatcataatgaacttatattattgttcctataaattgtataaaaaatgtggtcgaacccgcgcgaagcgcgacttagtcccctaattttctaataaagtaatgatttaagggagtatagaatttgcatagtcatgagtttacaaacatagaaatctaacatctttagcatgattttctttttaatttactgacttcataactgttcaaaagtaaggggattaagttccctttaatcattacccttgtttattgtcttaatctaacattattttccagttgacaatcaaatttttttcctgagggattaaatttttatacatttatcctaaaactcctattcaaaacacataagatattaataagagaatttagagataataagtctcacattaagacctattaattgtacagtctcattatgaaataaaaattttacttataaaataaggaccgaccaattgtacggtctcacagtagaatatttcgtcttaatttacctcggaatttttagatttggttctcatatcatgcttacatacagggcagcatgttccccacttattcagccatgactccacacagcttgaatgaaattccgcaaggtgcattcaagtatgtgtcaataatcctaaatgaaaaatcttattattccaataatgaccattattccataacgaaacaaaacaaaaa

SEQ ID NO: 236920 - DNA, 1484 bp, Cannabis indica
caatctaaaatccagtgaactgacaaatcatgggaattaaactattgaacatataatcatgattatattctactgtgctgacgacactataatcatgaacaaatatatacataaatttatatgttctggacttaatagaatttatatattaaacataatcatgaaataaatcatgtgaaatgggaataaatcatgtgaaatgggttttatttagggcacaaaacccaacagtttcatcttcaggtactacaccctatttcccatattattgcccccattttgtattgatttttctgtattgttttacacttttgcatgaatttatattcgtacatatcgaaggtttgtgggagtttttacgaaagcccgtgaactcaaagagtgtgaaaatcataagtcgtcccactttgtgaatcttctaatgaagcatctttgtttgagggttgtttcacggacaatgaacatttcttgacccatctaatttttactataatttattaatttgtctctattattattgttgtgagtttgttgttatgatctaaaacaaaagtcagccttaactttgaaactctcttcgtagcttggtaccctagccgcttggtatctctctctccctgtctactttctatatacattgtgatctcttagtgagagactcggtgagttaactgaccgagttaataaaaaatggctccgattccgaacgactcatcttcttcgtcaataatagaaacctcaaaacaaaccttcgttcctaactctggcacattactactatcttcccatttctcaaagtttctcctcctccatcatcatcatcttcaagaaagcccaatttcattcaatctgaaatttttgccattgctcaaaatcttcgcacctcaatcctcttcgctgctaaaaatcttcatttgttcgcttctaaaaaaattgctctctcttaataaaattttgctatttactgaattgcttttgagttttaacaattgcttttttttttctcttttttttgtttatgagatttagtaataataagaaacattcttagttttaatgcctttagttttagtatatataattatagtgttctctgtaaatagtagtaaagttgatttttcctttccccacttcaaccattgacaggattagggctgttcatataaatcgggaaaccgcggtttaaattcgaaccactacaatacgaactattgtaaaccgtagtcggggaaaccgtttttggtagtttggtcaattccgaccgtttacgtcgtaatggtggttcgtaatatataattaacggttataccagaccggaccgtttataataaataattcatttatatatattgttgaacgaaaaaaaggggtattattattattattattataaataaattacctcctttataagccattcaaaatgtaaaggaataattgtttaataaaaaaaataataataataataataatagtatgataaa

SEQ ID NO: 236921 - DNA, 1802 bp, Cannabis indica
tttgaaaaagatgagcatttctgatgttccaaatttgccaaatgataccaagaaataagggaaggtgatctctgggaattaaattaaggctatgcaggtaaaaatctttgatatcaagcctatgatagtcaacaaaaaactgtttaaagttagagtgatgccaaatggttttaactctgggaaagtgaaggagagcatgagaaaccgattctgcacttcccccacaataagaacagctagcatttgggatagcatgcttatggaaaaggtttagagcacaagggagaagatggttgaaagccttccaagtgaaatgcttaattttaggaggaatttttaaagtccagagagttttccaccaatccttaaaagggttaggattaaaggtggaaggggaagaattaagggcagtggactgggctaagtgataggctgagttgacagtaagaatgcttgagtggtggaaccccccagatgagagaatcagatggaccagggtcaaaagggatattgaggacaacattagcttgataggtaggaagaaaatagtgaagcttttcagtattccaggttcggtcagggttacaaaaaagagacagtggccagagaggggtcaattggttgaaggatggttggatgagagatgttggggatccaattaggggcagaaatagggatgtcacggccagaacagactttccaaatgaggccttgtttgaggagttgggatccccacagaagacttctccaggtgaaggaaggattatgactttttggggcatggagaaagtcagtatgcttaaaatatcgagctttaagaagagaatagagcagagaatcagggttagaccaaatccgccaagcctgcttagccagaagagcatggttatgggaagtaagagaacgaaaacccaaacctccaaagaatttagaggcagagagagcagaccaattccttcagtgaattttcttcttattcgaagaagagctccaccagaatttagcagttaaactttgaatagaagcacgggtggatttaggaagtctaaaacaagacatagcgaatgaagggattgcttgaatgacagatttaatgagagtttctttgccagcgcgagagaaaagcttttcattccaagcgttaagcttggataaaactttctgaataaggtagtgaaaaatagaatttttaaccctaccaacacactgaggaactccaagatatttactaatgaaaccttcaccatttaggagtaaggaagatcggaatctggattgggaatcaggggaagtatttggggagaagagaatggaagattggtccctattgacagattggccagaagcttggagatacagaagcaaaatattatttatagcttctgaagattgagttgaaacagggacgaaaaccatactgtcatcggcaaaaagaagatgggaaaaagagggagctccacgacaaattttaataccagaaaatagggcagcttcctcgtggagacggatagctgcagacaaaccttcagccacgattaggaaaagatatggtgataggggatcgccttgacgaatgccacgggaggaaaaaaacacatttgatagattactattaagagataattggtaggtgacagtggaaaggcatttagcgatgagagaagtaaacctcggaggagccccaatatgttgaagaaagtgagagatgaaagaccattccactctatcaaaggccttttccatatccaatttaatagcagcccaacctaatttgccagattttctagaatgaatggcatgaa

SEQ ID NO: 236922 - DNA, 894 bp, Cannabis indica
caacaccctaggctatccaacacttgtagttttgccagacattggttcatacattgtaatcctaagggtactataacagatcccacctatagtgatctggatagtgattcccttggtataatacaatctaaaaggggagtaggtcattaagcgctatcacaagggcgtcgaacctctataacaaatcctattatctactgcttttcattcttatctgtgcacacacgtggcaagcatcagatctgcacgaacctgttgtgagttgatcactttttgaggtcaacagtttggtgctttcattgagagtgtggatagtagttgatcactttttaaggtcaacagtttggtgctttcattgagattgtggatatcgtgatttgatcaaattccatggtgaacacaagaagaactcctgttgcaccgtctgcatctttaagtctccttcaagacccacagatcgcaaatccaggcattcaggttctagtcacaattggaatcccccatgaatactgcagatgtggtgaatcccgtcaccacaacaggtgcaactagtctagccaccacagctggccaacccaacaagagcatcctaatggatccaagtggcaggcccacgcctccacgagtagatccaccatttgcgcctcccattgaaggaaggacctaggggcgatagccccttagaacaacaactggacctcaactctggttctacgctggagagacatgcccgggagtgggcgagccaacaattggcaagcgtcacctggacctaggagaagaccttgagttggccaaactcaaggaagctataggccatgtaggcttcactaaagaaccacgacctactgattgcgatgcatacgctcaacaaagacgcaaattcttgagatg

SEQ ID NO: 236923 - DNA, 1048 bp, Cannabis indica
tgtaaacgaaaaatggtaacttttcaactagagaacaaggaaccatttgtttttgttggattggttcaaggttctcgtgtcccaagaatttcagcattgaaggctagggatttactacgcagtggatgtgtagggtttctatcaattgttattgattttggtaaacctgtgttacttgggcccgaggaggtcaaagtggttaaggaattcctggatgtgtttcctgaggaattacgaggaataccaccttagcgggagatagatttcattattgacctgatacctgtggcataacctgtttcaaaggtaccctaccatatggctcctgcagaattaaaagagctaaagatacaacttcaagggatgctggatctagagttcacccgacctagtgtgttgccctggggagctctagttttgtttgtaaagaagaaggatgggactcttcgaatgtgtattgactatcgagagctaaacaagttaacaattaaaaagaagtaccctttgcctagagttgatgatctatttgatcaacttcagggtaagacagtgttttccaagattgatttaagatctggttatcatcaactcagaatccgggaagaagacataccgaagacaacttttcgtactaggtatggtcattaagaattcctaattatgtcgtttgggttaacaaacgctccagaaacctttatggatctcatgaagagggtattcaaggattttctcgataactttataattgtatcgatgatcttcttgtgtattctcgatcgaaagcagaacatgagtagcatctttgtatggttctgcaacgacttaaagatcataaaatctatgcaaaattcaagaagtgtgagttttggctatcacaggtatcttttttggtacatattttcggtaaagatgggattatggtagacccatggaagattgaaacaatgaagaacttgcctagaccgaaaacagttactgcggtatgaagtttcctcggtttagcaggctactactggcattttgtagaagaattctccaagatttctat

SEQ ID NO: 236924 - DNA, 1669 bp, Cannabis indica
atcaatgtgatatggatttggatgaatttataaatcaaataaacatataatgatcacatgaaccatataatacattaaacaagtaataaaaataaatatgtttttttattgataattgaataaaaaatattacattgaaatagaattttatttagggcccaaaacccaacaattatgatatagcatcttatctacaaaagctttgtcaaatcattttgttagaatctttgggttcgtttggcatgttataaatgggttttattgtaaagtgagagtcgaggttggggttagtactatgctccgcagttggggttgaagctgggtttggggcccaggtcgacgtcaaagtcagagtcggggtctaggtagagatcagggtttggggtttgagacgaggccaggggtcggggttcaagagtgggttggggctagcgttcatggtctggggttagaaatcaaggctagagtctgaatacggatctgggtactattattattgtgggtgcgaggtctgaggtccatgttgttataatttaaaatatatattttttcaaaatatataaatatatatatataacataatacaatactattccccaccaactagtataatttaacacatcctatgaatttaagtcaataccaaatatatttttactcatgatatagttttgatgattagataaatgctatgtttgatgtgattttatcaaagaaaaaaatacaatacaaaatataatattagattattaaaataatattatatatatatatacaattcaacacgttgtaccaaacacattctacaggtattaattatttgtataaaaaataatggagaaagtagttttggtgattgaaatagttctacatgcaaaagaaattatatattagatggtgacaattagtcttgggtattgtgacttaagaggtaccatacattttgtgtgagaagaaggagacacactatgtctcactcgatcatcacatacaaacgcgctactggccatccaacgaactatgctatggtttgctattaatttattaataatacgttttaagaagtaaacctagctaaaggctatttcactcttgattttaccgcaccataccaactatcctcccatgttcacattaacttttcttcatgttacatatttctatccaatttgtgtattgttaacgaattttttatttaaaaatacgagtacaatctcatacatagctgacatgtggatttgatttccgatgaaaaagaatgacgtgtcaacaaatatctctaggaaaacctcgcatgatagaaacttgtgagaaggtacaaccgagacatggaagaagtgatactggtcacgtatatattaattatatgcgatgagtaagaatatctctcctatgatatgtaaagaccgtatttttacacacgtctagtctaaaaatactaatgtgttcaaaagctcgttaggaactcgtaagttttaagctgtcaaggcatgaatgcctaggtatgcgaccaaggtaatcgcaggaattctaatctaataactctgaaagttattctgggcccaaaggcctaatatgggagtagacacaaaagaggtcgggacttcgtgtattaccagaagatgaacagccaatgtgcaactccctaagtcgcatacattcagataat

SEQ ID NO: 236925 - DNA, 1296 bp, Cannabis indica
tcggatcccatcttgggtcccggtctcgttccgattcagatatttgggtcctagtccgtctctttgtccgtgtccgtgccgggtgtgggtccgggtcgaggactgaaactggggtcgggccttgggtcccaatcccacttcgtgggtctcgtatttttgttctaatttcaactttggttccccaatctacttctgagactttggtccaagtctgagtctccaatcccagtccgggttatgcgtctgggtttgggtccaagtccgtatttgggttcgggttcgtgtcctgagtcccgatctgagttttaattcggctccgtgtcccggtccgggtctgggtcttggtcctagtcaaattcttgttccgggaatgagactgggtcccagtccctcggtcttgttcccaggtccaggtacgcttacagtttcgcatccagttttgggtcacggggtatttgtttatgtctgagttcgtgtctgggttcaggtttaggtctgagtctgggtctgggtctgggtttaggtccgagtcttggtctaggttttagtccgggtatgggtcccagatccaaacatcgactatgggttaggtttaagccacgggtctaaataaggatcccggtctcaggtcccagtctagttcaacttcgtgtcctaggtcttggtcctagtccgggtttaggatatgggtccggggtcaggtcctgggtctcggtggtagtttctgaagcgcgggtccctgattcaggtccccatcctggtccggttcctaggtcccagtccgagtctaagacccggttggggttcaagtcctagtccgagttcgggttcgagtttccgatcccggtctgggtctagatctaggttcgagtcctgggtttgagtcttgattcaggaccgggtccgagtctcgggttccgatctgggtctgtgttctgaggcccgggtctaggtcccccatctaggtccgggtcctaggtcctagtccgggtccattttgggttcaggtcctagtcccagttccgatttcgattcggtgtccgggttcgggtttggatatgggtctccgtctaggtcagggtttgagtcctagttcgagtcaagggttgggtcttggtccaagtccagatcccggtatgacctgggtttgggtccaggtctgagtccaagtgttgggtacgggtccaggtttgggtcttagtctcggtccgaatccaactcccaagtttcgatcccagtgggtatgggtctgggtctgggttcaagtctaggttcgtatccagatatatgtctagg

SEQ ID NO: 236926 - DNA, 1287 bp, Cannabis indica
tatatattcttacactatcttacgtcgttccgtgctaaagtgtgccggtcagcctgagtggaaacgcagctcgacgctttacagggccctaaaccataatgttcaaaattcgatgagagacacgttaaaacacttatcggggatttaaaatagaaactaagcttaaccctatcgataaataggatgccaataccctaaattacgaaaaattgggaaaatctagggttcgggaaaaagccccaaccggcagaccggttcccaaccggaaccccagttcctgggtaacaaccagtcgaccggttgctagaggcttcccagaaccggtcgaccggttcatagctgggaacctcaaaaccgatcccctcacctcaattgaatcccaaaactttccacaactttccagaatacctgcgtacactatcataaaccaatcccaaccaacagaactcaacaaatcaaacaaaaactcaatccaccattagagagctaggtttgagttttcaaactcaatccttgccaaaaccttgaaataatccacaaagatagctcaaaacaacttaaactaataccaacaagctccaaaactataactagagtgacaactaaacacacagcactaaaattcccaaaatcaagcttaaaacctaacctatgcttactaaaatcaacattggaaagctaggaatcaataccttaaattgaatcttctttgtttcaggttgcaacactacaattccagcaacaaattccttcccttgctggttctttggggtgcacgaaagagagaggaagagagagatgcaaatttgagacttctagactaagcttcactaatccttttactctcaaaataaaattaataaaacaatattaaaaaggcagccatatattccactagaagccaaaataagggtttaaaaaggaaaagacctaattacccctctaactaattaaactagttaccaactcccaagggctaattggtcattactaaacccgacaattcaacacttaacaaaacaccccgagcaaataacatacatcaaaatatacaatatgactctctaaaggcccaacgtcgctgtccacagcttccgaacacaatcacagaaattgagtaatttacataaaatagcataataacatatatgatatattaaatatatttccaaaatatgcatttcataattattaatttaatctcatttatgaaccctaattatttaataattcaaagcattaatcatatgcggtctttacattataattagcaactacttagtattt

SEQ ID NO: 236927 - DNA, 657 bp, Cannabis indica
cataatattaacaaaataaaataattttagaatatttattaaaatttattaaactaaatattataacttatattttaatgggaaactttaaaaatatattcatcaaaaaatataatttttaattattaaaaattttatcaatattataatgtgctggcaaataatttttttatcaactttcttgtaatttataccaacgcttttcaccaatattggtggtaaaagtatttttttagaaaaagctagcgctggcaaaatattgtcatcaaattatgtagttcactttcactctctattacagaaaatgtgtcactttccttctctagccctgacatccttctttctccggctccgacatcgtgcatccttccttctccggccccgacttccctccttctccagcaatgtctgtcttcagatttgtaagtatatttacattattttttgtttttgtttgtgcaatcttcagatttgtaatccctgaggttttttagtcttcatctctaacttcaagcaccttactagctgcccaccaccgacaccccaagtccagatctaacccctgagattttctttcttcctcctatctagagtccgatcaaatctagatgaagtaatactgtcaaagatattttttccttagagtcttcatacaaa

SEQ ID NO: 236928 - DNA, 1223 bp, Cannabis indica
aaaggagaatgggggtcccctaaccgctagaaagagacccccttcggatgaatgtcgaaaggaatctgacaatttgtaatgacaaacattaggtgcaaaatatccaagcaatgtgggaagatcaagagaaaagaatagaaatgtgcaagggcagtttaaactgccaaagaggcgcatagggaacgagagctagagaaccttcgccgtcactcacctccaagaaaaatatacaataataataataaaacaaaacacacatcattggacactcatagaaggaggtgttctacagatggccgccatggctgctacttggaaataacatacatattatttctctcaagaaataagaactattatctgtcaccatttgccctagtgaacaaagagaaaatatatgtatatagaaagagagaagaacttacacaatgaaggaaaggcagaggcagaggacgccttacgacagtaatacttcgcctggaaacggtggaggaaatcggaggagtctggaattttgctaagaagtttgaaagcctgaaagatgaaaaacaatgaaagtgatccagtcgtaagaggtactggtttttataggactaacggggtgtgagataccatcgaacggtaggggttcacaatggttcaaatcccaccaaactaacggttaggatgaaaatgcatgatgaagagaaatggcggttgaaacgtttgagtatctctctgatatctgcattaatgaggaggtctgtcaataggcgggaagcgaatcgctgcctgctaagagacaaggaagaatgattacgatcattaaaatgaaccacgcgcgtggaatacgtgccacgtcactccttgagaccggaagtagtatacaagtctagttttttttagggtaatttttagttatatacgtaattatcaaaaatatcttacatataacgataaaaaaataaaacatcctatatatgtatatgcttaccgaaaattctaaaaaaaccaaaaacaaccgaaaaaaacggcaaaccaaaaatttcaggcaaccatcgtttgcccaaacggtgcgcatcacacccttatcgagcaatatatattcatcacaaaaaaaaaaaaaagacttcgatcaaccaaatccaaactctatcgtcgaagcttccaaaatcataactcgatcgatcgtcaaagctctccaatcatgtctgtggaacctggcaactaaatccaccattaaa

SEQ ID NO: 236929 - DNA, 741 bp, Cannabis indica
atatataattatatgcacatatattttttatttgatagaatatttttaataaatttctcttttatatatcaaaatacaagcacatatatactcctaaataagagtaggttgtttgataaagcagttgttattgacatatagttagttacatttctgttactgttttactatatctctaactatattcacttaggctcatagcttagtctaaccaatcttcagcttgtatataaaagcactctcctctaatcaatgattttctacttctcaacatggttagagttgattttttcttcactgcttccgccattcttgcttcgtcgtcaagatcactctgttcttcaacttcttttcttatcacattggacattttttttccttcaaagactaactgatttttgtgttgctaatcttactttagttaaggaaatttgtgtcataaaatactaattaatctaaaatcactactttataaatattatatttactgcaaaaataaaaataaagtaaatattattttagaccctgtattttataaaaataactaattagaccctattttgttaaatgacaaaatagagccaatattttccaaaatggtaaaaataagaccccaaatttaatttttaacaattttattttttaatataaccaacacaacttttaacacaaacagatacagaaaatataattagtttcgttataatatctttaaattaaattattgttaagttttatttt

SEQ ID NO: 236930 - DNA, 1529 bp, Cannabis indica
gccccattcagttggttcatatttcatacagaatccttgcaagcttgaaagttctgtataatattttaggatgggagtgccccactcccctagaaatagagtatctatactctatcaagtctgttcatgcgaggaagaatactggaggagttttttattatcttgggacatacataggtgatcgtaagatcattagggttgtcacaaaaaaaccctttcaaagaggacttcttttggacaactggcctctcccccatcaacacaaccaccttctgtataatacgcaagtgattatttgcctcaaacttggttttaaattattccatgttttcagttttagcctcctgacttgtaatcttattattttgatagcggtctcgaaaagaccaactcctactcccaagatggctgagcgatgcaggctcttactgggtctcccatatggtcttcgatcggctaagttccttttgaacgaggttaacctgaggtccgtggacctcctcgctgagaacgcgtatactagtgattacaaatatcccaagtatgcattgtggcagtaggttccagtcccaactgacgaggaaactcaagactatgcggctcgggtgcactacctccacaacgcagtccctcgggaagccgaagaaggagcatcctaaggtaatcaatgtggttggtcacccacagtgcttaggactgagcgaaccacattagtgtctttctgagatagccgttataatttctacacctggaatcccctccttataaatcgcattatacatagatttgatagttggtacccagaattgtacgtccaaattagttgtactgactcctactatgggatagccgagtggtatggaaccatgctggatagggcaggtcatatagactcgagctgggatttagaaccaattaactcctatgacatatttaggatcacaggatgtagagactttagtgaatattatagtcctcgttctttgtcttcttatgattatggtaaatcccttaggcgggaaattgtttcccaacttcccctttttcttattttcaaataaatgttaacacattgttttgtctcgcaagaatggatattgaagacattcttcattgctcgagcaagaagggtaagaagaggttaactacatcggagacttcctttgatgtcaacatgaagcccctcaaaaggcccaggaagacaactgctaacaagaagcaagcctctcagtccattgacctcgatgcccttgagaaccaagttcaaactcaccccttcggcccccacacatactgaagagcccacttccaacgacaaatcaggctattgcctcttcgagccaagcacttgagacattgctcatcgaggcgtgggaggggctggcgtcggagtatactgtggagtacgttgcagcttgttggcatcatttctgatccttccttcccaatgactgggacttaataaacaatggccacctgaaagagatgctttagaggagtgtcgcctttggcctctcggtaagcttcta

SEQ ID NO: 236931 - DNA, 1217 bp, Cannabis indica
caagttattaatatctattttttctcaatggattcgaactgtatgtatatgtttggatatgagttttatattctgtgacaaggatcaacttggactattctaagaattctttgatgtaactagacctaagtcatcaagatcacaaccacattctaatatatctatgacattagcatcttattcatagttgttttgacaagatcattctctgcaaagaaaaaaaatgcctatatccacttaaaagtatgatcatctgtatttgcacatatggatgtacattttggtgtggatatgagttatcgttaaattcctagatgatcactctagatttcaccttaggccaagaaaattgaaatttttgagaaatttcatgaatttctagcaatgttgaaaacattaaggtaagtggttaaagatcttgcgaactgataggggtggagaaatatttggtgggtatgcaaatcaaagatcattaagttgaattttgaattatatccaaacttaccttcccagaaatttgaattgcatattgatgaaagtaaaaggtctatgattagttactagaagttgcctaagttcttctagggatataccctagtgataagaaattttcagagtaatggaattgttgtgtacttaatgtacaccattactagctacaggattgtcctgattgcgaacttaagaaaagctagaactattaaggtttgcatgtttgatagcaattctaagtgattccgagtggaccatcctatggtcattaagataaaaaagtgtttgtttcaacaaatactaaaataacaaagttgaggagatatttttgattccaaaagtgttctatcatattattcgatataagatggtctcacagcctctactgtattgacacaatcgatgaggaaattatcacttatgttcttagacagaaagtcacggtaccttgtcggagtgggagggtttcaaggaacttgccatgttatgactttggagatacttgtaattaaaatctattattagtttaaacaagtaatggaaagccagaataaggaaccaagaagcaaaaccaagagaactgtggttaaaacaattcatatggaataactgaaaagttttctagtacaaggacaagaaaggaattttaaaaaataagtctattcaatggacttaaaacttcctgatcctagtgttatatgtttgagattatctaaacctatggc

SEQ ID NO: 236932 - DNA, 1364 bp, Cannabis indica
gatattgctagtttactatccaattttcttgaggcatctctaattcatgttggtcgctcggctaatatggctgcacatgagttagcagtttgtgcactcaaggtggatggcgaattagtttggatggatgattttcctccatttctctatgatgtactaaactctgattatattcaatgaatgttcattgtcaaaaaaaaaataatatatatttggaccaaattcagttgaaataaccacgtctagcatagactggtcaaaaagtgtagccactgatttatttttttcttcttctggtctataccaaggtggaaaattgcaagtttttggtctagtcagctccctaaacctcagatgtaattatttttaaacaaatctatttgtggctattagccaaactgtcaattttaattagaataggccctaggtttatgttagcatcgatattttatttctttctcagagaacatcgaagtctgtaattgagcattgtaactttgagatacaaagatcgatcaataaagtggcttatattggttcattattcagttgtttatgcttagcttcttcatccaatttttgtcttgtacattagagattgattatatgcatcagctgattattgattttgtttacagtgcatgtgtttgatgatcgcgatcaactcatattttcacagcaagtacatatgttgttagtttcagaaagaaaaaaaaacagatatgatattaattaattaaaatatcaaaagtagcgtaagagtgcgattaaataattgtctaatttcaacaagtgtgacggtggtattaaaaatatgtatccaaaccaaaaccactaaactccattatgacttcatccgtcatccttctaattaactataatttggcagcttgtccgtgacccaattcataataaagacataactatgcaatatatatattaattataacatatggatatatggcactgccttatatttttgaagcaaacggatcgatatcgtatgtacgtatattcatgaatacgacgacagatttcaagccttcttatttttactagttgcggtctaacttacttcccatgtaagctcataattcaaatatattttttaaaaaaattttagcatgttgattttatatcaaggaaattacattgtatactcactttgctttacttattttaatttttacttttctactagttcttacaaaaaaaatttgcagtgttcccattagaccccttaggttatatgtaaattatatgctagacttaagtagaaagtgagggtatattaggcaatccactcaaaaaaatgggtataatatgagggtatttttgattaatggatacaaaaaagaggtatt

SEQ ID NO: 236933 - DNA, 1337 bp, Cannabis indica
ttcctaggtggatgaccttttatggaattttaagatttgtatttttataccattttgcggtatcggctactgcacttagtcttgacaactaagttgcctacatatcattttataggaatcaagtcaaacgtagtttcgaattttaattttttatgaggggaatgaactctcatttttggaatgccatttaatttgttatggctttaaattttagtgtactatttaattttttaggtaaaattaccatttttgagatttttgtgagattaatgacctctcaaattttgtgagatgaatgacctcgttaatattctaagattaattttgatgagctcatttagaattttgtaccattttatatggctttagaattttattacttttggtgaccaatttgtgctaaatttaagttttgaaatctttttattattatttaaaaaataaagagattatttgactgatattttaattaattattcgtaaaatttagggaataataattatttattataataaatctttttttatatataatttaaatttatatttaaactataaatctaattgtgtgagtaagctagatacgattttgatatatcatatctcattacttttaaaatttaaatttgaaattaaattcaaattaatgagatgaaaatatcacacattcgtagtataatatacctctgaacttaagtccttatactttatgaaataggactaatttaagaggtatataaattggccttcattagtttataatgtgaaccatgatataaagtctttatgctaacagttaactagcacatgtgctcacggtagaggttttgtttgatgtgattacaccaatacatatattatatatgtatataatgatatttatctgttaacatatatatttttttttaatttaataagaagattgatttcactcttccctgcagtctaagagtggggattttcgtggaccttcggatttgattcacaattttaaaggggtttttttttcattagtatatagtaaaaacaattttattacaaaaaatgtaaaaaaaacacaattttaaaaatgtaccgatttaaaaacatattttaatagattcatacaaattcttaatttaattataatagatatattaatgagtcaacttactataattagatttgtgtaactatttttatgactaatttatattgtattaatgagtaagcctactaattaacaaaattgtatattaatatttacaaaacataatcagatactactaataaacaataaaatttgtattaaccatacaaatcacgtccaaaaaagacataataattgtatggaatat

SEQ ID NO: 236934 - DNA, 731 bp, Cannabis indica
tttttgttatttttaattttaataacggtattacaacttacaacactactctactatatttttgtagtacagtttgttttatttacactacaggattttagtcctgtgttctggtggatcgttggttcttggcgctttcgcttcgtccacaagacttgctaactctgtagtcaaatatgggaaatatcaagattgttatggccctatggattgtgttttgatctttcattaggatagttctttacatagttagtcgtgctatttctcattatcgtatgaataatagggttgttattgcccaaacctttttgacagatttttggctgatagtcattgatagggatgacttgtcattggttcattcagattggaaactcagcattattcatactcttttgttggcttcatagttggcggcttaataatactttcattgaagatgttgttacagtattttttttagagtaatttgcggcataacttccatatgtacttagtttattgcaactaatccccaattctaaaattttggtggtaaaactccctgaagtcgtattctgttagcagtttaacatttctatccattttagttgttaactgccatgttggattacccacgtggacacaatgtacacgtggcataatattattggtccatgtatatatatttttaaataaaattttaaaaaataaattaatttaaaatttataataaatcattttaatttttt

SEQ ID NO: 236935 - DNA, 822 bp, Cannabis indica
gagagagagagagagagagagagagagtacggtgattctagtttcttctagtcctcccattctaaagataaataaaatctaatattaaataaatcaaaacctaaaattaggttactaatgcctagtaaaaggcaaaaggaaaacttaaaagtaaatgacaattttgccccttacataatcgatggcatacatgtcatctaggggtaatttagtcatttccaaactctggcaatatctcgatatttctaatgcctaacaatgatgccccactattaacaagattctaaatcatatgaaaacgtgactctttaaagactcaacgtcacgttccactgcaaccaaacacaactacgaaaaataagaaatacacatatatatcataaatagcataaaataaattcatataaatttccataatgcataagtcataattaataacttagtttcacaattagcccctaattattcaattattcattgtattgaaatttagcagtctttacagaatctgagattattgtttgtgtaaattatgagattttttaaggtaagtttatttatatatgtattgatttctatattttaattattattttttggttttcataattaatttttccttacataaaaaagtaaactacaacataaaattttatatttataatttttttttataaaactcgaaaaatatgagccgagtaagcacgatacgaagtaacattcattgcgatccagctctagattggtctaggaaactagaagcagttactaatttatgttaaatacaaattcattaatttatgttacttcattaatttttaa

SEQ ID NO: 236936 - DNA, 2249 bp, Cannabis indica
tgatgttctctactggttttgtctatttactccttgttgtatctcttgttctgtatctaagaaaaaaatacttccctttatactgatctgtgattctgatctagggcagagccctagtgtaatattttgtaactgatttttgtaactgtttcagttgtaactgattttatgttctttagtcttgatctttgttgtatttgatgtaaagggtatatttgtcaaaccctgtgagtagtgttatacaacttaaggatatgtaagtgaatctgtaacaacaattagattattagattttgatccaatgatgaataataaaagagaaatttgaatttctatgcttaatttagaaacttaattaaaaaaatatataaaaaaatatcactttttacactatattaaaaagatgtttatatacaaaatacttaagtcaaactcaatttttttggtcgaaaaactttttttcttaattttttttagtctgatggaacaaccctaactcatataatgtaaaaaataaaaaaaaaattagattagaatagaaaactaagacataaaacttaaaatttacacaatattacccattgaataatccccattaagagtacagcctattatatacgagggccggcactaaaatttagtggacaataaggaaaaattagttttggccttattaagaaaatgtgtatttttcaaaattgataaagaaatgtgtaattttaaaaggggataatttttttttggcccctgagctaggtgggctctaggcacaggcgtagcccgcctataatcagggccgaccatgcttatatatattgataaattgattgatgattcaaccgtactcatttatatatttatgtaaaatatttatgggaatctcaaatgacattctacttaatattttttctttttggacaaaaaaaaaagtcatatttcattaattatatgagaaaatgtttgaagggaattttcagacaattagcaattaatctgatggacaataaataagtctttctaaaaaaaattaccttcttattctacaacatttatgagatttgaaaatcatattatacgaataaaatataataaaaatactaacgttacgcaatattaattgccttattagatatgccagcactaaagagaggaccctaaaaaaaactcattagttcctcctctactattatataaagaactccagaggaacaaataatcaaccacaaaattaaacaaatacgaacaagttaaaatttactttatttttatatatttgaagaggttttttgttagttacatacatatatataaaatatgggcaagtcatctggtctatgcaatgttctcttagttgctatccttgttcttgttgctctaagtaataatcttatctccttctctatgtacatggcgatcaaagtcatatatatatgttataattcttagttttatatataatttttgttaattataagtaattgtaaagttttattattgtgtgcaggtgatagcaaaatagtggtaatgggagatacatgtagagcagtgatatcagattactcatgtaagcaaggaggatttgaccaaggatgccaacaaagatgcattgccaagtatccagttacccaatctgcatgtgtagcaccatccggtgcccttcctggtgtcttttattgcacatgcaattatccatgttaaacatatatattattattccaatccttttttcatgtaacgaaaaaaaaaatctaaatgaataatgagattgctaattttgtttcatggcttgtttaaatatcacatttatattatcctcctcaaaaaaaaataatacacatttatattatatatagataaatataatattatcacaatttattttcacacattagcaatgtgggactaagtcttaataaacacaagaaggtatatagcttcaacttacacttcaatttatatggcactaattttgtgaaccaaaagataattagctaaatcatgagtaattcgattggcctcgtggaatacaaattaccaacaaaatattaatgttctaatttgatctaatccatcgatatcacgaccgtcctcattttatttttttaaatgctaatatatattatttaatattctcaaaacattaatttataaaagaggaatcacttcatatattaactttttcaattttttatttttttttttatttttacggtttgagttgctatatgaatttgagttgcaatttacac

SEQ ID NO: 236937 - DNA, 1265 bp, Cannabis indica
tacttttgttaccattcatgcccaaagaaatcctcagcaaagcttttcaacctccttagtggtactatgaggaaaaacaaaaatgctcatccaataatttcgaaagccaagtaaaacagagtggattaattgaaccttattaacaaaggagagatgtctgctcgaccaagtgtgtaatctctgcttaatcttttttacaatgatcccacggtcctcaactttccactttgtcgaccttagagggactcccaaatatttaagaggaaaaataccctctactagttaaaaccgtaaataatagcttgtttctccttagttcttaggcctccaaagtaaatttgggatttgctagagctactatgtaagcctgagatagagctaaaatcatcaagcacatgtttgagagccataactgagagcttggaacccttactgaacatgatcaaatcatctacaaaacatacatttattatcttgaagcccttgcacatcaggtgatacctatagttagaatgagtagttgttgtatggaggcttctagtgagatactccatgataagaacaaagaggagaggggagatcggatctccttgtcttaaagatacgatttttgatctccttagaatttctagaaacggcaaatcgttttcgtgaaaatggctgaccgttttatagcacgaaaatcccaaattttgtactttccgaaacactaccaaacctatccaaattatttcaaacttcacaggacacatacataccatatatacaacaatccttacgtaacaaaaattaaaatcgagcccttaaatggaaaatgtcattaaagctcggacttaaactttaaaaagttccaaactcaatttttaactcaatttcaataagtaaacaacgaaactagtcccatagttacccaagaacaattccatgatgaagtcagaatatccataactactctaaatcagaaagtcactatataaaaccaatcagttccttatgctcttcctctttaatgatttactatcctgctactactggagcttgaattactaagtttcgagttggaaattgaagaaaataaattaaggaggacgagagtttcatcgcaccgaaaaaaagggtttcgttcgttcttctatttttattttaaaacataatatatataaacttaactaataagacttatcattatatttatatataataataatatacattaataataatattaatattataaataaaaactttattaataataattattt

SEQ ID NO: 236938 - DNA, 547 bp, Cannabis indica
tccgcatactgcaaaatcatataaatacttatatatgttagagattatgtatataattatagtaattataaactgcttctttacaaaaacagtaaagcacgacagctattaaatggagagttatttgataagagagctgggttgatttaaggatacttaagttaaaaaatggtaacgtatactctgagacttatctaatgtaccctgacactcatctaatgtacatattccgtaaaagtatatcatcggacaaaatcgtgtcccataaaatttattcttgattcttccataatgaaaattaagatctaattaataagaactacttaatagagtatatacttacatcgtgaacagccactcgaagttgctttacttgctctcttgagaccgtccttacctgtacatagtgttcaaaatgaattagttgaattattaggtagtatatatctagaccacaaatactaaaacgtactattggtagtagtgtttagtatttttctatattggtataattaaaagtagagcctgatataatttaatatagtta

SEQ ID NO: 236939 - DNA, 1583 bp, Cannabis indica
tcatccatccacctcaggaattcacgtctctacgtaagcgaagacatcgcaattagcagcatgtggttcgtcagttaggccagcttggccaacgcttctctaagtctggctaacttgagatcttctcccaagtctacacgtggctcgccaatcgcaggctcgccaactcctagtcatgtctctccacgtaatactagttacgagatccggttgttgttccagggggttgccacccatgagtccttcctttagtgggaggcgccaatggaaagtcctcccttggaggcaagggcctgctattcagatccaccgagatatttgtatcagtttggccagctgtcatggctagatttgtggcgcctgttgtggtgataggattgaacacatttgtagtgctcataggaattccaattgtgactggaacatgaacatcaggatctgcagtctgtggatcttgagggagcccaaaaaatgcagatggtgtgactggggttctcttgtgctaaccatggtgtttgatcatatatgagatccaagcctcaatgaaagcacgaaattgttgaccctaaaaagtggtcaaccgacagcggggtcatatgaatctaatgtttgccacgtgctacataataagaattagagagcaaagaacacgcaaaattttatagagattcggccccctaagatagcgggtaatgaccaactctccttttagttgtagtgataccgagagagaatactattcagatcgctataggtgggatctgatttagctcccttaaggatacaaagtaagaatcgaggttggtaaatcacaagtgttgagattgcttgtatgggcgttatgagagagagtgaggaagagagttatcagacttagaggtttagccttggagctttatcacttggaggctagaatgagacttagattttctaggttagagttaaggcctttatataggaaagcctaaaccctaatttataacttaaacccttcgatatttgtctattaaattagttaattacaaaagaccaaaatacccttgaacatagatatttttcagctgttttattgagttgttagggcccaatttgcaacccaacttgcagtccacttttggaattatatagaaaatcctgccatgccctttcctggctggccagacacctgcaggaagtaaactggccggcatttgtgttatctagaggctggccggccaggggtggctagccagctcctgtgaggaagctagtctgttagttgatgtcttgtttaagtactgggattcttgttggctgaggtactgacttggccttcttgttggtgagctgtattgccacgtggcacttattttgtccacataagcaataccacgtcaggtggacaaaaatcgggataacaagtatggaatagttcgagtgtgagtagtaaaaaaaatgtaatagagagaaaaatagatagaatgagtgctcctaatttttttaaaaaaaagaatagtagaaaaaaatttgcgagagagtgaaaatgtgttaaaaagaaaaaagagagagataaaagaaaaaagagtgtgtgtatgagagagaga

SEQ ID NO: 236940 - DNA, 1145 bp, Cannabis indica
aaaccttattaatttaaaattatatttgtaattgagagactttaataaaataatcacctccacaaatatttcacataagacaaaatatcaattggaggagaaattccaggatcttgcaggagtctcattatggtcttcaaatgacccataatctcgttctgtcctttcaaaagagcagcctgactttgcttcagagctagttgttcccactccaaaatcgccaaccttgccatcatggcagaggatactgattcttgaggctttgaattgctaggaatagatgcggatgggacaacaccaaactcatctggtagtgaagacggtgcacgtggtggagacggtgcacgtggtgtagagtctctaaagattcgggctgcactcgctcgttcttccaatgtcgaggcaagcttttgggcctggctttgcaaagcatcctgtgttggtttcccatcgtcaccgaacactagttcctccaagtcaatatataaaggcatctcaccgccagtgatgcaactcacaaactcaatctcattcgctcggggacataacatagagtacactgtcaactgaaaaatagaacaaatattaatagatagaaattaacatgaaataaatgtaaagcgtaagaaacttacatttctagcaaataatcatatcacttcattcttgccgactgtcgtttttagcttacgtctctcactactagaaaaacggattttagtaacacacattgagtaactctaaaactatttagtgacatttcaacgtgcatcactaatgagagtgactggaaagacagtttttagtaacttttcacacgtgtcactgaacctttttacattcactttatgtgcgtcgctccagacgtataaagtcaggttttctcaaactgaaaaagtaatagccacacacataaagtgtcactatatccttttttttttttattttttatttttattaatgttaatatgctttatatatatataaaaattaatattacttttttctaaaattcagattatatattataaatttataaaaataatttaattaatgatacaatttaattaactatatatttatcaattataaattaatatattttaattttaattataatattattaataaaccaatataaaaaa

SEQ ID NO: 236941 - DNA, 809 bp, Cannabis indica
caagttcttgtattggtttcctttgccttatttgtcggcagtttcttttcagatggcctactaccccatactggaagtagggcctagcttgacactcccctgatggcatctcttacaccttggacattctaaataggtctgccaattctcgtttccaccacgacagaaaccttggttactttgaaacctcttattcgatcctatagctaacggatcattgggtcttttcttacgatcactagggtcattacccttaccagaactagcaccagacgtctgcttccatgaatctcttcttgcactatttctttttttttttcgaatctggtcttctgcaccctcaacagcaaaggccaactcaactacctgagcataggttcgaacaaatctaggttgtttggcagcaacaatcacatctctagcaatgtgttcttccaatccccgaatgaatttggcctttctagctgcctcagtggccacttcatctgaggcaaactttgtcagtcgatcgaacttggtggcatactctgtcaccgtcatattgcactgggtgggtaaaccatataaattcttctgcttttgatactcggatagactcactatagtttttgtcataaaacagggtcctaaaagcgtcccaagtcatgttattcagatcatgactctgtgacacaatctcccaccaaatgtggcgtcctcacgcagcatgtaaatggcacaccttactcaatcattactcttgacccgcataaagtcaaatatggatgttatcatacttatccattattccgccttgagtggatcagcac

SEQ ID NO: 236942 - DNA, 730 bp, Cannabis indica
tttgagttactcttgttgttgctgttggagtttttgccaaaatcacctccatcttctgatgacaattcctcttcaccttctccgaatccaccatcaccatcaccatcgtcttcatctccatcttgttcattgtcgccatccccctcagcgtccgctgcttcgctgttgcattgggcgtcaacatcttggataaaagctttgttatttggtgatgacaacccatacaaatcctgaaaccgggtattgaaataaatttgcaaaaaataaaagaatcatatgtgaaagagaaccaaaattcaatctatttcatttatttgtcgatgactgtagataatactcataacataataataattgccatgtgatcagtcaatgacgatgaaatcaaggaataacaagaaaaaaaaaggacaacatgcaagaatatgattaggttacattgaaaaaaccatttggtatctataatgctgttccctgttgcactttaggagcatcattattctaataccataattatttgtgtgaaagaacatttttttatgttcttgttatatatttttccaaatagtgtaacactagtaagaagaagaatatggaattctctttattctcccaaagagataagatgacatgacctcggtggtagtagaatatgcttataaataaaggaaaaaggaaagagaacatttctgtttcatagaaaaaaaaaatattccctaaaagattatta

SEQ ID NO: 236943 - DNA, 1164 bp, Cannabis indica
gaggttgatgcctcgctttgtatcacagatgccatccttatgattgtgtcttctaacgcggaatggtttttcgtcaacgcatgaggcaatagtttgtatatccttatctcgcttaagactttacattcaacaagttataatatactctatcagctccagatttaatgagttatttcattttaatattaatgaaaagtgcattttacatgattacagagggtatttctgtcataatcccttttaaaaaaatgcatgccctctgattttggtagttttctggttttgatgcacatcagcatttaataactatcttttccacttccttttttaaattttacctgttggatcaattgtcttcctgatctaacgaagatcaacccaagagtataagacaaaaaaaggaatcacctcaaagcccaggtaaacgttggttgtttgttttttctaaacaattctatctcgctctccctttctcctatgcaggtcgatggtcgtggggggcttttgctgtgggtggttgctagagcctcaactttatggttgtcgaagcttgagataatgacaccctgttttgttgtgtttcctttgtgatcttggtatcttttttttttttttgagatttgactttgattcaaatacatttttctctctctctctacaagtctctgttcatcggcgttatcataggtggtttttcgggtaacgctaggtggattttgggtttgtagacgatggtcggggttggggtttaggttcgcaggtagttgttggggttggggttgggttcactgtttattatttttattattttttcagttcataatcaagtttgggtttgggtttgcgcaaaggtatttttgagtttgtacaagtgtattgagaaacaaatgtattgagtttgtaaagaaaaatacttcacgcgtacattaaatttttatgttttaagaaataaagtttataaatggttttattttttattatttttatctataaaacctatttattgattaatagggtgaaattataaaataaataaataaataaataacacacattacaaggacaaaaaaaaaaagaaaatatatacatatagtgaagcacattggatgttgctattataattactcttacacgtgacatgactctaaatggctatagtgacac

SEQ ID NO: 236944 - DNA, 1423 bp, Cannabis indica
atttatactaattcatgaagttattgcataggattgaaattacctctcttataaaatattgttgtttttgctggtttatataaattaatcattttgtgttgatcccttgtgagattgcagttagatcatttggaacggaggggcacaagaaggatggtgccgaagttcttccaagtgagaaggtttatgaatacatactgtttagaggaagtgatatcaaggtaacaagtatgtttgatgatttgtttttgtgatataaatggatttgtaggaacacacttttttttattttatttttcgctatgcttttgtcttttttcaactctacatttggatctctttttgtaagggagccatttttaagttatgcgttatttcaggctaatttcaccctttctttgattcagtctgggtatgccatcagttacaggctattaaatttctaatgtgtatgattacgacattgtaaagatttttctgtgcatgtgatgatcttatgttgtacaattgatgcgggttctttgggacactatcttgccaatcatgtttgtgttacagaaacttttgcaattgtgtttcctctgtgctgcacacaaacatgataatatggcttgtgataatggtaatgattcagctttatgaccctattgctgtcctgcaatttcaggatgttaggacctaggattagtggggtgtgctaacatatagtaaataaaagggtaattgagtctttgtattgagggtagtgttgtggagggaatagaatagtatatatagaatattaaggggaattgagtggtatgtaatgttttgagtaaatctctagttgcttcaaaggggcctaagggctcccttactttgtaattgagtttctcatactttcaatacacaatttctattgttttgctattgttctactcctattattgctactgttttgttgtgtcttgatcggaagatctcagggcttatcaattggtatcagagcgagtgattccagtggaggtcgactactcgaatggaggaattagaggaacagtggagatcggagtcttatgatcgtccctctgaatttaatacactggaggaccttgcttcgcttttgaatcaagtacttcttgggcaagtaaggctactccgcctctcccgcgatctccgaagtcatgtcacaacaagatcggaggacaacgaactcaatgagtggatccaccaagctgtgcaatctgttcgggttcgcaaccaagaaggaatacgaaactgctatgcgccgaatctaacttctggatctccttcaacactagagacggaggttgaatgtgatggaaagatggaattggcaataagggaacataaacgagcctttgctagacttgacagtttcagcaaacacaaacagcaggcagctatacaatcggagttccta

SEQ ID NO: 236945 - DNA, 1209 bp, Cannabis indica
taaatagaaattatataaaaattagtaaagttaaatttctttaaacatcaccgtaaattgtgaattattaattagttatatataatataggtagagcagtatagtatctatagtatctatatacatttaaaggagaagtatgaagcgataacatgacgctctaaaatctcttcaaatacatctatctattatgttcttaattctctcatttttttttattatttattcaatttataaatattaattcattaatctccataattttcccttttatttattaatttactatttttttaaataaaaatcttcatatatttatttatttatttatttataaaaaatacatctatacaaatatgactacacatgtatatataaatagctaaaaatttatatatatatataaatgagaagtataaagcgatgacatggccctctaaaatctcttcgaatacatctatctattatgtccttaattctttcatttttttttttattttttattcaatttataaatactaattcattaatctccataattttctcttttatttattaatttactatattttaaataaaaatcttcatatatttatttatttatttaaaaaaaaatacatctatacaaatatgtatacatgtgtatatctaaatagctacaaaattaaattacataaatacttcattaacattactattatatacacgtaaaatttcatagaattatataaaattataaatattcctaatcctaataaaatcctaaatttaaataaatcacacatccatcatatttttcactcttagtcgatttccacaactcaacaaagattcatgtaaaaattatttaagtggaaaaaaaatggtttctttattgttataattggtattttctctaaccttaattttgtttattaatttcataatttgataattaattttctctactattttaattcttttctcatagaggttgaggtggcaaaacgggatttcaacacagccacatgaacacaaacaccacaaattacaagttagggttataaaaattaggcgcggatataaaaaaaaataagtcgacacgacctactttaatacgaacttgacatatttgacacattttttttctaaataaaatagattaatagtataagtgtaaaattatatatttaggtgtcgtttggtaacatttttttaatcatttttttt

SEQ ID NO: 236946 - DNA, 1025 bp, Cannabis indica
taacaaccacgaggagaacttgtaaaggaaagtaatgtcagacttttacacaaagatatttatgaatcacaattaattagttataataagtattatacttagtttaacattattaatatgtgaaaaaaatatcatatataagataaatagactattcctcttattgttaattgattgtgagatgaaatatcattcattttaaaccacactttaccaaatgttaacatggtatcagagtcaaattaaactctaattcctatagctaaaaagagtctcttgtgattcgttgtgagtccaaagtaccgacggcttaaaaagacaagtcaaacttaaaaagttccgttgtctccccctttaacctctatttaattgggatcttttggtcaatgtatgtcaatttctagtgttggggcctttgacctgtttcaaatgccttgtgggagattctttcaaatgtcacgttcagccttgtggtctcttaaaggttgttcgttatgctcacactttctaagcccaaacgttaagatgatgtattagagttagtctcacattactaatgtgtagaaataaaatatcatataagatgaatgagttactcctctcattaccaattgattttgagatggaacatcatgcatcttaaaccataccttaccaaattctaaccattaatattatcaatgtatttatcaacaagtgctaaatgcattgtgaaatttgagtttttatattttatgtcacttcctaatttagaatgtctcacttaatatccacatgacaaaaatatactgttcttttccccttttattcaaaataccattttcataatatcctcaaacttttcatattctctctttctcttattctagaaacccaaaacctccaccctttccctttcgacaaccccattccattttggtaatccccaccctgacacctaggcccttgaaataccgtatcctcaaaacctaaacccctaaaccctaatacacaaagtcatcgagacccacgaccattgaaatgga

SEQ ID NO: 236947 - DNA, 711 bp, Cannabis indica
aaactcaatcccctaaagtgctcatttagagtcagctcgggtaaatttctgggctttatcgtcaacgcccgaggaattgaagctaattaagagaaaattcaagccctcctagtcatgaaatcgccaacaaaaaccaaggaatttcagagtttgactggttggattgccgcactcaacagatttgttttaaactaaacagacaagtgtgtcccattcttcaacatcctgcgaggaaataagcaatttgaatggacggaggaatgtgaaaaagcctttcaagagctaaaaccgcaactcgcaaaagctctggtgctctcaaaacctttggacggagaagaattaggaatatacctggcagccacggtttacactataagtgccgtactgaccagagaaagagaacaatatcaaacacctggtatactacatcagcaaaagattcattgaagctgaaggccggtacccattgatagaaaagctcacttattgcctaatcctagcaacgagaaagctacgaccctactttcaggctcatcctgtttaggtatacactgacaaaccattacgccaagtattgcaaaaatcggacgcctatggaaggttgctcaaatgggcggtggagttgggccagtattaaattatctttcaatcatgaacagcaattaaaggtcaagccttagcagatttgtagttgaatgtacgggtaaagaa

SEQ ID NO: 236948 - DNA, 1863 bp, Cannabis indica
gaccaagaaggataattttatttgcattctaaaattttataaaagcaatctattttaaattcttttttataaaaaaaatatctttaattcatactaatcttttaacttttttctttcttgttatattcttaagagatataaaactttattatatagacagcttcgtcaaaaaattgattgaaatgagagattgttgccgtgtaagagatggttgagataacttcgtcaaatgatgagtaatataagttttatgagattctaactcaaaaagaaatcttttggaagtaaaaggtgaagcagttttggttaaaagagagtgatgagaatagtcgttattttcatgcgatagtgagtgctcgtaaaaagacaaattatatttctaaactacaagatgatagtggcgcatggtttacatgggatgatgggcttcctcagttggtaaagggttatttccaagatctttttactaccttggatgtcgagtggagtaacctgcttgatgatattcactctttggtttcagcttctcaaaatgatgatttggtgcaatatgtttcgaaagagtaaggtcttgtttcaaatgcatccagagaaggcttgattccttatgtgatgagtttggggttttatcataaattttggcatattatgggggcagatgtggcgaagttagtacaacaagttctctcttcgggtgagtttccaattgatatcaacgacaccaatattgttcttattcaaaaaaaataagaaacatgtgaagattggggagttaaggttaatttctttgtgtaatgtggtctacaatattatttttaaggttatggccaacctatttaaagtggtgttgccactagtaatttctgacacacaaaatgtttttataccgagtcggttgatttcctataatatatcatggtgtcatttaaaattatacactactttaagcgtaaggtttccaaaaattaatacgagtaacgtgtataatagggtgaagtcaagtttatgtttaaaagcccaaacttaactctcatctcaaaaaaaaccatcacaactatcaaaagagcatcacaactagtctcaaaatacctcagaaacaaaactccgagctcacatactccataacagccacaaaacacaaaatcatattaaaatcttaaactcttcccatggaagaaaagaactaacccataccttagctttctcttcaagtgacttactccttggcttggtttggtttgctcgagaaataagacaagggtttgtgattttgtcgtaatctatgtttatctaaacatacatattagtttataaataataataaaataattaatttaatttaataattaaacaaattattttatctatttttttggccactaagaaaactctaattctaaaatatttggtcaattctgagcacttcgaaatatcctgataaacctaacaccaaattatctcaataatcccattaaaatactaattaaaattgttgtgacatttttggtcttttatcgagtctccaaggtcgtcaaacctaaaaatatttatattcaataaataactcacattatacccacatattctaaataaatcctcataattaataaattatacttgtttatccacttatgacaaaattcataatttacgctgaattagattagcatggtcataatcctactcatccttttctaattaacccattatatataataaatcctaattattcataattaggtttttggaatattacaacattcaaatgtttttagtcctattcagattcgatctaattatatattggatgttaaaattttaccaatcagatctgacccaattaatttcagtcatccaattgat

SEQ ID NO: 236949 - DNA, 1358 bp, Cannabis indica
ttaccatatatagctttcttatatttacaaatataattatgtttaaatggttaaaaataatataccataattttagtatactttttttttaaaaaaaaaataataattttagtatacttataaatataccatatggtcaatctgggagttcatctcagcagtcgatgatgtttgggggttgaatgcatcaaccttctttgggtcaacttttcagtgcacaaaatgcatatattttttttggtcagtttcagcaacaattacatgaattttttgccacaacaaccacagactcgtcaatttgtggagattttatcttcccagcaaccatataacccttcaccaccagtatcgcaagctcgggacaatgcacaaacaatccatctaaacttgaacactgccggttcagattttttagataatgtacttgatgaagacaataataattagtttaagttattttaagttatgtgtggattcatttaagtttttaatatatgtttggatttatttaagtttttaattatatgtgaatgataattatttaattttaatgttggacaatttttaattcataatgtgtgtagtaaatactttattgttaatataatttttatatttattattaatatttttgtaaattatatattcttaaattatgtgtgtaataaaatctgattattattattttcaaaaaaaaaatctgattattgctttaaatatttaatatatattattattaatgtaaaatatatatttataattataatttatgtttttttttttattttaaattacattaccgacggggtacccgccgctattaatgtgtcagatatttaatttgacgcattaaataccggcgggacccgccgctaatggcccgattaataccggcgaatgtgtcagtccgccggtattaatgagtaataccgaccgggtattatcggcgggacaataccggcggaaccccgccggtaataacaaataccggctgattttgctattaataccggcggactcttccgcccctatttattggtattgttgtagtgtttgtcttagtggagagtgattcagaattagttatcaaagcgctgaaaggaatgcactatatttggaatattgataattatgtttctctatgtaatcaactctctaattattttctttcttgcaacttttcttttatgacccgtgtttgtaattttgctgcccataatgtggctaggtggacttttgcccagaattttacaggtattatgaagccatcctctatacctgcttatatcatttgtaatgaccgtgaggtctaattttctttatttatgaaacgccctattttcaaaaaaaaaataaaa

SEQ ID NO: 236950 - DNA, 824 bp, Cannabis indica
cggcatgttaaatttttttgaacccccaaattcaagtgcaaaacatgtcaagttgaatctcaattggtgatagtaattttcaagtcgatgcctaactacatcattacactaaaaagtgcagtgatcattagaaaaccacttgagagcatatgtttaagccttaatttcttataaatattcaccaaggccaaaagaaaggcaagtttacacttcaaacttcacatgaataaataaagtaacaaaacaattctttgtccaattcctaactcaaaagttagttcatttattttagtgagtaaagtgaagtgggtatacaatgtaaatgtattggcaattattgaatttagcctaatattatttttatctcttctcaaacccaacccaaatgttctctcttgttagtttaatttaggagtttttacaaaaatattgaattttaagtaaaaatttacaattttactgtcacacaactaaaacaaaacagaacaattaaaacaacagtgagacaattaaaaaacaaccgtagaacaaccataaaaacataacacagtataaaacttatatagtatttttgaaaaaaattccaccctacagttaaaaaaaattgaaaatttatgtggtgtaaaaactcctttaatttattatcaaataatttgaattttgacttgtacttactttgtttatgtagattcgtatccaattgaacttaatcttttgattattatttttgttgtattattattgctatgttgaaagtatcttaatttattattattgtttattgtttcgtttatattaattttggaaagaaaagaaaaaaaaaa

SEQ ID NO: 236951 - DNA, 1453 bp, Cannabis indica
tgtcaccaaccaaaacttcactatgtgccattacaaatgcacatgtcaccccccaaatgacttaataattcaagtgatgataagcactagttgatgcattgtaatgtcaatcaacagtgtatatatatatttatatatatatatattgaataatataaaaattgtatagagttattgtacaagggacaaaacaatgactacctatccatcatctattctctatcactatcaatattcatcatcatcaaattaattactatcatttttttctctcttaaaatttaataaaatggcattggccatgcttctcccaccttataattatgcatttaaatatctaaacttttcaattatgtaatagatacaagttgactacactttatttttttcttagtagcatttgaataccaataccattgtttttcttcttttttttttagtgttatttaatcattattattttgataattattattattattattttgctatagtctacatagtaatgaaatcacctctgtctctccatctcattcataatgggtcggcagaaaccaccatcagattctgaagtagccttattatgatttttgtttttaattttgacaaaaacgaaaatgggcccaataaagcaacaaaacagaagtggaattaatatattgggcctgagaaatgggctccactatgaactgtaattgtgaatgcaatgtactctcttcttcttcacatataaatatatatatatatatatatatatatacatttattatatgtatagcataatcaatctgacttttaagttcataatgaattggatagtgatggcacaggctagacatgtcccctccatgtcttacaatatacgaaacatggtcccttcttactgcatttattttccttctatgtatgtatatatatgtatatatatgctttgtgtattgaattaaagtggtagctcaagatatatatatatattttacataattaacaattattaatcatttttttctaaaattactctaaatgtatgataatacaatgtttggtaggttttaaaatgtacttctattggtataataatatgataaaaaccataatttaaaggctctaatattgtgttaaagatgatatttttattattggtacaattattatgaatactctatcgatttacgatggtaagaacatacatggattaaaaataaattttggactagttctctcgaggtcgattcgatgcctgagcagtttaataggaaggaactgtaaattcaaatcctaacgacctgatttttttatacagggttctcgactttattttatttttgttgaagacccaaaataacatgagagaaattgaaaaatacatttttttttatacattaaccaaatttatatttaaataaaatataattcaaatatacttctttttatgagtattgtacttaaatta

SEQ ID NO: 236952 - DNA, 951 bp, Cannabis indica
gtttgttgaagcttaataaagtaagggttagtgctcttattaagaataaactaaagaacaataaagtggatgagatgatggtaaaggtgtttcatagatgggattatcatcggggtgatcaatgtgaaagaagaattctggttgcgtggcttaagtcgtttgttcaagttaaagtgttgaaggatcataagcaacttgttcactgtcttgtgaagtttattggttctcaactagaagtgtttgttacatttgtgtatggtttcaacaccattgatgagagagtagatttgtggaaggagctctctttgattaactgtcagggggttccttggttgatagcaggagatttcaatgcagttttttgttatggtgatcgtactggctatagagcagttactcccagtgagttagtggatgctacggcttggattgctcagtccaaattagaagctctcaagatctctggctctaaattcacttggtcaaataagcaagatgggaaggacagggtttattcaaagattgatcatgccttcattaacgaggattggatagattctatgcctaattctttggctgtttttcaatgggaaacatgttctgatcaatgttattgtgtgattaaaacccagcaacagggggttttggggatcaagccatttaggttctttaatctttggacttctcacagtaagttccaggaggtggtgtctatcaattggaataaacctatggctggttctaggcttcatcgtatttttaggaagctgcttaggcttaaacatgtccttaaaagattcaacaggatggaaattggagatgtggaacagaagtatcatcaagctaaagctgattaccagtgtgctttaactaatgctcaggaggatccaacagatgaatgtgctcaattacaggagagaaatgcggctgctatgtttcaacaacaggctg

SEQ ID NO: 236953 - DNA, 948 bp, Cannabis indica
aatatattatatttaaaaataaaataactaaaataatggtaaaaattaataatatattcaatgccattactataatatattcaaatagtttgatccggtgcgcgacacccctacgatgatcgactttctcacactaatgtaagcatggttaggagcctcaactcctttggtccttcgtaggagtgtaaatgaatcaaaacggatctgatcgatagcgtactttgtttccaaattaacatttgcggtaacggtgttggtcatgcaaaaattaataaataatttatataaaaattaaaatagaaatattatcatattcagaaaggtatctttagatgaaattgaatcaagaagactatagaacaagatgaacaaaaacttttttatatatatacttagaagaacaacaaaacttggaacatttgatcattatgaaaaaaaaaatagaaaaaatgggaattttctctttcgttcactttgaacttttggcaaaaagaataaccaacctatgagcataaattacaatgagagaatgaacaaggtaaggatgcaactcaatagtaagaaaagccaggaagaactcatccaacaaaatttcctggaatcgtttaatctgtcagcgctcaacgccttataaacactacccgccatatctacgaaaagcttaacagctgccaacaatgaaaaaattaaacataaaagaaatatcacgatattcttatcatctatcgatatatgcttctcctgcaccttttctacctcgtatcttcaattgaatcccacttattagaacatccatatgaataagtttaacaatttgtttcattctcttctccaaattttcagcataattggttatttttagatgttaacgaatgtgtgtgttttttttaattaaaataatgttatgttaacgcatgtgttttttataataaatttttgttaaaaaaa

SEQ ID NO: 236954 - DNA, 1044 bp, Cannabis indica
tttgaaacaagctctttccccgaaagcctcaatgacaccaacttggttctcattcctaaaagaaagactccagataccatgggtgatctccgtcctattgctttgtgtaatgttgcatacaaaattactgccaaggtgcttgccaacagaatgaaacctctggttgatcaggtaatttcccctactcagagtgcctttattcccggacgccttatttatgataatataatgatagcttttgaagttatgcattacttgaaacataaagttcaaggaaagaaaggctatatggcacttaagcttgacatgagcaaagcctatgatcgagtagaatggggttatctacgggcggttatgcttcaaatgggattcagtcttcgatgggttaatctgataatgtcttgtgtgaccagtgctcgctattctattattcatggtggccatgtcatgggacccatccttcccactcgtggtattcgacaaggcgatcccctatccacttacttgctcatcatttgtgctgaaggtttctcggctctcatttccaagttcgaaagtgacacattgttgcaaggctgccgtgttgctaacgatgctcccaccatatctcatatgttgtttgctgatgacagctacctcttttgccaagctaattcgggtgcagcacgcagtgtcatgactcttcttcgtcgatttgaaactgctttcggtcaacaggttaatctcacaaagtcttccattttcttcagtccaaatgtccaacatgttgttcagcaccagatatgctcacttcttggtatggatgaagcttttgacaacagcttttacctgggtctaccaaacatcattgggcgaaataaaaaatcaatccttggttttctgaagaataaagtgattaacagaatcaatagttggactggaaaattattatctggcgctggtaaagaaattctgttgaagacggttgtccaatcccttcctacttatgctatgagtgtgttcctttcttcctttgggtcctgtgatgaaattgaaaaacttatg

SEQ ID NO: 236955 - DNA, 2086 bp, Cannabis indica
cgacatgctatcgtacagagcatacgtgtctcattgtacctgactaaataatccaacggctagggataagggaaattcaaataggaaaagccatgggacgacacgcgtaggaggtccagctcgtaccatctgacacccttaaatgccatatgggaaaaatgacacctactaatccaacggtcggatttcgccctaacgatgatcaatctaaggcatcacatatagagaagttggtccataaatgcccctaaaaacacaagagaagagcggagtttttaaaataaaaacaaagagaagactcattcttcaccacccttagcaaacacatttgtattaagccagacgataatattcctatgaagcttcctcttcttcaagaggaacatgagggaaatgagttccagtccattgtatttctatttgtataaacagttaccgactgttgtgcctaataaaatggactcgtggactaaggatagttatcttgctatttattctgttgttcttttcttaagctctaaaaatatttagttgccgaaaaactcggtaaacattttagtgctttcattgagagctgaggaaagaaagaaccatgcacgatggtcattagcgcaagcctatggagagaagggctcgtgcgaggaaagaagaaggaaggccgcctgactgcctgtcagggtctggccagaggtcaggagggtcttggtcagaagtatttgtcgagactgaagacctacaccctcgatcgcccgaagaaattgcagaagatgaacgcatacggtcttaaaacactcaccgtaatcatgctcgcccttaaaagcttagatctggccaagcaactccctagagggatgccgtccactaaggtataactacgcagacacgacgaggtgcaagaggtgttagggctagtgaagaggctaagacccgatgtggttacaacgactaactcacgaagggtcatcagatatacaactctatccatctcatgactcaagcgccagtgttgatgcgaggaccagatccattgccaacagctacttcccctacctttcaccacgtcacaaagttgatcgaagatcaacatgacgagatcatgtcgtgacaacagctgagaggagtccatcattgtcatcagcgctcgatgggtttccaatcaagcctggtatggtaatgttggtcgaagggcagtgctagggcaaacccttttaggcaaagttcgctgatagggatctctgtcattaagatgtaactacaaccctagatttacatcaaagaaagtaactcgtgccataaaaaatcagttagggaatctttaccggagtagcattcatcttactggatgtccgagtgtttgccttaaaagctgctaagtgcctcgcaatccactggaggaaacagactgcccaggagatcctaaggcacatgcacatgtcttttggagcttcccggagctcgggagacgcacacacgtcgcttttcgtgtgtgaaggatcattgggcgtacgtcttcaactctccttctcgaaaaggaaggactgattgaagtccatctcactcccagtgatactttcaccctttgcttgaatttttatgcaacttcagtcttccctcacagaagtcgaagcttgcttcataaaaattcaacatgactctcccatgcacgatgtttctcgtacgtgaaaaatcactaggggtacaacacgtctttaaccctccttcccaaaatggaagtactgcttgaagtttgtctcacggcagtgatgtttcaccgattgatcttgttaagcgaagtcatcgcttgaatttttatgtcactttagctttccctcgtcgaagccaaagcttgcttcataaaaattcaacatgactcttgcatgcatgatgtttctcgtgtgtgaaaaattactgggggtacgacacgtctttagtcctccttcctggaatggaaggactgcttgaacttgctcctagtgatgttttcactccttgatctttttaatcgaagtcatcgcttgaatttttatgtaacttcagccttccttcacaaaattcgaagcttgctttataaaaattcaatgtgact

SEQ ID NO: 236956 - DNA, 864 bp, Cannabis indica
agtaaaatcgtaaatttatgatataatgtgattatggactacattattatatagtatggttattctatctattttcaggcattttttgacaagtcgatgtggaatagtcataactgggtattttgggctgaattgggttcagagcgcaaaatacagttttggaatttatttatggaattgatatgataaatgagaaatttgaattattgtgatatataagtgtgagtgaacctttttaattgtgtatggatatatatgccttgggggcattatggctatttggtcaattaagtttattattcaacaaaatcaattcttggaaaactaaaaaccattttttgggttttcttatcccttagccgacctccctctctcaccttctccctttgataattttcatttgattgttgtggaaaggcttgaattttggtgtagcttggtgtaaattcttgtgtttgaaacttgaagataataactttgatctttttcttttactatgaattctgattttctagttttaacattgatgttttggtgttattgagattgtggatgcatgttgttgagttgaggggaaatattggtaattattgtgtgtttgagcttttgggattatgattattgcatataggttgttttggatgattttagggttgagaaatatggtttaaattctgggtttgtgctctgaattttttgggtatctcttgaaggtttgaattctttgaagtttagagttcaagcttgttgataatggtgattttgaatggcttgtttaatttatgtattttggtgttgtttagagctttggttaagctcattttcttgccaagttcttgattatatttgtgaggtttaagattt

SEQ ID NO: 236957 - DNA, 795 bp, Cannabis indica
gatgtgttggattggatcggttctaaccattgaatacattgattgattttctattagattggattggatccactcattcatttttagccatcatttaggctgaattttattaacaaaaattatatatataacaaacataatttaaaacctaattcttataataataaaatacaaatcaaacatacataataagcattagtttagtctaaactaattttcatgatgttataattaaaatataacaacacaaacacaaatccaatcctgcataattgatagtttaggtttaggctttttttagtgtgatctcatgtgtgcatattacgaataaaattaattaatatatttttaaaatataattaataaagatatttaaaaaaatataaaaatttaattggatgataattggattagttcagttcggttattcattggattgtatgtccaatctaataaccaatctgatccaattgtattttcaaaatttacatctgatccgatctaattataattggatatctgattctattagatcagttgtgattggatcgaccagttgtacttgaattggatgactttctacacacccaagtctccactacttgtacctgttgtactcgttgtacaaccaattcttctttttaggatttgacagaggcgtgctagccttaacaaacttatccttagccatatatccctttggtatctttcccaccatagcctatacttgtaactacgaaacaatacttggaaatttgactaagtattgggcccataaaaatatctaagccccaa

SEQ ID NO: 236958 - DNA, 2873 bp, Cannabis indica
atcgcagaactcacttcactacgaatcgtctgataaaagtaataataaatttgaatttaataaagtggaaatgatgacgatgttttcgaatttgacattcaacatcataatgagaatggtggcgggaaagcggtactggggcgatgacgtcagcgacgaggaagaggcgaaaaagtttaggaaacttaaggacgaggtgatcccggaaagtggggtggttaatcctttggaatttttaccaggatgtttgagttggattggaattggatatgtttggaagatgaatagggttgctaagagaatggatggtttcttgcaagggcttattgatgagcgtaggagtataaaaggagacactaccatgattgatcatatgcttgctttgcaagtttctcaacctcaatattacactgatgaaattatcaaaggatatattctggttagtaatttttcttaatttttttaactaattatttacttatatttaggtctaataataatatgtatgattatttgttatgtggggtatatatttttgcttttatgtgtggggagtattttttttatttgaatgcatatattattgttgggaccactttatcactttttaattcaatttttttctgtaaataagttattctattgctcaaaataaatatgatatgttacaattatttatcatcattttatactttttaaattttcttaaataatttatcatataaaaaatttgacattacatctttgatcttttgtatgtgtaatatttagattttatattttgaatgcacattattattatttaaatatataaattttgatacatattaactaatcatagtctaatatactattctttttctatttaggtactattatttgctgcgacaggcacttcatcagcgacattagaatgggcattgactaatttactcaacaatcctcatgttttggaaaaagctaaagctgaaattgatgaacaaattggtgaacataaattgatagaagaacaagatctttccaaattaccatacctccaaaatattattcatgagacgttacgcttgtttccagcggctccaatgctcatacctcattattcctccgaagattgtattgttgagggatatgacattccacgcaatacaattgtaatgatcaatgtttgggctatacatagagacccgaaactatgggaagatcctgagagttttaaaccagagagatttgagaatagtgaaggtgttaacaacattaacttgcttatgccatttgggttgggaagaagatcttgccctgggaatggcatggcaaaccgtgtactcggtttgactttggggtctttgattcagtgttttgaatggaaaagagtgagtgaagaaaaaatagatatgactgaaggaaaaggggttagtgttccgaaagctatacctttggaagctatgtgcaaagctcgccctattatgaactcaattctctaaaaatcttcttgaacaaaaattaatatatatttaattatattatagggtagattttgttttgggtgtgagagtgtgctttaaattttttttttgagttacattgtttatttagactatttaatatttttgttgaacttggtgtatgtagtgattatattataatatatatattattatatagttaatttatatgtgtcatatatatttaagttatatttaaccttatggtgtcaataattatatcatctacgataacatctccatctccaatgccaattttaagttggctatatttttacaatgatatctattggtatgaaaagaaaaattgtaactaaatacagcgccaaacactataaaagattaaaaaaagaagaaaggaatacatacttattcctcctattccatacaactatgtaaatattttttaagggttaaattaaaagaatagatcatcattataatgagaagtagagatagaagtattccaacataaatacatatttgtctagtatagatattacagcctcaaactcaatcacctgtttcttggacaaacaatttgttcaaaaaggatttcaaaatctgattgtaagggtctagtagagaagatgatagctagaaataagacctggagttctaaaatttttttatgttagaggaatggttcttatcgactctattttgctatctattaatttttattggtctcaatattctatcttgtctaaagctgtggtgtaaaacattataaggctatgtcttcgacacccaaaccacctttcttcttagatttacaaatatcatcccaagcagggacggacccattcacaataatgtgggggctatagccctcactaacaaaaatattgtcttttaaaaaattaaatgtaaatttttcaatttaataattataaaccaaaatagtaaaatagcccccataaaattagataaatttaataagagtgattataatgtagttataaatatttttttatgataaataagcccccacaaaataaaaattctgggtccgtcactgatcccaaccaatatttctagcccttcgggttaatgagatagtgcatctcaaaaagcaggactgatgagactaccaggtccctttaacactactacaaataacctcttttatgtccaacaaaaaaaagtgttggacatgaaaaatatttaggaagatttctagtccaatatttatagactataaaaaaataaatatcatgcccattaatattggagtagaaaaataggtgggacataatatgtttaaaattaagagtactttttttttttttttggagatttctagtccaacattaatggactagaaaaaaaaataatatgtcgaataattaactcattcatatggagtgg

SEQ ID NO: 236959 - DNA, 882 bp, Cannabis indica
ttctattttgttaaatgaccctgaactgattttttgtcataataaaacttaataataatataatctagagatgttatgacaaaactgattacattttctgtatttgttcatgttagaaattgtcttaaaattggttatgttaaaaaataaaactgttaaaaattgagtttagggtcatatttttactattttagaaaatacagggtctattttgtcatttaacaaaacagatgatccaattgataacttttgcaaaatacatagtccaaaatggtatttaccaaaatatttaaatgtataaaattattaaattacataaaaattaaaatattacacactatttattattcaatatattaattattatacaaaaatacaacttaaaaaattataaaaatgacaataattatactaaaaaatacaaacacatattataaaatataaaatattaataaattaaacgcgtccctgttggggcggggagtggtatccccatccccgccccatttaatatttggggacaaaaatgttctccgtccccaccccgttcctcatttagacggaaaatctccgcctcattaagagcaggtccctgcggggtgatctctatagggaaaatgtgcatccctagcaagaagtaaccgcccaatattttgtagagaagaagagtcttccaaatattgagaattttaatttttatctttttttgtaattacaaaaatataattttttctgaaataattattttgtaggaaaaattaaaagaaaataaaaaaatatgaacaaaacaatatgagataacaatcaactagttattgacatttcaataatcagtcgattgtcttttattctgctcatgctttgtctactcttgttatttct

SEQ ID NO: 236960 - DNA, 1108 bp, Cannabis indica
acaagctgaagtcatctggtccataacaccacaaggagctccaacaatatgattctccacctaatcaccaatttgaaagtataaaaaagactggaattcgagacaatctcaatagaaatctgggaattaagattggaaagaacactcttttcaagtcataccttttggcaaagcaaagcaagatctcttggattaatagttaatcctgcaatgcagagagtcggtttaaataatttgtctatgcaaaatagtctattttgacaattagagtttatgctaaaaatgaagaaaaaagcaaatttgaaacatttgaaaacactcttatccaaattttataagaacaagcataaactaaaaatacatcccatacatctatacaactgatatgtactttaaatacaacaaaactatgaaattggaaaatggaaaataataaagctaccatgagaagcagctatggcagacatggtagcgacctcaacagaagcagaagaagatactcctttaccttcagggacactagatgctacctgtacacaaaatttgaatattcagaaatgggctttaaagaaatgcagttgaaatgacaccagttgcaaaaaaccagaataatgaaaaattaaaagtgatggtaagaaagacataccaaaatacttatactatcctcaaagcgcacacctaattctgtcattaaaaccagaatagcacctgcaacataagctgcccacctaagagcacacaaaccacgtaatgtaagtaggatattcaggcaaagatacagacaggcatattaaacaaagaagattggtatacttttgggaaggatccttagcaaagaatttatttgccttctcatatgatattggcttttctccatccataaaatcagatagatccatgtcaaaagttggaccacgattgctcaattctgaaccatatgacacctaccaaaatagcataacataacaagctcacattatcacattatgaattcaataaattctattcattcagccattgcctatgaaaactagaagagaaaaccaagttgaacttacaatttgcaagacaggtgtgaaactatttccttcagcttgttgtcgggcct

SEQ ID NO: 236961 - DNA, 549 bp, Cannabis indica
gtgtgttgtttattctagttgggggatcgtaatgagagagttagtaaagaaaacgttttgagtttccaagatttgcttcttttttattataatgtcatgtctcataaatttaggctgtttggtctgaccagtctctccaagactgcatataattatattattcttattattatttttactattaggctttattggtattattattattattattattatattatataagataaagcgttgtggtaacaaagttttgttagtaatggtatttggggtttggtttcaatgattttgcttgtataccaaacttttcaaacaattctcttcttctttctttctacccttatggatgattggttctctgtctactattcaattgtagatttcatatatatgtatatgtatatatatcttctagtcaattttgttttatgaggaagaacactagtcaagtcaaggtgtatgtactcgaaaggcaagccaattattttggacaagtttttttttttcttttatgttgaaatcaatgattacatttttctataagtg

SEQ ID NO: 236962 - DNA, 979 bp, Cannabis indica
acttgtcttttgcggggagattggtcttgattaaatcagtccttctctccatccatatctattggtgccaaattatgttccttcctaagcaaataattaaggagctcgaagcaatatgtaggagcttcttatggacagggaaaagtttgatgaatggagcaggggctgtagcttgggaaaatgtgtgctgcccaaagaaagttgggggtctagggctgatgtatattcctcactggaatgcagcagccatggtgaaacatgtgtgagcaattgaaaaaaagaaggatcatttgtggatgaaatgggttcatagtgtgtatattaagcatcaatcttggtgggagtacaaagctcctttgaatggaagttggtattggaggaaaatggttgagcttaaagacaaaatcaaaaactatgtacaacatagtgtgttctcagcaaacgattacaaaatttcagagggccaaacttggtttgcacaagagtttgaaaaagtaccatggagcaatgaagtgtggtctagattgaatacaccgaagcatagttttttactatggctagctatgatgaataggctcaaaaccaatgatcagttactcaagcacggatcgattgacatagacacatgcctcctctgcaactcggctgcagaaacagcatagcatttattttttggatgtgtgttttgctgcagaatgtattgaacagatgaaggcctgatttgggtggaatacaagagatagttcacttcagaacatcatgagaagggtgagaaaagcaagttgttccagattcaaaaagagagtactggctgctggtttagcagcccttgtatatctgctttggaagactcgaaatgagcagtagtgggaaggaaaaaaatctggtgtagctgatgtgattcaacaagtaaagcggtgtgtaaagagtagagtagtgtctatatatgacctaaaaagattaaacaaaaagatagaga

SEQ ID NO: 236963 - DNA, 531 bp, Cannabis indica
ttacaatactcctctgcagcctcactaaacataaaatgagaattatcgtcgtaaataattctagtctcgacatcttattacaaatcgacttgtttattaacgataaattagattatatttacatagaatttaagtacaaatctaatccgcttatatatataagttttaaccaaattaattactaacaaatttaaatttgttatttaagtgtttaaattttacatatacaaattttatgattttttatacattttttgtatttttttttcaaaaagattatttaatgaaataattgaagaaaggttgaaaaatatgaaaaaatcaggtaagataataggtacacttataataaccaggggagtaaccagtcacttatgctgttttttttttaacttttttataaatttcttcaataaaataataactatactcaaggttgatcatgaaacttaagtaattgtgggtctttggaattaaaaataggacaattgaatttgaaccccattaaaatgattatgatattttcaaaaa

SEQ ID NO: 236964 - DNA, 1248 bp, Cannabis indica
atacacacaatgaacccatttaatccatagattttcctctttctttgcacccgcccaaacatatttaaacatagctgcaatattccattcaacaactgatttgaaatccaaaccaccaactgatttggaaaggcagatcttgctccaagctacagcagcaacccctgtcaaatgttgcttgccattccataaaaagcctttacatatagcttcaatttccttaataatgctttttggaagtaccattatttgacttcaatatgtatggatttccatcagaactgaattgataagcataaccctaccagcaaaagataaatttctagagccccatgttcgaatcttggcaaccatcttttcagctagaatagagcattcctttgttgaagtcttctttggacatataggaatgcccaagtatttaaatggaacatcatgttttgtaaatccagaagcatccaaaattctttggatatctgtatcacacatgttattacaaaaaacaacagtcttattggggttaggcttcaaacctgatgtgtgtgaaaatagctcatgaccctgcaacatgtagtagatgctcttatagtctccactacagaacaacaaaacatcatttgcaaaactgagatgattgagcttcaactctccaaatctctcatggaatttgaactccaatttcaactccactttcttcataatccttgacagatattccattcccagtacaaaaaggagaggagacattgggtcaccttgtctcagacctctctttgcctcaaacaatccatgcatggaaccattaaacattagagagaatcttggagtcttgacacagaccattattaacttgacaaagctgactggaaaattaaaagccataagcatttcttcaatgaaaacccattccactgcatcatatgctttttgcaagtcccacttgatcatgcaattagacttagctgactttcttccataatgtcttataagatcctgacagaccattatattatggccaatgaatctcccttgaacaaagccactttgattctatgaaaccaaatcaggcagcactattttgagccttgagcatatcaactttgtagcagctttatacaacacattagaacatgctataggtctttgatctttgaatgagtttgggcacttacttttaggaataagtgtcaaaacagcactgtttatctctcttaaaatctttcctgaatgcaaaaaagaggttatggc

SEQ ID NO: 236965 - DNA, 1376 bp, Cannabis indica
ttaatcacataatcttgattactttccactgtgccgacgacacaataaacaagaatataaatgtgatatagttttggatgaatttataaattaaacaaacatagaaatgataacatgaacaaaatgacacacaataagtgatgaaaatacttctgtttctttattgatatttaaaagataaagattacattgaaatagagttttatttagggcataaaacccaacaccttcaaccaattgtttttgccacatgtgatgaagatatggaagttggctctcttaccaatgttatatagcagcacaatgaaagcctacaggcttttattaagaggatgatggaggcagctgctaaaactaatgccagcgatgcatgatagttatggccttccaatttagattggctattgagtctttgttatgaggagagatgcagagaaagagagccaaaactttgagagagtttatggcaaaggctcaaggtatcatcaaccttgaggatgcctacataaaagctgttggagttcctttagcaccaacaccttccaggactaatcccaactttacatcccatgttcgtgctctagccttaatacttccgaaactcacgctttccccaactgtctatggtcccactacctccggtcttgcccctacacatacccatctttctgagtatggagtatcacaaaccgagtgtagtgtagctcctagaaaggcaaaattgaggtccttgaatccactataagcccttctcaaaacaagagaagaaggaagagccataatcgcaatagctcttcaaagaagccaaggaaggagtatgatccaaagtacacagagcatacttgtctagtggacactcgagaaaacatgtacaaagcaacctacaatatgttccatcatagaatacctccacaaatgtcacacggaggaaggaatagacgtgatcaaaacaaagaatgtgagtatcacggggaaaaaggtcacactagtaatgagtgtgaatatttgaaagacgagattgaaacattagtccgagtgggacatctaggacaatgggtctgaattctaatcatttatcctggacagggggttgttcacgagcacatgatcgttcccgaacagcaaaatactgtaaatcctctacaggggtagggcatcctcaagcacccaaaacatcattacctacattccgtgcttcaccagtgccagctggggtagcattacttgcatcgggacatggaacctcataccctctcgaactcgccccaccgctagtggacaagcataaggccaaaatctcgtgtggaccccatcttgtcggtagcactagaaacttatagaaaagatacctaagataggtagaagaacaagaagtg

SEQ ID NO: 236966 - DNA, 555 bp, Cannabis indica
tatgccgctatttacccttaaaatattgtgaagtaatggaggtgatatttatatatccaataacaattataagcaacagaattgaaaattataaagttaatttcataatttaattatataaagtctaaaactttaatgttgaaattctcataatttactcaaccatttcacacataatatatcaacataaagagaattcaatgaggaatgaaactcctaaagttttaagattcaataacaaaaaattttacaaataataattacaaaataaatatgtaattagaaataattaacctatacatatcgaatatcgattgtaacataaattataggtcctaaatcatatataatagttaatttgataccacatgttagaaaattaataatctcaagatacaaatttacaaataatctagaacacaataataattattagataattaagtatgcatacttgatccataaaaattattttaatttgatggtacaatactatcaactaagtctttttctctaaatttctaaatcagaagcagttttattttatctgattat

SEQ ID NO: 236967 - DNA, 1173 bp, Cannabis indica
aatcacgcaccaagccatcaatccttgcggcaagtctattagagagcttaggaatttgcatcacatacataggcatggacagtcccacaaacttgatcagagtagcacgcctcgctttagagagggttttagccttccaaccctgcaattttgaggtaagattctctacaacaaagttgaaattagcatccttctgtctagagcggaataaggggagccttagatatttaacgtttccttccgaccctccaattcccgaaacatctcgaatcccttgtttcaattccataggggtaattctactgaaaatatatagaagatttagtccaagaacaaaacttctgaaggcaatcccagtagccttttgcttcaaccagagaggccctacccaccaagattaggtcatctgcaaaaaaatatgtggggcagagtagggccacctcgggaaagcttaatgcccccgatactatcattacccatggctctatcaagaagtctcgacaaaatctcagtcacccaaataaaaaggcaacgtgataaaaggtctccctgacggagtccacaagtcggagaaatgttcccaacttgaccaccattaagacacacattcagagacatagttgaaatgcattgggaaacccagttacggaataactctggcaccccatagcaataccatggtcaataaactgtcagcttatcttatcataggctttcatcagatcaattttaattgcaaacaagccttctttgcccttcttcctgttgaaggaatgaatgatttcttgtataatcacaatgttaacatggatacttctgccagggacaaaagcagcatgtgtaggacaaataagccgcgagagaataattttaatcatgtttgcaatgactttaaaaatgaccttataggatacattgcaaagggatataggcctctaatggttcgttctcttcacgttctgaatctttggatgagcactaaattagtagcatttacctctgtgcatcgttccaaaggtgaagaaatcaaagaccgcttcacaaaaatcatctctcaccaaatcccaataatgcttttaattttaaaaactaaaaacatctcataaaagataagccaaacaagatcatgatttgtatagaaggttctcttttcttgttacaatcaaatataaa

SEQ ID NO: 236968 - DNA, 2787 bp, Cannabis indica
tatatttgtgaaataattccaataaataactcacccagatcccattaagcagattatccaaacattgaaggagtattaaactagacaaattcatacccctcctcataattaggggtttctttaaaaggtaatagaagaaacaaccgctatgcacttggtaaaaaaagagaagaaaggaaaggaaaattggtgtggtgtggcacagaaagaaacagctacgtatatatttggttagaataatcctaattcgttatatattttaatataaataaatcattagagttttcctttctgtttttggtttttcagaaaagtcagaagttttgatttcatatttgtcggtttgatttggagtctgtattgaccttctcaaaccaaaccataataaccatggtgatggagaccatgtcccactcttccaccttccttcttcccacaatcccgccctccgtcgacccacgccctcctctatcctacgcactcatcgtccttaaccagcgccttcccaaatttgctcccctcttatgggagcacggtacttttcctgaactcttgcttctttttcttcttctcttgcattttattaatgggtttattatggctgtgtgcgtgtttgtatagagcagcaaagcttcgtttatgcgctgatggaggtgcgaaccgcctttatgatgatttccctctcttcttccctcaccaatgtccttccgaagttcgaaacaggtctgctcctctttttcttattctttgaatgaaatacttgtttctggttttgttgctgctaaatctactgtgatttttgttgatggaattggtgaattccttcactttccttttatttttttgcctcatgatcacgcttttctttcccccccgaatattttgaatttcttttgttcttatgattcgtttgattggaggtcgcctacctcttttcagtggtccaagtttggatatttatgagtggaagtggaatatataagggggaactttacacggctttttttttttatttattttctttataagattcatatcccatggaatttattagttttattttattttttgtttttattattgtcaaatttgaaaagtggatggtttattgtttggagtcaaaagcctgcatgattactgttcatttacttgttcaatcattgaagaagctaaagctgtacggtttaagtctaacataatagttctgagattgatactttttcatagtatgtgggggtagtggtcttgtttggatcagattagtgttccattctgtgattacatttttcgattgttggtgttggatattaatatttctcctaatttgctctcataagatatctatttgataaagaatgaactgtgcactaatttcctagagttgaaccaggtacaagcctgatgtaattaaaggggatatggattcagtccgaggtgatgtcctagatttttataagaacatggtaagtaagtgtttatttaattttttgggacattgcaattatgctttggaaggccattaacttagcactgtttgatttaaattttgtatcttttgaatatggtccatggccttctttttggcatttgctgagtgctgtgttaaaccttacttagaatatctgtgtttgatttctgaattcaggggaccaagatattaaataaatctgaagaccaagacactacagatctacataagtgtgttacatatattaaagactccgcactgggccaagagaagtctaatgtaagttatttaatttattgttatttcctttcttatgctttctatatagtaagcgttagcttcatgtaattcttttgggtactttagtcaaaaaggcattcccatgctttttcttctctttttcaaatagttgtattgttccattaaatttcattctgacaggatgacaattgcttgtgttgtactgaagaggctcacctttttcaagttttggcctagtttattataatatcatcataatcactttcttctttatcatgtcagctatgcatttcagttgctggagcacttggtggacggtttgatcatgagatggggaacattaatgttttatacaggttttcaaccattcggatagttcttttgtctgatgattgcctcattcaccttcttccaagaactcaccaacatgagatacacattcagtcttcagttgaaggcccacattgtggactcattccaattgggatgccgtctggaatgactacaacttctgggctcgagtgggatctgagtacgtatttttactaacatgtccactatggatgcttacatgtattgctcaccctgttttagaaaccattgatttcttgcaatttaatgactggttggtgcatgtcatatctatgagttttgcttaagatatgaccaaattaaactaggtaaacttaataattctgcttgttttgttgttgcctattaatcttgaaaaacagaagcaatatgatgcacattttctgactcttctctttgaccatttcagatgatacggaaatgaggttcggtggtttggtgagcacttcaaaccttgttaaacaggataaaataaccgttcaatccgattcggatcttttgtggaccatatctcttaaaaagaagtaatgttgcttgcttgatttgaggcgcataacacttgatcacaaacttgtctttcatttcaagggctcactacaatcttatctgcgtaagggcaactttcatacggttcaaattcggatctttctttcatttccattggattcaatattcatttgaatgta

SEQ ID NO: 236969 - DNA, 5577 bp, Cannabis indica
cccctaaagtggaggcataggctaaacaaccaaaggctctaagatgattgtagttagggactttagaatttaggatttcaaaaggggacttgtgtttgagatttggagtaggtgttctatttatgatataagtggcagtattgacacattctccccaataggataaagggatgtgagattgaaaaaggagtgccctagcaacattcaacaggtgttgatgttttctctcaacaacagagttttgttgaggggtttggacacaagaatggtgatgaataataccaagagaactaaataattcagggaactgaagttccttggcattattagatatgatccctttaatattggcattatattgggtattggcaagcttaataaaagctggtatgacatgttgtgcatcagatttgtttttgatgagatgcacccaagtatacctagagcaatcatccacaatagtaatgaaatatctgaatccttcaatagtagacacatgatagggaccccaaatgtctatatgaatcaaatcaaaacatttcttagcaatattacgattggacacaaaaggcaacttcttttgcttagcaaaatgacaaatagcacaatgaaaatcagaacagccagagtattgaaaattcagatatttattcaaagaatgagtctttacacaagaagcatgcccaagtctattgaaaatttagatatttattcaaagaatgagtctttacacaagaagcatgcccaagtctataatgccatgtagtatcacaactaattttcgaattagaaatggacaaaacagtaggggaaatggtcataacagtaggtaaagcattgtgtctcaagaggtagagttgtccaacacgttcacccatcccaatcacttgattcttggaaatttcctgaatcacacatttgtttggaagaaaaaaaaaggaacagttagatgtgttggaaagagatgtaaaagaaagtagattacaatggaacttagggacacaaagaacatttttaagaacaagattagataggtgtaaagttccaacaaaagaaacaacaacatttctaccatcaggtaatccaacattactgattttaatgttattttgcacgctgtgaaataaggtagggtcacagcaaacatggtgagtggccccgtgtctattatccaagtagatttaggaacacaaaaattattaccagaaatattggagacaatgggctgatcaacaggctgactcgaggtgctggtttcttgcactttctgagccaacatagctatgagtttctagcattgggaagaaaaatcatgttctccaagaggtccatcttaactgtcaatgtgcccagaaaaatttgcagtaggacgatcatgttgttgagaggatcgatcacgttgctgattctgctgattgcttggtttattagggagatctttgggactttaccatgtaaacgatgccatggtggatatccatgtaatctgtagcactttgctgcagtgtgcccaacaattccacaatgtgagcatgtgggttttccattggtctggctatttcctcctcgatttccttgcgtattcccagcaaattggcctgcattttcattagaagatttagtaacttcagattgatgattagtaatacctctttgtctttcttcttgaatgactgaggcataggccttgttaacatttggaaggggatcttggaggaggatttgagatcttgcactggagtatgactcattccgaccaattaagaattcaagaaccttgtcttcatcttggtaagcctggatagtcttcatagcaccacaagaacacaggggttgtggtctatattcttgtaaaagatcccaaaggcttttgagacgagtgtaatatgaggtgacatcattggaaccttgagtcagcagctgcattaatcttttaacctcagagattctcggggcattcctttgttgaaatctctcctgtagttcagaccagatgcaagaggcatcttccatgtacattatgctttcggcaatggagctcgagatagagtgcaagatccacgaaattaccatgttgttacatcttgtccacgcttcatagtcttcatcttcttcatctagtgcaggaagcttcccattaataaacttcaccttgttcctggcaagcaaagcaaccatcatcgaacgacgccaagaactgtaattcttagcagctccagtaagaatcttagggacgagattaacagacggattatcaccattagtcaagaaatacggactgcgaggatcatcagcagagcttcgaacactctgatcaagaacagaaaaacgattcgaatcaccattgttggtggtactgcgagtctgagttccacctcctctggccatgatcgaagaacgagcaacaagcggaagaacagaagagcacactcagtcgagtggctctgataccattttagcagtaagaagatgaagaagaaagaatgtatttaattgattggaaaagtggtacaagagaggatatatatacagacacaaaacagagcaaacagagtcggttagagtcggttaggacccctaactaactcaaacaaaaataacagctctctaactaatctcagtacaagaaacacgtgtacactacaccaatctaataattttgcataaagtaatatttcaaagggaaaaagaagatcaagaataatacccttgtctatttgttcttcgccaacaccccatcgcttcattgcaagtacactagttaaagtagataaaagagcatctttcataagcaagggatgacgatgaggaagaccccatgaaccgtcagagtgctgattctctagtaaccaatttacacattgaggaaagaaagggtgatgcccagaatttgaagggatcattgccacccaggcagtgtcatatgacgagacagagagttcaacattattgaacatcttctttattctctctttggtctcctcaaacttctgctaaaaatcaaattcataatgttcaacatcttcttcatacaaatatgactataggatattaaaaacgtgaaggttatcgtaccaaaacagctatgttgcttttccttgcaccatttagtcttggtatgggagaagctgttgataaaaaatcctcagtgaagacaagattgaataattcaaacagattgtgtccaacatgtgaatgtaaagaatccaataatccaattaagctctagctcagtgtgtttttgacttttgcagggcagagtgaaaaaaaagagctatacctgatgaggaagaagaagaggagcacctaatgttggaatgcaatgaatgagacatgattgttgtctcagaatgagtgagtgttgcagtcactataaaaataagtgaaaataattaaagcaattggctatttagagtttatcaatctgcagaatactctccctcgagaaatgaaaatcaaacaccagttccagttcacagcataaacaaataaatgaataagatcttcctgtgacactcaataatttaccgtaagagtcatcaaaaactgggagcacctgaaaacacgtaaaagagttttgtgggtctttgagtactaccaatcagtgtacccagtaattcacatatttatgcgaaacagcaaggactgtctctaacaaaaggccaatcatattcataactatcccagaaagcaaacttctgattgtgacattttctcgaacagcgccaaatacattcgtgaaactaaaatctaaggaatatatcaagcacctaatagattcaaatagtataaaggaaaagggggttcgatctttagagttatttatctaatatgaaggagtgaaaatcgagaaaaagaaataactggatttttgagacttaccaccttacgagtcaaaggaacagcaagcaaccctctgttgcggtatgctcttttaacctacttctcactacaaaggatcttgacaataaaattttcacactatagtattacggttacaaatgaatcacaacacatatttgatatatgcgcatatgcaatgcatggtttgtattttgaaattgaaataaagatagtcgtttcaaaacaaaattcatgatagttcatacagaacagattgttatctatatggaaacatttatcaatcaagaagccgatgacaaaaatgtacatgatggtctgcgtgcgtattttaaccccgtgtgtgacaaggacaagcaaacagacatatattctatagtctataataatgagaatttgtggtggagtacgcccatgtttggcccacctcacatgcttaactatacacctgaatgctatttttgtttaaggatgtcgttatctttagtcttcatattttttccttttttgggaaattttatttttaagagtaaatattattttttaccacgtgttttgcaaagattattaattagattctttattttgttaaataaccaaatagacctgatattttcaaaaatagtaaaaataggacatttttaatttttatttttttttaatataacctactttaagataatttctaacacgaacagatgcagaagatgtaataagttttactataaaatctctaaatctttttattattaagttttattttgacaaaaaatcagttcaagatcttatttgtacaatttaaaaaaatacagggtccattttgtcatttaacaaaacagatggtccaattagtaacttttgcaaaacacggggtccaaaatagtatttaccagagatttttttttttttttgcaaagtatttactcgattttaatgtctaaaagggaaattaaaaaaaaaaaataacacaaagatgaaccccatgacaaattaacacgctacgcaacctaccccgattgacgacccaacctccacccacgactaccacccacaactgaataaataaccaccgtcacctatttcgaccttgtaggaaatcatttaggcgatttcaaatttggaaatcccatttcaaaacccttcaagcgagtttgaaaccccaatccgacagcatgtcaaaggtgagttttttctagttatttctttatttttttatttgtatggatttacttagtgttaggttttaatcttagggaaattttattatgtatctgtggaatgtaggttttgcttagtgttagatttttcactttgaaaattgattatgtgaaaatatagtatagtcattgtaatccgtatttttggatgcctgatatgtggcagtcacggaagaatgccaccttggatgatccatgattagtatatgcttgccacttagagatgttgaaggttattatattccgggagccaatcaaaggtcctcagtgttagcgagtacggatagtgctccaagacttactatctatccacaattgggaaggatcagagttactcggaccttcaagtattctagagaggcagtaggacctgggaaggctttggctcgttgatcccggagcttatttgacagtaccctattcggaacccggaccgacggttacttatcctctgacacgaatcagatcttatctgttgggaattattttaccaggatct

SEQ ID NO: 236970 - DNA, 3755 bp, Cannabis indica
ctaagcgagggttgagacaagggaatcccatgtcccaacttctttttgtcttaggcatggagtatctttctcgaattttgaagaaaattgggaagaggcaagactttgttttccatgaacgttgtagagatttagagctgaatcatttgagttttgcagacaatgtgcttctgtttcgcaatggagacttcaaaagcatttatcttatgctggaagggctcaaattattctctcatacctcaggtttatttcctaatctctctaaaactgccttttactgcaacaacatgaatgataatgatattaaaagagtccttgatgcttcgagctttcaaaggcaggatcttccatttaaatacttaggaatcccaatttgtccaaagaggatttcatcagctgattgtggtactttaattgaaaaaatggtgactaggataagatcttagagttcgcacaatctctcctttgcagggagagttgttctcatcaattctgtattgatgtctatcaattcttattagtgtcaaatcatgattcttccaaagaaagttgtgaatgagatagaatctatttgtaaaagttttttgtggaatggaagccatactctcttaggttcagcagttgttgcttggtgctctgtttgtctacctaaatcggcttgaggtctaggcttcaagagtatctcagattggaatctagcagccatgttcaaatatgtttgggccattacaaaaaaagaagacaacttatgagtgaaatgggtacacaatgtgtacattaaggatgaaaattggtggtcctatagggccactccaacagccagttggtattggcacaagctggtaatcataaaagataaggtagtaagtaattttgatgtatcccaggtacagaatggcagatacaaagtgacagagggatataaggctattcggcctattgctaacacaggtgattgggattcatttgtttggagcagtatatggagcttgagaactctaaatgcttactttgcaacactgaagataagactgtgcctcacttattttttgagtgttccttctctttagaatgcttggaaaaggtgaaatcttggctgaattggggaatgacagctactacattggaaagaataataaggtggctaaggagggcaaagattagcaaggtaaagaagtcaattttagttgttgtcatggccgctcttgtttacgaaatatgacgtacaagaaataatgttttttggcagttttccaatacaaatgtagagattgtaattgtaaaagtgaaaaacatagtgaaaaaaagaattacatgtatatggccaaaaaaagtaaccaaaagtgagaaagaatggtttgataccttgtaaagttttatagatatttagattctcttacttagagaatgctattaggttgtataaatcatgtttgagaaatacacaaacttgattcatcaaaaaaatatatatataatttttttaattattaattatttatttaatcaactaagattataataatgattataatataagagtaaaattttgttataaaactttgtaaaatctgttattcaattaatattatatataattaattaataataataaacttttatttgattatatatgaaataataagaaagtaattagatccaatgtgatctgaattaggttttgagtggaatttaatctcaactactcaaaataatttattctattaatttaattaaataaatattttaacttaaacctaattgaatacaattgactcattcttctcttctctttcttgagtgaattttgaaattgtgtatagacaatagatttcaaaatttcatcttctcttcctcatagaattcaaccatcatcttatccttagtgattgagaaatttcttacactagtcatgtgtgatacctaaggtaatatgaaagactgtgatgaaaattacacatatttagagaaaaaaaaaatatccatattaatcacttaataattccttgctacaaaaagaaatcaaagattagagtaattgaataaaaagagttattattttacagtgtcactgctataagtatactcatatttaaggtgtttgtattcggttttacaaaaatatattttgaattgttataattattaattaataatcaatatacataatagtaaataaaattctgataaaataagatccaataaatctatcaaagcattagaaattgaaagttcattgctcagaccttctcacgaggaagaagtaagagtatttggtacaacacgacagtgtttcagtgttttcctcatagactatgactcatggtttctctaaaaagtaatacttagtggctgattatctttctcaatatcaaacaagcctttttgaatatgagaagtaattaaagtcactgtggaagaagatgatagaaaacctcgagatgttggcaaagtcatagtttcatgttaggttttaattagtactatttttaggttgactttagtgtattttaaaatagtttcactcttgttttgtgcaattttacgcttgtggtagttgatattttgtaggtttagttttgaagaaaaatagaaaaatattggaaaaaaatatgagaaaaaagtcaaatgaatcaactctcgggacaagagcaccatgaaattcattcaagaaaaaaatccaaaagttctagtgcgtttggagctcttaagacaaacaaatttaaaataatggagtaccgcctcaacactatatttccatgtcatagcattaaaaggttaaaatttagtagagaggatcatttttgactaagatatgggcgcgcctcaacacaagagcttagtgttgaggcagagattcgttagaagcttgctacctcattttttctatttaatgccacaacataggccgtgacactaagggcttaatgtgtaggcccgtcctttgaattcgaaaaagtagatatttttctatctttttatcttttttttggctataaaaatgagtagattttcatacttttgatcaagcaattagagagaaacaaagtgactgagaaggcttttcaacagaatttttcaataatttcttcttctctattttcttctcatgtacttaattgatatgtatcgaattattatgatgaataacagtagctaaacagttattagggtattgatggatattgtttgatatttatttatggttttaatatgagttgattcttcttcaattttctatgtgttctattttattcgtacttatttcttttaattatttggccatcaattaattatttatgattttgatacgagatctcaaaagtgagtatcaattatgctatagtgaaataggaataaatttcgatacaggacgagagtaccaatgtggtttggatagcttatatggtttttgtatttaatgcctattaaatattttaattaatcacaaaagtagaaaatttgcatgtaattgagatttatatatctgagaagactataaattacttgagtaaacctactattgcatagaaattggtaacatgaattgaattaaattagggcataataaatagataaaattgaaatcaataatcctagttctaaccattgttaattcacacattaatttacttgctttctatttttattcttttaagttttaatttctttacacttttgatatagcaaaatcaaagtaaaagtttaatcttaacgtatttaactacaatccttgtaggatcgacctcactctt

SEQ ID NO: 236971 - DNA, 1859 bp, Cannabis indica
cttttttttttggatcttttactctgaaaccttctcctagaaaattactaaaaggaaaccaagaacaccacattgattccttcatcttgttcattgagtccaccatactcaggcgacgccagacttcaaaataccattgatatataccttttttcacaaattattggtttattgttcccaagaactttacaacttttaatttagatcagatttatgaatatcaagcctcccatgagccttatattcataaatcttgactaagatttcttgttgtaattttatccacacactcttgagaacataactagtgtgatctaatcaataaaactacaagtagacgtagccccattaccatcgcgacatgagggatgaactactataaatccttattgtctatttaatttttgcggttttattagtcagattaattcactgtggtcctctttaattttacgatcttcttagatcagttgacaaaaaaccgcggcaacagtttggtactttcattgagagcatcgtggtgaaaatctaaatggttttccccttggagaactcatcagtttactttttctctacaacaatggtgtttggtacaagaaggaccaattatgaggaggatactgaagtcccaagagaaattaatcaacctcaaagtgaaggaacctttgtccctccacaaccacatggagagggaacttctaggtgccaggagaagcatcccatgccacctataccagaagatgagggacaagtctaagattgtgagagttcctcatctccatctagggagcgcccaccggtcaggtccatacatgtccatgaagtgttccaagaaaatgacactttgcgcgcccggtcggcagagagtctgtaccgcaatagagagctccaagagcaagcccaaaggcatggagaccaaccccatgtaccaataaatccttctccacccaggagaaaaagggggcgcccaaggagagaagatgtcccttgatccaacaaggaggggggaccaccaacctttaccaaatattgaagcccatgcaagacatgcacaaaaaacccacgtaccattacatggagatggttatgaaactcatgggacccaaactgttcctcctaactatgagaataataacatgggtggagaggaaaggagagccaatccttctccaattcgagcactactgtcgcctatcaagtaccccgatccatcaattggtaccacttcgcaagagccaaggcggtccacctcccgtggtaatgcgccacatgctcaaccacctaagaggcatagaggacatgccacggcttgcgaagatcgcgctcgttagaggctgacacatcgtgggcaaaagcaaaggacaccccaaggcgccaacctgcccaagaaaatagctatgtgtccaaatcaaacactactttgatgccatactccgagcagcccccacactctcctaatcatccacaacaacaaaggacagtgagctttgttgaggataatggttgatctgactctaaaagtcgctccattagtgttcataataatgcaccccgcaattatgaacgtcgctacaacaaccatcccccaaagatgcaagaaggcctgatttgcgagaacacctcaatcaaagacaacctgatttgagggagcatttgaataaaagacataaccaaattccaccagtggtgaataataaccataatattaatgggggacatcaaagtaacatcccccacgctgaaggacaagttaataatcataggctcaatgctttggaacaaatgatacaacaattaatggtgaccaacaactaaaattccacagggtatgattcggatgaggagcccgagccttactc

SEQ ID NO: 236972 - DNA, 963 bp, Cannabis indica
ctggaaggacttgagagaatcctcaagttccttgatcttcttttggtcggccagacactgcttttttgcttcttcctctatgcgagaaacctcggcctcagagtcattccactttttggctgaagtttccctatgatccctggtttggtgaggttcagtttctagtagtttagcttgctgagacgaccggtgatgagtaacataggagaagagagaggcctacaaggagaaggaaaatcaaagttagtactaaaactgataaaatgaggaaaagtgagaacaaggagaaagagaaattaacttgatgcaaaagttcataactccttttggcaagattcttagagctacctcgcgtgagaagatcccagtcgccgaacccaagagtcaagatattacgccaactgtcggtagcatgctgcgagccttcagttctagcctcgaggggtaggggactagaggacttgaagagaaccatctctggacgagaactagagaatttcacctggttcactaacatagtgggttgcttgtcgacattccccacaatagagacctcattctctttctctggagacttggctagttcgatggtaagctggcttgaggacttcttcttgttggccatggtcttagtccttttgggttctttggtagaacctgaggccttactagcttgggaaactctctttttagacttcttgtcgactaagggaggactcttgaatgcgttctccaattccacatccatatctgcgaggtaagagaagtacattagcacttaaacaaaataaataagtgaaaatgggaaaaaaactcccacttgagaaggttaccataatcctaacctcttctagcagttctctcattgaactaccttatcaggtcattggcctcccgattatgacaatttacttctgcgtggaaggcagggaggatgctgtcctagtcatccatccactttag

SEQ ID NO: 236973 - DNA, 2729 bp, Cannabis indica
cgttcttcacaatctccatactacaataacaatttgtgcgcttgcaagttaataaatgttaaacgtaccacttttggtacagaacacaatccacttgtccagcgagatgtagaaacttgaaagttgtacgtggatggagcatttaatgaaaattgctcgggtgcaggggtgatattgatctcgccagataagtttcactatgccctatgattccaatttgacactttagaaaatgaggttgagtatgaagccttgatagttggtttgaaaatagttgaagtgttaaaagtcaagaatcttatgtgctacaatgactcatagttaattgtaaatcaagttctaggtgaataccaggcgaagggtttaaaaatggcaaaatatttagagaaggttcggaagaactaggaaaagttcgattactttaaagttgagtaaatcccaagagaacataactcaattgttgacgccttggcaaaactggcttcgcaaaatgaacttgataacttaaattgtactggtggaagtgttaagcaagccaagtatatgtgaaaaggaagaagtagagatgattgacgcctcgccttcatggatgatgcccatagttaactatctactcaacggacaacttccagtagacaaaaacgagacacgaaaactcttgtattcaatacctcgctacacgatagtagaaggcaaattgtataagaagggttattcaatgccgctcctacggcgtgtactccccacagaagctagcgagagaatcaaagagatccatgaaggcttttgtggagaccatgtaggttgtcaaagcttgtcaaagaagataatctgacaaggtactattggccaacaataaataaagacacacataaatttgtcaaaaggtgcgataaatgtcaaggattttcacatatacctcgcgtaacaccaatagaactaagaatgatgacctcgtcatacccattgaaatatgggaaattgattttattggtgcattgtccacatggcaagggggagcaaagtacgcagtagtggcagtcaacttcttcacaaagtggatagaggttgaacctctagtttccataactggcaacaaagttcttgattttgtcgttaagaacataatttggagatttggaataccaattaaaatagtgtctgataatggaactcaggttgatggtgaatttgtcactgagttctgtgagaggaacaacattatcaagagcttctcgtctatttcaagacctcaagcaaatgggcaagtagaagttgttaataaaaccttgaaggacactattaaaagaagttggctgctgcaaaaggtagatgggtagatgaactatcacaagtactttgggctcacaaaacaactaagaaaacaacaacgtggcatactccattcttgttggcatttggctcagaagcaatgctgccagtaaaagtcaatattgcgacccacagatgagatttctataatcaagaagaaaacacagaactcctaaagctgtcctggatctacttgaagaaaaacgtattgagccgaaaattactaatgctgcatatcgacattgaattacgagatatttaataagagagtgaagaaaaggctctttaacgtcgaagatttggtgctaagacgagtatttgcaaacatgagagacgcgtctgcaggagtatttaacccaaacatggaagctccctacattatcgaggcaatagttggaacttgattttataaattggctcggcttaacggcttgctaataaagaaccattagaatgttgaacagttgggaccttattagcaataaatttagtgttgtattttctctttgcaatataaaatttttattatcaataaagttgaagtattattcaagtaattacaaagttttctctttaaaattacttgaggggcatataaatgtgtatgattaactggaatttatctagaaatacatgatatattgctaacccactccactttaaaatttttactgaatttttctatggacaatataaaattaaaacttgaacctttctcaccagaaaggaaaatcaaagcagcagttttaaatgggatttaactcataaaaaaacattaagctacatgcgaggctgaatacctaacgactcgcattgtgtaggcatgtattataaacgaggcagcaagatgccttgaaaaaatgatacttaacctaaaataggaatagaaagcctaactattcatataggcaatcaaaaaatgtggaatgtaattcgtaaaacgaattattcaaagtatgtttaaatttgcttactaagttataaatggcagattataactgcacgcataaagtagaattgataaatactgctcgcgaataaaaagcatagcagaatatatctatgcgcacatacatagtagattaataaccacttaagcaatctcaaaggaaaagacgagatcaatggaaaggcttgcttaaaatatcttaagtttggtatacatataattgtttaacttgtgaataaaacgcaaataagcaaatatattaagttcaaatgtgagacattaaataaaaagaaataaaatgaaagcaaagttggccatccaacaatgcaaatttatctttacaaatattgccacaaggggaaaaccattgtcttggccaaaaggcccttttcctaaataaataaaaaagaaaaaaggttaaaaaccaagcctacatcgtaggagactt

SEQ ID NO: 236974 - DNA, 2053 bp, Cannabis indica
aattcatacaatggaaaacacttatggaaaattagactaaccaaagggttaaaaccctaaggactgataattgtttggagttttgtagtaatgaatttaacaggtattgtggatctgttggaattcagaggcaccgaactgtgaggatcactcctcaacagaatggggtgggagaaaggatgaacataaccctaatgaacaaagttagatgcttactgttgcaatcaggactttccaaaggttctagggagaagcagttctaacagcagcatacttggtgaacagatgtccatcaagtgccattgaattcaagacaccagaggagatatggacatataaacctccagatctctcaaagctaagagtttttggatgtgctgcttatgcacagagtgtgggaaaattagaacctagagctatgagatgtgtattcctaggataccctgaaggcactaaaggctacagattatgggtaaggaaaaaataggggattaaaaccataaatagtagggatgtcattttaaggaggatttatttccttgtattactaactataatactttatctagtcctaatatagatactaaccctgcaggcacatcagttgatatgcaaacaaggaatacaaacctagatactgttcaagtggaacctgaacaggtggaaaatactcaagaagagcctgctatggaaggaaacgaacaaggtcaggatgatgtaattcagctggaacctatccaggaagctgaacaagaagcagggacattataggactatcagttaactagagatagaactaggagggttcctagacctacatagagattcaattttactgcctgggaagagttgttaacctatgctttcttttgtgctatgggagtagaaatgactgagcctacaacctatgaagagctatggcagacaaggattcaaagaaatggtctaaggctatggacacagagatggactcactaagaaagaacagaacctggatacttgttagaaaacctaaggggaagagcttagtatcatgcaaatggcttttcaaacacaaggaaggcttaactgagacagatcctaagaaatttaaggcaaggctggtagcttaagggtttacacagaaagaaggaatagattttgttgagattttctcacgtgtggccaagtataaaactatcagaattatactaaccatagcaacacaatttgatctggaagtacaccaaatggatgttactactgcttttctacatggagaacttgaggaagagatatacatgcaatagcctaaaggatatgaagaaaaggggaaggaagacatggtttacaaactgattaagtctctctatggacttaaacaatctccaagacaatggaataaaaggtttgattagtttatgatcaggaaagggttcactagaagctactatgatacccgtctctactacaagggcaccaaaattgaagaagtcatctatttacttctgtatgtagatgacatgctcactgtgagcaaagaaaggtctaaaattgaccttatgaagggttggttaagagaagaatttgaaatgaaggacttaggcaaggcagctaagatcctaggcattaatataacaagggatagggggaatggaagtctaagactacatcagaagaattacataaagaaagtcatagaaaatttttctatgacaggtgccaagaaaactaagcaacctatgactaatcagtactatttgagcaaagaccaatgtcaaaaaacatcagctgaaaaggaagctatgagtgaagtaccctattctagtgctgtgggatcagttatatacctaatggtaaacactagacctgacttagcctatgccattagtgtactcaacaagtacatgggaaacctaggtaagcaacactgggaagcaatgaaatggttgtttagatagttattgggatctacagaagttgggttaaactacaaaagaagggaaaaaagcagaatgatcactgggtacagtgatgcagactatgctggggacagagatagtaggaaatctac

SEQ ID NO: 236975 - DNA, 3451 bp, Cannabis indica
taacatagatgaaagttcaagagacatgatttagtaaatgtcaaagtttgagagacataatttagtagatatcaaagttttgtgagcatggtttagtacataaacaatcactgaaatagtgaaattgaataaaattagataaaagtttttaaatttaacaatctcaataattcagggatatttttaacgatcttaaaattttagagggaataatttaatacatgtcgaaattaaaggacaaaaattttaattaaattaataataataatgtgtatatacatttttaaaaaataaaaataaaaataaatgattttgtatataaatgaaagagggccaaaaatctaaaatcttctattggaatggaaaggaaaggcaacgaaaatgaaaagtcatgattcacgtgagaatggagagagtgccacgtaatcagccgcgtcggcacacacggtgacaagctatgaaatctttgtcacaatagccatcaaggtaggccccacttttactacctttatctattattattattattattttttttaaaaaaatatctattaatatttattttttaaatgaatctattattcatttgaaaatgcctgtctttatttatttttgaaatcgtatatttatttactttcgtctttatcaaaaatgagaccggtacaggttttgtagtcgagtaattgaggtattttcaactattttaattttctgttagttaccgatccgaaattacaaaaattctaagtgtcaaagaggcacttagtttcttttttttttttttttttttaactaaaaagaggcacttagttggacaaagagaaataacaagtcaaatgtcattttagagacggactgtattttagttgttaaagctattcttagttcgctatctatgctctatttttggtttatttgttcaagattgtcaatttattttatcttctttaagtgatgtttctattggtcatgttaaacagtctgctaacaaagccgcgcactgtatgacacgtggtgttagttattggtcaggtcgtctctttactaaaagtgatgttacccttactcttcagacctttgtattagcggatgtttctgtctaataaagattattttcattcaaaaaagtaaaataaaataaaatgatcttttacattttttgctgagaaaaaaataactttatacttgctatggattcaaattctagaaataaaaagtcatactaattagacaaataatagtgtgacatatatttatatggtatattactttaattaattatttttatttagaaaattgctaaaaaatattattggtacgtaatccaatcaccaactgttaattttgttgtaacagttaactgttttcagttaaccttttctttaccttgtatccttgtaatctcacatatgtaaataaatgcctttcactctttagtctacaaacttttatagacttttgagtttgttgtattcatcactctgttttaagtttatattgataagttcatacatggtatcaagaagccattgacgaaagtcatctatggatcctccaaacatcgaaaatccaccacgcacaaatgctccagctcgcgaacaaccactgcgaattgttcctcaatctcctccgattgctcctcagcaatcttggaatcccttttagaactatctcagttcctctcttattgttaaactcgatcgatcggacttcatggtttggaaatctcatgtgattcctacagttattggctgtagtctcgacgagatcttactcaccggacttgctccgccggctcaactcgccaatggtgatgtcaatctagaatctgtcacctcgaaaagaaaggaccagctcttgctcagttggctccgatcatcaatgtctgaaactgtattgggctccttggcttagtacaatacatcttacacggcatggaaggccctagagcaaggatttgcatctcaatctaaggcacatatcttgcaaatcaaatctcaactctccacagtgcaaaaatgaaatctttctatctccgattactatgataaagtaaagattctaattcattattttggaagaatgtggtcaaagctagtgacattttgagagaaggagcttgtaaagtggtgaatgatagcagggatactattatttgggaggattcataggtggctcatgttaaatctttctaccctaagtctagtgggcacctagagtttggtctgagaaaggtggcactacaagaaatgtcacttttgccaacaacatttttgtgctggcaaaagttggtattgcactggtaaaataaaatttacctatgatgtgttggcaaaagggggttggcaaatcaatgttggtattagaacttttgccagcataaaatgaaagtgctggcaaaaaagacttttcccagcgcgtaaatgtgctggtaaaagtttgattttagccactgcaaatgtgcgctggtaaaactttgatctctttgctagcgcagtttgcgaaatgcgctggtaaaagccagcgcagtagcgaaatgtgctggtaaaagtgacatttcttgtagtgtggctgacctcctgactaccacgggtgactaggacattcaaaaactgaattgcctctttgatagagataatatttttgctatcctgaaagggggaagattattgggtcaaggaaaagataaatggatctggataaaagagggtaatgggattttctcatgcaagtcggcctattttactcaagcattacatagagctccacagtgtgaggttgctccctctatgtggaataagctctaaaatagtaaaatcttagagaggcataagatcctttggtggtgtattttatccaaggcccttccgatcagggctattcttagtaagagattaaaggttgaggatgttacctgcccttttatggggtggaagaggaatctctggagcacttatttcttaaatgcgatctagctttccgtttatggaagtcttcgctgtggggtatctttccagtggtcaatttaggaatacgtatgtgggactaggtcaaatttatttggagtctcaataacaggggcatcaatgttgaaaaggtctttatctatgcttctgttgttgttgacactatatggcgagcctgaaataaaaaggtgcataatcataagatggttgacttgaatcagtgctttgactctattcaatgttcttatgctgacatactctataatctccactccttatcctatccgggtggaggattggcctcctcctccttattggattaaattgaaatatgatgtcagtgggatcaaaacgcttgtgtatagcagttgttgctagaaactacttgggtgaggtcatctgggtgagcacggtgggctcggatttttcggatgccctttgtggagaggcgacagcttgttgcttggcgattgatttggcaaagc

SEQ ID NO: 236976 - DNA, 1757 bp, Cannabis indica
atgctctgcgacagaaaggaatcaagggctagagatcttgaacggaaggagtcatattattccgctgcaatcaaaatttttcttatccccttatgtgtttatttcattgttttagagaattcatatttagaatgttaattcaacatacttgttagtaaatctagatcttggtaaaatatttccaacacatacttgtacaaatttgaaatttagaaaatatggttactttagtacagatttaagatttagagagtaagagtactcatagaacaagctccttatgaggtctatcaagtcatcaacaagcacactcacactcaattattaggtgggagactaggtattttaaagagtcttccaatctcatcactaaggtagttggtaatggagtatacaaactccaaactaatgaaagacacgacatcaacagtagctggtaacattgttcatgttaagcagtatcacacttgaaattccaaactactgttctgttctctttacatttattttgtttaacggtctcatgagacccactctcctccacacactacttctaacaaatactcactcatacaaggagatagaactgcatttgggcttgatccctaaaaagggtatataggcagctttatcgagtgcaatcccttatcataaccatttttttccctctttttaagaatgacattcagtgagaaagtatgtgaggaagtttgagaaagttgtacagagaaggataacgaagtggtttctatcagataagttaagaaggagagagcatatcttcagtcccctttcattattccttttcaacaaaaaaagtctctgaagcttaagtattaccatctcgatcaacaacaacaacaataattactatgatgaggctcattacttggattataattttcaaatagaaatgaaaagagtaataagagacagacttgtaataatggttctgacatagtggaaaagcttggaattggatatgggtcatgctcatgctctaaattttgaagggtattggccaaaccaaaccagtatagtataattctctgatgttctctgtttcttttacatttcttttgtttacttaatatttctgaaaatgaccacattgcactttttttcaccattttaatactaataatgaatcaataaatgggcactctgaagtatcatttaagcagtagaaaacattttctgctcagaaaaatcagcatcataattaacaactaagaaaccatgaggtcaaccaaggccagccaatgtgactgtttaagctgttcaatttgctattattacaacgtgatcaggagaaacaaactctttcatcacccgagaagacttgttcgagtttacttacattaattactctttttcacaactggtgaatttatttagggacctgtaaaattacagttgcttagctcaatcttcatctgcactggaagttgaatctcttgctttgcaattaaagagagagttgttctgctactgttttggattttcaagagcagagcaaaacagagttgattcgatatatatgatttttctagttgtaatgtttagtttctttggtttaatctttgaattttccttaataacaatgacattgtctgtagtggtctaataacctaataacgttctggttttaaacccaatttgtatggggtgttatgtaaatcctcacatcactttgaggttttacacacctcaaaatgagacaaatagaactttactatagcaaatgacttttcttt

SEQ ID NO: 236977 - DNA, 585 bp, Cannabis indica
aataattaaatctttaattatctacggattcttatgatttaactatgcggtcattacattataacagccatggggtgttggaaatttgaatcttaagactgtgttttacttacactataaatataggtctttgagttcactttgatgaccaatgagtttctatcaaagagagcatcttgatagaaacaatacaagcttcataaatccaaaaaaatatttctatttcttcatccagaagtgcttgtggtaaagaaaaataaacttttgaacaaaggtgtaaaagtaaaacattgttcaagttttggtgatttccctacttatcacttgtgattgtgatcttgaatagtgctgtaaatatgggccgggctttttgacacgacacgaaaccggcacgagtctgagaggcacgagcacgatctgacacgaaaaaatatgggcttgagcacgacacgacacgatgctacaaattagcacgacatgacacgaaaaaaataggcttaagcacgacacgacacgacaatcccgaaggcacgacaagcaagcacgaatataaaagctccaaaaatacgacacacaaataaatat

SEQ ID NO: 236978 - DNA, 1133 bp, Cannabis indica
ttgaggagcaggacaatgtacgtcctggtagttcctccgacgcggaggaagagacagaggttgaacccccaaactacgaggagtacaacgaggctggggagccagtcgatgctgacggagacctcctggttgagggcgtggactacgtcagtgagaaacttgctgctgcaattcctcatagaaggcagggtaccttgggcgccaggttggtaagccctgcgtccacggttaccgaggcgtgtcattgaactctcgaccagggcggatacgtgggcgaactggattgctacattcccgcccacaacaatcgtgccataaaccctgaaaaggggatgtgcgcctcgtcgggtgcccatggtaagcaaggggcgttgatgcctttgcatcaatacttcaaggatgttgcggacttcttcggcttgtgcccggcccagttcacgcctaaggtcattaagtatttgtctgccctcttcgtcctttacgctttctaggagtggggtactccttctcgtcacgaagtttcctggttctttgatttgaagtccaccccaagcaaggcaggtcggggtacttttatttctctcaaccgggcttcaagtggttgacgggcacggacgactcggccatcagcaagattgggcgttttgctgatgagtacttcatggtggatggcacaggcatcactcgcactcggttccagcagattctgacatatcaccgccctcccctcactcttgctcttagagatagagctcaaaaacttgcccgactgtcaggggaagaccggaatattatccagttgacctctgaggataactttgtgaggtacgggctctatcccacggactttgttcctaagtccgtgatggggaagaagaggaaatgtgttgttggccggaccgaacgagctcatccgaagaatgagctgattcaactgaagcgcaaagctaagttgaagggaggtgcaagggccaagcagtacgctcaggagcccttgaatcatgaagatgaagccgaggaagagcaggtgactccaccgaagaggaagaagatgttgagttttatgccgtaaataaaactccatttcaatgtaatctctattattcaatatcaataaagaaacataagtattt

SEQ ID NO: 236979 - DNA, 1065 bp, Cannabis indica
caagttctttgatttgttcattattagtttacccggagctctagtccatactcagatcttgagaatttagtagtgaaagtgagtaggagcgttaattatagatatagaatctatagcttatatgaagtaaaataatgattttctttgagcttggctaaacgcgataaatgatagaacgctcatttcagtaattatattagttttagaagcatataagaatctatttaattctgatatttaaataggttaggtcgttaaataaaatgatcataccatgattatctttgtcctatttattgctattcctattatcgtctcgattaacatttgagaacaaaaaattactttcgcccccacctaattttaaatttagaatgggaatcgtcgctctcactcaattctaaatttagaatgggaatctctagccccaccaaattttaaatttagaatgagaatctccgcttcaagaggaagtccttgcccccttatcctcataggaaaatatatgtatatctacctaacttcaagtaaacacaccataattttcctaagtaaacacaccataaatagtttaatttgctcactcaaaacgtaggctctttcaaaatatctgaacttcacttattttaattagttgattgcctaactttaatttattagccgttatttagtccaataaggtttgcagatttttcataaagttcatttattcccctcaacaaacacatgagaacaaaacaaaatgtcatctgaacattagattaatagttgaaaatgaggaaagtgttcattatacaattattattattaggccataatttgtggttttgaaattgaaacatgaatgaaaatcctttcttttaagaaaaagaaaaacaatgaatgaaatgagtttggattattatatagtgtgataagtaattgggtccaactaattatgatataaattgtagatacctatgggatattcaccatcattatatgtagcaattagcatgttgaaaaaggcaaaaactagactttgggggcgtcctttccaacctatttgctggcaattgaagtaac

SEQ ID NO: 236980 - DNA, 826 bp, Cannabis indica
attcttctcaatcttggggatgagatacttagggaagtgtctggtgaggagaaggcactaggattgtggaacaaactttcttcaatttacatgaagaaattattggccaccaaattgtacctgaagaagagattgtatactcttaaaatggatgaaactagagagttgcggaagcatcttaatgatttcaacaagattatcttggatcttaataatcttggtgtcaaaatagatgatgaagatcaggccataattcttcttagttatcttcccaaaatgtatgaacattttgttgatatcatcttgtatggtaaaaacactctcaccatgactgaagtgaaggcagtactcaattcaaaagaaaggtgatgacggtggagatagcaatggcgagggactgttgattatcaaaggaaaatttcccaagaatcacaagggaaatcagagccatcacaagccaaaccagtttagaactggtgcaaagggctctactgggggatcaaattcaaggggcaacactagaaaacaatgcttctattgtaagaaataagggcactttagagatgaatgtctggacttgaaagctaaattgaagagggacagtcaacaatcaagaaccagaaaatcacgggtaagcagatcttgtagatggatgtgagacagttgatgttctggtggcatcaagttctgattcaggcagagaatgggtgcttgattcaggctgctcatttcacatgacactaaacaaggaattactcagctctttctcagaagaacataatagaacactcctaggcaataacaaggcatgtgcaattcaaggaat

SEQ ID NO: 236981 - DNA, 2004 bp, Cannabis indica
ctaggtccgagtatcgggtccaaggtcccactcccggtcccggttctaatatgggttctgctcttagtctaggttcaactctttgttgtagtccgggtttgggtcccagtcctaatctcagtccgagtcctactctttggttcgagtttgagttttggtatgagtgtggttctaggtcaaggtcccgagtcacgggtcctgggttgcaggttctgggtcgtaggtcctggtgcaagtttgcgtctgggttcaggttttggtccgggtatcgatcccggtctaggtccgggttcgtgttttgttccacgtctagatccagttttttgtcaaggtcaattcctgttccatagtccttattccgattcttcttctgattttgggtctcgggtccgagtttgggtttggatgctttgtctagaaattgttctagatttggatcttggtatggttcgaagatctagacgccgaatacgggttgggccagatccaattctttggtcccgatcacgttccacttcggatcttgggtctctgtccttgtccgtgtccgggtcctggtctaagaccaagacttgtgtcatatcttgggtcccaaccctagtctaaagtcctgattctagttttaattttgagtttgagtgcccaatctaggtctgggtcctgggtacaggtctgagactctaatcccggtccaggtcttgggtctaggtctgtgtccaagtttgaatctggatttgggttcgtaacctgagacccaatccaagttttgattcgggtctgcgtcacagttcaggtctgggtttgggtcttagtcagattcatgttccaagactcaaaccaagactcggactcagacccaggtctgggttacgggtctgggtcttggttaggttctcggtctgagtccgggtcaaggtcttggttggagagtctgggtcaaggtcttggttggagagtccgggtatgggtcccatatcaaaacacgaactacgagttaggttcaagcccccggtccagatctagttcacagtcttgggtccaagtctagttccacttcgggtcccaggtcccggtacaaattctaggtcagggtccgggtccggggtcagatcctagttttcaatcccagttctaatggtcgtgtcctgggtccaggtcccatatccaagttcgagtcctaggtaccggtccgagtccaggacccggggccaaggtccaggggccccatccaggtccgagtaccgtgtttagatttgggtctgggttccgtggcccaggtccagataccccatccaggtttgagtcctaggttccggtttgggtcctagtcccagtttcgatttcgattcagtgtctgggttcgagtttgggcctaggtctgggttgaggtctgattccttgtccgagtctgtgtctgagtctgggaccgggatcggatcccagtttaggtctgcgtttagctccaggttcgagttcgggtctcgggtgggggtccaggtttgggtctgggttagggtctcgtttagaatctaggttccgagtttcgatcctggtctgggtccaggcttcggttcaagtttaagttcatatctagatccctatctaggtcagagtttaggttttggatagggtcccaagtgtagatatgggtacgagttttggtccgggtctcagtgttggttcgggtacacgacgtgtcagggcccaacttcaagtcagggtttgggtctggggctaggcccgagttcagttctaggtttgggtcaacttcctagtcacggtcctggtctggtcctgagtctttgttttagtccaggtcgcgatacaggttcaggtccaggtccaggtctcgatccctatctttgtctgggtttaggttcgggtccttgtcagggtctggatcctggtctgtgttgcgagtctcaggatccggtgagcgtttaggaccaggtcaggtacaggtcccggtcctggtcctagtccatgttcaagtcttaggtctca

SEQ ID NO: 236982 - DNA, 625 bp, Cannabis indica
gctgccatatgtaagtacatatgggccatttcaaacaagcaagagagtctttggctaattacgggtccatagtgcttatctcaaagatcaggattggtggagctactctgcttctatcaatgctagttggtattggaagaagctagtagctatcaaagaccagcttaaataagtttgtgatgtagcaggttttcaggaagaaagatacaccatagcagcagggtataacctgttttctcctactgctactagtctgaactggtgcaaagaagtatggagcagattgaacacccctaaacatagtgtgattttgtagttagcaatgttaaaccggttaaaaactaaagacatattactgaagtatgggatgcaagtgaatgagaaatgttgtctatgtgaagctcaagctgaaacaagtcaacatttattttttgaatgtaatattgttgttcaaggactgtaggaaataaagacttggataaattggaatgctgtatcaatcagccttctccacttactgggatggataggcagagccaagatttcgaaatttcgaaaaatggtctatgttgctgcaattgcagggctcgtttacaacatttggaggctgagaaataatgtgatt

SEQ ID NO: 236983 - DNA, 1767 bp, Cannabis indica
cccatcattatcgtggaaccttagccccgggaatcccacagtctcgaccacatctaccatgtcaaactgctcttcctcctcaataattcggaggcgctgatcttctcttgaatagtccggtacaacgtacatggcattgatggcgtcggctgtagcaggaactttcttaccccgcaccttaacttctccatttctgtgctcatgccaatttgctagaaattcacatgccatggtgacatttgctcgtcctctagcatcatcaaaactgccccatttcatttgttcaatttgggctcgaatcgtctcaaaccgcagttgacgcctctaaggattttcagggaattcaatacccttgtcttcgatatatggcctagccttaagcctcatgaaccgattttgtgtcgcttcactaacaaaccgggttcgatcaaaacccgtagatggtgggttggatgatgaacccccttcttcattgtttcttgttccttttggatccatattagcacaatagcaaaaattttcactacaaagtaattctaaaaaaatttgggcagcacttccccgtaaatttcttgctttcccaaattcaaaaaatcaccaaaacagcacagataataacaataacagtctacaatgcagaatataaattcaataattcaattatcaactaaaaatttccaaatattcaacttattcacaaaaatccctaaatctttcaatcaacttcttaaatattacaaagaatgatacttacaaaccgaagaagccactactccaacttcattgttgaatgtttttgaaaaacttgaggttgaagatgatgagtgatggtattttcgaatttggagggaaaattgatgatttagggtgtgaattttgatgaaaagtggtgattgatgaatgaaatttaggtttgggattgaagaattggtatagagatgaaaagaattgaagatggggtgatttggtggtggtttttcggctgagaagggggtgtttcggccgagaagataatgttttaggtttaggttttatgggtgaaaaattgggattttataaaaaattttgtacgctggtcgcgacaaccccatgggctggtcgcgactagcttagaaatcaaaattttagggtttctgttaaaccccctggtcgcgaccaagaaaaagggtcgcgacttggggttggcctggtcgcgactactagaactagaaaaattccaatgtttatgtaatcgtctaggtcgcgactagggttgcgacccaggaacctggtggtcgcgacccaggaacctggtggtcgcgacaattggtttccgagtctcgagttattttattttttgttttttcacgatttaactgaaaaaaaatacaatgtctgatactttacaaaaaaaattcaaaatgttaaaaacaactaaaacataaactaaaaccaatagcaaaagtctgaaaaagtaaaggaaaatacttgggttgcctcccaagagtgttgcctttatcgtcatctagccggacgctgagttgttctcttaaagaggcgccagaataatggcagacttggcttggtctaattgacctcccaagtagagcttcaaatgctgcccattgactttaaaagtctcggagctttcgccttttagttccagagctccatatgggaatgctttgaccaccgtgaatggtcctgaccatcttgacttcagcttaccaagaaatagtttcaagttagaattaaaagtaggacttgctgcccgggttgaaattcttt

SEQ ID NO: 236984 - DNA, 1565 bp, Cannabis indica
ctagttataacataacctgttgaacacaccgcatgaatgcacattgtttgaatatgaacatcagtcgttagattgtttaaaaaagggtacttgttgtacattatatcaaatgctaggtttgtactctgttaccctttgcttctagggtcacaactcatagtttaatctggtattataactttttagggaagagacgtccatggagggcttttctattgtatgggccacctggaactggtaagtcttacttggccaaggccgttgcaactgaagctgattctacattttacaggtaatacattttgttacctttcttatatcttgacattttaaaattatcattgaacatagccgtttacaaaatgtccataagctgcttgatgaggaagcaaccccctgtgattttggtactatattgaacatgttttctagttatgacttgtgtggacctgtgtaaagaaatttacatgtcagtctcagttcgagctgctttttgttccatagctttctaactcattgcatagtagatagaacccatagtgaattgaactattgtacttgcatctttgtcttatgacttttgtaagttttgatgagagcatattacattttagtgtagtaactcttcggaaggtgtaatcttgtcattggtgcataaagtatactactctataagtactttcatccggtttctgtggtgcatagcttgttcctacataaacttgtgtaaatgaatctcatgtttatatattagctaggttttgcataagggtgtgactaatggcaaccctttgcatatttaatttaacttactttctgctggggcctaattttcaattattttgattacatatggcagcgtttcatcatcagaccttgtttcaaagtggatgggtgaaagtgaaaagttagtttctaatctctttcaaatggcacgagacagtgctccatctatcatcttcgttgatgaaatagattccttgtgtggccagcgtggagaaggcaatgagagtgaagcttcgaggcgtattaagaccgagcttctagtacagatgcaggtaaatgcagcgggaagttgtgaatgtggattattgagttgcttggtcaatttttatttcatttggctcactcacatgctctatattatgcatcctattcttgcagtgacttattttaactatatatatgatcatcaaattatttcgggctattagttttacacagagaccgatgaagtaggttgatgtgaaccaaccccctagcagtagtattagcaatagccaagcaaaacagtaggaaattaggctatggcaataaaagagaaaatacaatgcctaggcatttcgagaggcctaggataggatgtctccatgatgcaaatagagaaaatactcaattctttgcatacccactctaatcccttactcacctctatatatactattaaaatctcactggagactactctccatacatcgagtcatacccctttatttcctatactccagcacaccctattaatatggggtctaacataggttgtgtgtatttggtttctttttctg

SEQ ID NO: 236985 - DNA, 665 bp, Cannabis indica
gatgaagtcgagaggggtgaagaagaaccctggctgtagttgggttcagatttgcgatcgggtgcatgcttttggtgttggagactccttatattaaagacttttgctattatttttgccaagtaccatggaaagtaaagtagaattgtttatgattgcaagtggcatgagtccatatatttgaaagaacgacaaattctattggagttgctcttgattggagctgtttccagtaataagtttagcattggttactaaataatcaactatcgggaaataaacgactacaagcttttatagatagcattttctgttttatcagagttagtggtatttttcatcttgattaatgattgtaaagcttcaactctcgaaaatttagaaacttggcttagtatctcatcaaggggatctccaatggggttgccttgtgactcattttgtagaccaatttcatatgtaaagtgctgctaaatatgaactatggccagatgacaattttcttttgagaaaaagttatttttttactaaaaaatttattaatttaatgtgatgtgagactatggtggataatttttagagttgtcaattatcggagtattgctgctaaatatgaattatggccacatgatattttttttcactaaaaaatttattaatttaat

SEQ ID NO: 236986 - DNA, 3094 bp, Cannabis indica
aatctagcatagcatgcttaacactctcaggggcaagtttacataaaggacaaagaggggaatcaagaacttttcgagaaaaaagagaagttgcaacaggtaaaacattagatagcattctccaaataaacagtttaaccttggggggaatattaggtgaccaaacacgagaccaaaactttttggaagaagtaaaggaggaagaagaaggaaggtccaaggaggagaaagccagatgataagcagatttgacagaaaaaacaccagagctagttttctcccaaatcagagagtccctgccaaaacacccagcaacaggaacttctagaatgtcattaataatagaattatcaaagtaagcacttaatctattgacatcccaagtccctgagtcagtaatgaagtaggatagaaactgagaaggaggatgagcagaaggagagaaaattttaaacttatgattagggagccaatggtcagacaaggtatgaatttcattcccattcccaattttccagatgagaccagagaccaacaaatcccgaccccataaaatgctcctccaagtgaaggaagggttatgaccagggttagcagcaaggatagaggagttaggaaaataacgagtttgaagaatcttactaagaagagaatgaggattatccaggatacgccaagcttgtttggctaacatagcttggttaaaatggacaagagagcgaaatcccaaccctccacagaattttgatgtacacattgctttccaggatttccaatgaattttcctagactctccattagaaccccaccagaatctggccatcgcagtttcgattcccttgcaaagcttaacaggaagtctgaaacaagccatcgcgtaagcagggatagcttgtattacagctttcaatagaacctccttgccagctcttgaaaaacacttagaggaccaagatctaagaacggaggctactttatctttaagaaaggagaaagagtgaaactttgaacgagacaaacattgaggaagacccaagtacttagaaacaaaaggcttatcctctaaattaagagtgtggaaaaacatggcacgagtatcctgggcagtattaggagagaaaagaatggaggacttagaaaaattaatggcttggcccgaggccctagaatagatattaaaaatttcctgaagggcaaaacaagactctctatcagcagagcaaaaaagaagactatcatcagcaaacagcaaatgagagatcgagggcgcatgcctagaaatagaaatacctttaagagattgggcattctgcctagccctgagaagagcagacaatccctcagcacagagaatgaaaaggtaaggggataaggggtccccttgtctaagaccacgagaaggtttaagggagcctttaacctccccattaaccaggaaagaaagagtggtcgtagttatacatttcataataagggtaacaaagccaacaggaaaattaaaatggtacataacactttccagaaaatgccattcaactctatcaaaggctttagccatatcaagcttcaatgcagcccagcctcttttaccaactttacgagtgttaatggcatgaataagttcttgggctataagaatattgtcaaaaataacacgcccagaaacaaaagcactctgaaaaggggaaataaccttgtctaaaacaacttttaaccggttagcaacagccttagaaatgattttataaagcgtggaacacaaactaattggccgaaaatctttcatagcattggcatgttgctttttaggaatcaaaacaatcaaagtgctattaatctcagagaagtcagtatgaccattcaaacaattcaacaccactgaagtcagatcattcccaaaaatggcccaattcttttgatagaagaaggcattaaggccatccagcccaggagccttatccccagaaatgctaaaaacagcctttttgacctcatgggcagtaaagggctgagccaaaaacccatagtccaaatcatcaaggggaggccccaaacaatcaagaatatggttagttgcctcagcatcacaaccatcagaggaaaaaagactagagaaaaaagaagagataatatcaaacatagcctcaggatcactagttgaattaccagcatcgtccttaaggtatcgaatggtattattcttttttctgtgggatgcaaaacgatggaaaaattttgtgtttcggtcaccagccttaagccaggacacacgggacctctgcttccaataaacctcttccttgtagagaagagcatcaagctgagattgaagatttttgagatgaatcttatgctcactaaaaccagggcctaaggattgaatcctagttatttccctttgaatatcctgaatacgaggctggaaatgaggcaagacagatttgtgccaagaggacagagcagtgacacaggaattttgcttggctaagaaggtgccaagaccatctaggctattagagaggtgggaggaattgttccaagagtccctaacagtggcataaaaactagggttgtctaaccaaatattttcaaattgaaaacgctttttaattctacggggctggttaagatcagggttagagtgtagacaatcttgatagctcgatgatcagagccataaaaggcaagtggtgcaaaatagcattagggaaaagcattctccaagattcagagcctctgcccaatcaagacgttcatacacagtattattatgccaagtatatttattgcctataaaattaagaggagaaagacaaaacttatggataaattgagcaaaatgatccatatcagaaacattataatagttactaccagttttatcatcaaagtccaaaaaactattaaaatcacccataatgagccaaggcaaattaggggaagaataaaagagtttgtctaacaattcccaagtaacacaacgagcagaggaaataggagaaccataatagcaggtaaaatgaaacatagcattatccttgaagtttatattacaatcaaaatggttactagagaaggataaaatatttacata

SEQ ID NO: 236987 - DNA, 1431 bp, Cannabis indica
gactttgtgaatctatttatttcgaatgacattcctaataagtatggcactaatgtccaagtacctatctttttaagggtagtgaactcttgttgcattgatttaagccattgaggatgtttgagtgcagttgtagtagatctaggctcagaaggaatgaaagatgtcttcaagggataccttgtggccaaatgagtttttggctttacaatgccattaagacaccttgttctcatggcatgagtcctagtggtgatgtttgtacctgtattgattggggcagcagtaggtgtaatgggggttatgatatggtagcaggtagttgctcagtctgaggttgagttgaggttgaaggatttaggacaagttgaggtgtgggatcatgagttgtggtagcttgttttaggagagaaactgaaggtatgttggttgttggagctagaatatttggttctgaatgtgtttgttagccatggagagggggaggttgagttaggacagggaatgaagagtgaccaggtctaggttgttgagaaacttgggctttagatgtgtggtgagaggggttataaacttggggttcaagttggaattgggtagatatatttctgtttgagacatgggtaggctaaggttgcaaatccatatttgggacattaacagatacaattggtgtgttagtagaaatattgttgctgatagtttgaaaattagaattgggacttttgctagtaatccttatccaaaaaggcatcttatagcaatatgtgttgttagggctcgatatggaatatctctctattttgcttttgcctgagcacaaaatagatctaacttggcaagaattgcaaggttttcttcttagttttgacagcaagcttgagcatctagaagatgtccgtccaaccaataaaacgctaaataacccctctggtaatttttgtcaaagaccatccaactctaacattagggggaattactctagaagaagaagtagcttcaacaataactaaggtcgtgggaattaatattaaggtaacactaacaggggtggcaacaacaataataatagtaacagtaattgtgtgagaggcaaatacaataattgtatgctactgcagatataatgacaattacatgggccaaccacttcaaaatgataaccaccaaagccaggacaaaaacagtcagatgactgcacttgttgctacacctcaaactcgtaatgatttgctacacttgttgctacaaaccaccttactcctgaatctgagaaaatgaccaacaaagtaaactatcatgctaaatgacttgcttcatgttccttcaatcacaaaaaaatttgattagtgtttcaaaactgactaatgaaaacaatgtatcaattgagttttaccttgatttttgttgtgtgaagacttaatcacatgg

SEQ ID NO: 236988 - DNA, 769 bp, Cannabis indica
ttattctttttgggatagatttaaatgtaactgttcatgaaacgtggacaatacccacgtttcagttaaatcgcatgcgagataatactgaatagctacccatccgttctttagctttatcctttagatggttattgctgacgtggaatgttatatcttctctgatttgagttattttccatgtacatcttgataaaaaaatacggtaagcgttgggaaggtttccgtctagctatattccctttatgatatttgtaatgcgaggtgatcttctcgctgtaaaaaatgcgaggcatcttatgctgatacactcactttgctcggatggttgaatgttcctttcttgtcagtatattccgaggcatgcatacgtctcgttaatctcaggttaatagttattattctttgtctcgctattgactataaagtcaatgagttttgaatattatctatttaacctttaattaataaacgagttatttaatatgcatttaatgatatcgttatatcattcagaattattccgtattccttttgttggacacgtgtcaacctctaaagtgtaactgaatttcggggtcataatatatgtaaaaaaatttacctataaatataaatcaagtaaaaaaaaatagtcacgagaaaaaaaaaaaaaacaacttatactaatgtacaaattataaatatgtattctcgcgatctttatattacgattaaccaattaatttttgcatgatatctgaataaaattaaaataaaatcagtaact

SEQ ID NO: 236989 - DNA, 1359 bp, Cannabis indica
ttttatattttgcaaaggttatttactaaatttttattttgttaaattataaattagatcctacaatattcaaagcgatataaaatactaaataaatgcataattttttttaatagtaataatacttaaaatatatttctaaaagtttaagtatcaagtgattagtgcatgtcattaaatttttatttataaattcatttaaatatatcaataaaaaaataacagatggatattgacttgacacttccaaaaatataacttagttattattaccgctaaaaattaaagtatccgggattaaatttaagtatttacaccgtaaattattctaaaaagttgttgaaatgtaagattatagtactattttaaaatatatataatttattttattataaaacaaaacaaaaaattcgattaataatttttatacaatacaaggtctaaaattctattaacccaaaataatataatataaattaaaaggttgtaattcaattggttcaaaagaaaaggcttttaacatttttttccaaactaacaaaaatgaatcaagaaaaataaaataaaatagaaagttggatcaaaccaaacaaatagtaggaccctaatgagagagtgtggttaattaccaaatccttaggtgacaaacttaattagatttaaaaccaaattttgagatttcttcaaccactgcataaacacacacacacacacacaaattgcaaatagcttaactcatcatcatcatcatcatcatcattatgaaggtcgttgacccattaatttgttgtgttgtccatttcaacactaatgtttttaaaaagtcttatgattttgcattaaaggaggaaactttcaacatctccaaatgattaattaaaatcaattttttttttgttgatgaggtcccattttgactttgtttttgtttctttcaaatttcaatatagggtaagtacacatttttttttagaaatgttaaaagatatgagtaatattttttaatgtgtatgttattgttgttggtacaattaaatatcaaattttattaaattatgtagagtgtcgtttaccaattgtgagatgtcacttctaaatagtactaaacactataaatacctaataccaatatttttttttaatatgacactagtacgtattaattaacaattccaattataactgcattcttatttaacactctaaagtatttaatattatacttaaatgcacatttacttaataatttttttatattatttattagattaaaattaatagggcatcactattaaattttgttgttttttttttttgagatactattaaattttgttgttaaatttagttttaaaaata

SEQ ID NO: 236990 - DNA, 627 bp, Cannabis indica
ttctctataaaatgagagttcctctatttcatttttcgcattcagtaaagtacccatatgattgcagcctctctatagcttctttctctagaaattaaagctttcaaacttagctatttttcttttaactattcttgtgagcataaaaacttgaagtagatgtagcttcattattgcgctacacaagaagtgaactattataaattcttgtgtgtgctttctattttactttgttacttctaattttcatctcatctatacatacgagtgagttggccagatatttgcatcaacagaaggggacaacttttatttcatttcttttgttttgtttcattttaagatatcggaatgtcattcctaatctaactatatttttattccttccaataaaatgccacttaatagggattttttaatgtgagtttgaattagagagagtagagttggaaggaatatagaaacccaaattgtggagggaattaacattactaccatttaattcaaaaagtgagacccacttagaaacataagcccattggtcattaaaatttaatttaagttggacattctcatttccataaagtctgaatgtaaagtcctttttttggcaagttaggtgacaaa

SEQ ID NO: 236991 - DNA, 746 bp, Cannabis indica
ccgtttaggagcaatgagacccttttggagggtccaaatatggagttttacatgacccaagtggaggagtttaggaatgctgagaaggaagcaaggaaaagagggttgaagtttagattgcttgatacaactcaagccatgttgttgaggccagatggtcaccctagtagatttggtcattggcccaatgagaatgtgactttgtataatgattgtgttcattggtgtttgcctggacctattgacacgtggaatgatttcttgctcgagatgatcaagactgaacggttgagatctgctgcggagagccttcagttttctgaccgaaaattgctagtgagatagatagatttttttttctcttcctttttgtgtatttatgaaagagtatttttttaattattatttacttttactgattattacttaattaataagatacgtgattaaggtttgagattgatgcatgtttttgtaattaaagtataaatctatatatatagactatattggaaaaaagaaggagatgctctggtctagatccgtgatgtaataataaaataataacatttgtcatgagcatatcagcatgaaaattaatgtattatactaggaaacataatttcttgcagtgattttgatttttttaaaaaaaattatcaattttatattatatttttttgagttattattaatgaattaaatttaaaagagaaaatgaaaacataaatttaaaattttaaaat

SEQ ID NO: 236992 - DNA, 934 bp, Cannabis indica
attttaatttttttaaaatattttatatatttatagaaaaattattaaaaatagtagtaatgttatacccaaaatttggctgccacctcaatgaaggacacgtctcaagaaaaagggattttgaattgatgccattgcttttatggaataactcattaattacgtaagtatcagagtatatttgtaacccgctgactgtaaggtcttaggcaaggaatcaatgtacaaactggcacttgtatattagcgagaaaccacatgtcgttaaatgtgaatagcaaggcaccaaggaaagcgacccgtatcaatcgtggaggtgcttagtataatgaacaatctaagtgtaaaagtcagatcagctcaagaataagtaagcgaggtgaccatctcactatgggaagacttcctatagcttcatcctgctaacggtaacaaggcttacaaccctggagagtcagaatggttctttataaataagaaccgcgatcgacaccagacatacattgtcgaccttggacagaagaatgggcccagctcgctattgcgatcactgtaaccaagtttctgtcgagacatctccaaataaaatagctaaagatgtgttcaatacacgattttttgacccagtaaaagcgggaaaatcaaagctatacgattttcaaatcataaactgcatttacactacgtgatatgtaatcaaatcccatgattttagggataattgctgtaaacatattcaggtcaaatttgaaattaattgtccactatgtaattataaatagtgacaaacaagagcaaaaaagggttgaaaaaactcatacaagagagttcctaaaaaaaaaacaatcaaaaatgtgaataatattgactcgtggactatggagaattttaactacaaaaccacgtaaaaaactctgtgttcatatctttattt

SEQ ID NO: 236993 - DNA, 513 bp, Cannabis indica
taatatgatatggaacttctacatcattgaagttcctaaaaaattgtaaagtccaacctgaattttctcaatcattttttatgaaatatactttatagaacatattctgacatattagagaatacatgtgacagaggcgcattcccactccaaatatattacaatatagtatagacttcccattacctgctttgaattctacccttcccagaaactcatcataaaatgcagcaatacagagtcacttacatctgcccactgttcttctgtgttctggctttcaatataccagccccaactatgatcactcatcaccaagattgatgtagctcaatttctgtagcaatgcttcatggtactcattgctcaaccagatacttgccacactgagctgataataccttcggcaccaaatgtgctcaccattgtgatagcataaaccttcctcacattttccaccgtgaagaatcctctagaatgaaagaacaaacagagtattatcaagaacaactt

SEQ ID NO: 236994 - DNA, 810 bp, Cannabis indica
tctttcagcaatttttataattttaaatgggatctctccaatcgtgaattcttttaacaccaaaataaaaaagtaaaaatacttttattataaaataagttgttacctaaaaaaagaatacttcaaaagtaattattgaaataccaatttcttctcacaactacacaaagttatgttctacaagagttatgaaagagttctatgcaagattgctaatgacatgttaaaaactttttatcacttggtacaacttcctagttcctaaagatcacttgaaaacaagcgcagccgttagatatcatttgctagcgtttccattataatcttgatcatttcaaaatcacatcaataaattacattctatactaaataacagcctattttttatgaacaaaaactccagatggattgttaattcttctcgtaacaacaatttcattctaagcacccattgtttagggagctgaattctggctaaaattaaggatggtattaataatgttagctctactatatatgtaataagttttcagatagcttatttctagattcctaagatagatttataggtgtgtatatatatgtgcatcacttaataaagaaaaagtgaatattattccttcgctttttataacatggtataagaacattccaagattagtattcaaaatttaaattagggtttatcacaaaactagagtttggtatttatctttcttagggtttctttttttggaacaccctatttggagtgcacttggattctcacctcaggcacagaaagattgtccagacactaaccaactaaac

SEQ ID NO: 236995 - DNA, 1890 bp, Cannabis indica
tgagcatactgcttggccctgacacatcttttcaacttagcctcgcgcttaagttaaatcagctcattcttcttatgagctcgttcaagccggccagcatcagacttcctcttcttccctgccacggacttaggagaaaactcctcagggtaaagcccgtacttcaccagattatcaccagaggtcaactggataatatccctattttcctccggaaactgggcaagtttctgagctctatccctaagcgcaagagtgaggggaggacggtgatatgttggaatctagtgaaaccgagtttgggtaatgctttgattcttcaccatgaagtactcatcaacaaaacgccccattttgctgatggccttggcatccgtgtcggtcaaccacttgaagcctggctgagagaagtagaagtaccccgacctgccttgcttgggggtagacttcagatcaaaaaaacaagcaacctcgtggggagaaggagcatcccatccttgggaagcatggatgatgaagagggcagataaatacttaatgcccttaggagtgatctgggccgggcagagaccaaagaagtgtaccacatccctaaagtacttgtgcaagggcatcagcgccccttgctggccgtgggcccccgaccaggcacacatccccttatcagggttcgtggcacaattgtcgtgggcgagaatgtagcagtccagctcgcccaggtacccgtcttagtcgagagttcgaaggcgcgcctccgtaatctcggacagaggacttacccacctggcgcccaaggcaccctgcctcccatgaggaatcaccgaagaaagttcctcactgacgtagtccacgccctgaaccaggatgtctccatcagcatcgactgactgcccagtctcgttgtactcccccaagtttgggggtccaacctcttcctctccctccgcctcggaaggactgaccagacgcgcatcgtccaactcctcaacctcctggacctcagcgtccccctcgcgatcctcctccatcgggacggtcgaatcctgttcgacgctgggcagagtggcgagccgagccacttgaggattggaagcatcgacaagatgcatggttttctttgtacgagccatcatcctacggctgggtacaaggtcagaagaatgtccttcggtagaaggaggactagcacaaagacgaggatggtcttcgtgtagaagttgaagtagatcctggtcgatttgatgcctgagttcccaagactcacttgagttcatctataaaagacaacacacaagatgagtgttggacggaatatcaaacgataaacaagtaaatatgccgaccaggagtactcaacagattaaagaacgactatgtctaaagaaaagtcagaactcaagaagtcaaaaagtttccttgagttagggcaaaaaagttcatgaagcttagaataagcaagttgaaggacaaacgcaatgcggttcagagacaagctctgtggctgtaaacccacatgaagacatgataaaaaaagggttgcaagaagtttctaaccctatggtttcctaagcgttgttctacaacatagttgcattcaaagtgtaaacatgcaaagaaaagcataaatggattcagagacttactcaaaagatttgagtgtctgggttcgagcagcatcaagccaaccagcggtcatctgaaggcacttcaacaactttgaagccagaaaactctctttttgctctggagtttacttaacagcgaaagggggtaaaatgagtttatatgctaatgctatgggtatttataggcaagccacaaaaagagggaaccatatcaaaggaacctcagatacctcagcttctcgcctcaaaagtgaatatgggaaat

SEQ ID NO: 236996 - DNA, 1253 bp, Cannabis indica
cctcttctagtgtggtaggaaatattatgcattggacataaccttttaccccttgcacatccatttgcatctcaaaatacttctgatgtgataagggatcctctttccttgtatacattttctaagttggcattttgaattttgggggtagttcgaggacttttatctccggggagaagggtaatctacgtgctcggtcaagttcgagatcagtgagttttgggctggttagtccttgtaacatgtttttaagttgatccaattgtgctttcacaaatggatgaacttgtttggcttgttgatcggcctgtgtcacattacgatctctttgaactggatcctgaatacagatacttggctggacagttggtgtaacgtattgttcgtctagaccccttcttcggtttaaatcagtcctgatgtcatgtgcggcactcaacctatcaaatactgaagtaccaggtggtcttggcgtctgacttgtttggtcggcaggttggccaaaaattttagttggggtgaagttgttacgtctaactccaaccaagtgagaatcaggcaggatctggtaatctactgtttggcccataggttaaacctgtggccgtggattggacggctgaccgttgtgactttctgcattatccctagctgcatacccttctgaaacgcccaaggggatactagacgcagttgttggttgttgattggtgacttagtaggaccttcttaacagtatagtgtcctgccttgtgcgatcatcaatggctgcttgctaagccctcagagtttccatctctctatccctccattttataaactgatgtcttttctcatcgaacgcaaggtttatagttgcacggagatcctccttgtcatggtgaaaagcgttattatgaccttgcatgagtgcaagggctcctcggaggttttgggttttagcatcatctccgacaggcctctgaacattggtcgttgatgggacctcagtgttgggagtggatttgttagctgccgaactagtgttcccagtctcttgcacgcctggtgtgatcctagccagatggcccacaattggaggttgtgaactgacctgctcggggtttgaccctggtggtcctctcgtgtttctaggggtctgcacgttaggatctatcactgtcgggtcgccgtaatcaataaggcctctatgagtttgtaccaccatcatgtatgcctattgttgtggtattttgcaacacgcaagtttacgt

SEQ ID NO: 236997 - DNA, 782 bp, Cannabis indica
aagattaattaaattatattaattataccagttacttcgccccacaataagttcgattgttaatgtatttcacagcttaattgtgagtttctttattcttaatttttttatatctagcaagaaattcttaaagcacattaccatctttttttctgcacttgacacttcgacttgacttgactcgttctttaattgatgcatttagatcatattcatcttctattatgatattatgtataataatgcatgaagtcattatattatgtaagtttttttattccaaagacgtgtcggtccaataataattgcaaatttaaattataatactctaaatgcgcgtcaatatttttctattttaaacttttttggtttgtttaattttaattttaatgtatgtttaaattaataatgtttgtattgtgtaatttttttcttaaaaaatatataaaaatttaataattttatacttatactacaattagaaaaaataatttatgatattcaagttttaatttacacacaatatattaaactctatcttaatcttatgaataccaaaaaaaaaaaactcttaatcttataaatacagatctatctatatatacaaataggagatataacacggagacatgacactccaaaattacttcaaatatttttattttttttccttaattttttcattttctttaattttttattcaatttaattgataaaccaagtttaaaataggaaaattaccccttatagtattttttaactttttttaaaaaaatttatt

SEQ ID NO: 236998 - DNA, 1523 bp, Cannabis indica
gtttgggtaggagtttggttgcgggtttgggtcccgagtctaggtctggattaggatccaggtctgggtcccagtttgtatttaggtttgagttggagtctggtcctggtctggttacggttttgagtctaggtctaggtccggttacggttatagatcccattctcgggtcccagtctacttccggtttcggttctaattttgggtcagaggttacgagttcgggtctaggttagggtctgggactgggttcaggttcgggtctagttagtgtcctggtctaggttcaggtcctgggttggtcaccagatgcagacagcggctatgggttcggtccaagcattgggtccagatctgaatcacgatcttgggtcccaatttggttccatttcgggtgccaagtcacgagctgggtcctaggttcaagtccgagtcgggggtcaggtactaggtcttggtccttgttccggttcctaggtccctatcccaattctatgtcacagtcccagttctggtttgggtttttatcctagtctaggttcgggtttgagtcctagtcttggttcagatttgggtctcggtctgggtttttatctgggttcgggttcgggtttaggtcctggtcttagtccgagtcctagtccaattctagttctagttgtgattcggagtttgagtttggattcaagttcgggtccgggttcaatccctggtttgagtttgggttcgggtctggatattggtctaggtctggatcaggctccgggtgtgggttcgggtccttagtgtgggtccaggtccagttcaagtcccaagttttgaactggatctgtgtctgggttcaattctaggtgtaagtcctgggttgcgatctcgatttgtgttcgagttcaggttcaggtccagatctatttttgggtcttattctaggtcaaggtctgagttggggtcccgagttcaggtctgattttgagttcaagtctgggttcaggttttgtcctggtctgtgtctaggttcctgtcctggtttttgttcggggcaggttttgggtccgacttcggattcccgggtccaggtcaggtccttgtttgggtttgggtccctggtctagatcccccatctaagtccggttcctaagtcctggtctgggtccaggttttggtttgggtcccgagtcttagtttgagtccaggtcccagtctgggtttgggtccaggtctcggtcacagtcttggtctaggttcgggttctggtccctatcagaatccagaacctgatctaggtcctggtgagtgtataggaccaggtcaggtccaggtcgcggtacaagtttgggtcccaggtctcaggtcccagtcctagtcaaggtctcggtctaggtctcgtctgggtttgggttatcgtttgggttcggttctggtctcaggtccgggttctagtcacagttttagttctaattttgggaccgggtttggttttgagtcagggtctaggtccaggttggggtcggggtccgagtctt

SEQ ID NO: 236999 - DNA, 1237 bp, Cannabis indica
gaattcgtcaactaatcttgtagtcgaaaattgttaagtaacctagaaatgagaagatgatgatcattaagataataaaagtgaagatgaaaatgaagatggagtgatttttggaggtttttctctttattgcttttaaagtctgggttatatcaaataattttccaatcccttctcacatctgagaaaggagtatttgtagactctaatggtctaaagtacaaagtggtcccaaggggacaaagtctcgctttcatgctgcatgtcgcaggtgcaggaggtgggcttacacctcgtacccttgtaactatatagtcttaagcgagataaggatgataactgttaagttgagattgacgagaaatatgtctacctcggaatatacagacaagaaggggatattcatccactcgagtagaataaatataataacatacaacggtcatcacgttacacatagcaagacagtcacctcgcaatactgattcaaatgaagggatgcgatcagatgaacaacctcccaagacttagcattttttccttattaattaagatggacaaggaggataactcatatcaagcgagatacaatcttctaagtcagcgataactgtttaaaagataaagataaagaacggttggatagttattagatgttatcccacatgtgattaaatgaaatgtggggattgtccacgtttcatgaacggttatatttgaatcaatcccaaaaagagtaactgtctacctatattcctctaaataggggcagaatccataggaaaaaaaaaggtaaatttgagagagaaaaatactattattcaaattctgatgttgcattcgacactcagtaaaatatccctaataataaggactcgtggagtatgtagattttaactacaaaaccacgtaaaaatatctggtattatcttatgattctttacttatttgtttttgtagcgtatttattacgaaaaggctatttaatttggttaacgaaaaatctgcgttagcagtttggtgcttttattgagaatcttggtgataaaaactcggaaaaatctctccttataaacttaatctactcatattcaatggttggtgatgatccacgcaacagtaatcaacctgaggaaataacccatcgtctaggaaaagagcccatgggatctcaaagaccccacacttctgaaataccacgtttaaggaggaataatggtaatgatgatcaaaattc

SEQ ID NO: 237000 - DNA, 1015 bp, Cannabis indica
atgaaaacaagttgatactccaagactatgctcccattgggcctaatcctcgacacaagcctcctcctctgccacccatagatgacaataaattgaacgtccaagactatactaactctcaacctaaccctaaacaacaacctaatcctccactatcttcttcattaaatcctttacatgcatgagttgtatgtccacatccataaagatacatctatgaattatgatattccgaaagtaataattatttgtatcataattttttttgataagttaataaattgaataattaatataaaagaagtgcaaattcatatacattatatttatttttatttatctttacatgttaaaaatgtctaacatattgtcatatgctttatttaacaatttttattctgtatctttaacaaaatactatcattattttttttgaatggaaaatcagcattttattagtcattaaactcagttacctactatgcagctatgtcctacaaaatactcaaggaatagatactgatgccaataaccagcaagtgccacatgaccatcaagccaattagctgaaggtacctatccgtaggaatcaacgacaaaggcctaattattatatctgttcttacgttccttagacgttcctcatgtccatactgaaataagaaattaatgagaattaaacaattattatttgtggtaaaattgagaaatcaaatttagatcttgaaatatggcccacacgtgtagggcctatcttacatgtgtcgggttacatataaaggcccatggtaattttatttgattattttattattaaaataagtcaaattaaattaattaattatattttaattattgcattaaatatattgttggataatctatttaattaaaagataatattaaaataaaatgatataactaatttttattaattagttatatgatatttatatttgaatttgaattaaattaaatattatctaggtttgtttataaccttatatatatatat

SEQ ID NO: 237001 - DNA, 732 bp, Cannabis indica
gtgttaccaaacgccaccaaagtaagacaaaatatcggggcatcacagttggtatcagagctgatcgtctgttagcccgtagaatactcacagtatacatacagaagatcgaaaaagacccctctcactatgtcgtcttaagtattctatgattagttaaaatctatgctaataatgtttgaatagtgtgtacactgaactagtagcttcttagagctagagctcatatggatgttttacttagtgaattacaaaatattcttcttatatagataaatgaagggtagcacataagaatggtttggtccatactcaagaatggcaatatcaacaccattgcaaactaaaattccgagaagactaagatgggctacacaaacaattttgagcctagtcataaggaaacgtgaaattaggataatgttcaatgtagaacgattattattaattttctgataataaccacacttggagcactctttgcaactgccttctatgattactaaatcattgttcttaggaattaaagagaaggactacacagaaaaagacatcaagattactttatgactcgaaaaaaaatactagtaattgaatacaccgggataggaagaaccattactctttcttgcaaatggtatcagaaccttgacccagcgtcgacgaggacgtcggaccccgtaagggggggtgattgtgacagtccgtagtcccgtgatccgtaaggggaaa

SEQ ID NO: 237002 - DNA, 847 bp, Cannabis indica
aatataggttaattataacctaacatatctcacctccagcccaatttaatgggttaataacctcccctcctcttacccctattagactggcccattacctccttctcctctctttggcccaattctaattcctttagctagcccgcattaccctcctcctccacacgcctgcttttcaaatcatatatgactaacccttatttttgaaatttaaacttgcttcctgatataggctcattaatatcaatcccaccattctctccctgatttttatccaacccatatcctcctttacctctgaaatccctgcccccatgaattgtgttatccccaaaatcaacctccatgattcttggacttgctccagcacttttctggtgtgtagtggccggcgatgaaccatcaaaagaaccttccataggctgtcccatgctatcccgaagtcaccttgcacctatttgtcgatgttgtttacgatcagaggccttcataaacaatccgtacgacttgactatggattctagcgattcctcgaacaatctatggcaaaacttctccgagtggcctataactccacagataaagcaaaacgtaggcacccgttcatacttaaaatttgcccagtaccactcttcgttgttcttgtatatcttcattctccttttaagaggtcgaccaatatgtattaacacctggacacgaaaataaaatctccatatcctagtaaaattctttggacagaaagaaacaaattttcctatgtaagccccaacaacccttaaaacatgttcactcttaaaccccacttgtaaatcataaacctggacccatatctccatagtattca

SEQ ID NO: 237003 - DNA, 944 bp, Cannabis indica
gctcaccgtggatgaacaaaaagaccagtgtggacctgctacgggcatgcgtacctacacagtccagaaagtgtaccgagtcaccacattatgcgaaaagaaatcctaagttcaaacatttaaatttgtctataataaatactagaagcagcaaccatccaaccattgtattactaatcttaaaatcccatgtgtacaagaataaaataaagttcactggaaattactaggcatcacaataagctctcttgatgtaccagtagtcggtctctatcacagcaaccaattttaggaacctacataaataatattcatgagaaatccctggagaacaattaactaagctcaaaatttagcaaatatgcaaagtattattggaaggatttattcatatatatatagttatagctctcatttatatacctctcatttataaatatatatttatacatatatacctctcatttagtctgtccctgcgcaatttttctcggcatgccttgtagttggagcaagaggcacccccacttgattcggacctttgcctagatgaacacatataatgtatagcaatgcagtcacaatgaaattatatagtacttgttatcaagtgtaggtttttaaaaaaactttgggataaaaagaaaagcaaagaaaagtaagtcttaattaatacctttttcgggagccaacaaccttgttgttatctgaatccccagatgaagagtcaacctccacactacagaaatagcaccatcgaaaaagtatgtcaacgaaaaagagtaaattatatataccaaattataggtagactgaactaaaaaaagagcaaagacagtgaaaaacctttgagagctgagagacgaaagatgtactaaactattcttctagcttcagtttattttttttttcataaatacagatgttcgcaagtgcttaaattt

SEQ ID NO: 237004 - DNA, 1037 bp, Cannabis indica
taatttgatttgaattcaaaattcaaattcaaatgtaaatatctaataactaattaatagaatttaattagtaaaagataattaatgaatttaatttgaattgttttagccaataaaataatcaaacaaaattaatataggcatttatatgtcaccctacacgtgtgactaggtctacacgtgtggatcatattttaagatctaaaattaatttctcaattttgtcataaataagatttattatttattctaccaataaataataattgattaattctcattaatctcttatttcataataattaaaataaatattattttttctaaaataatatatatctgcctttaatattatttaagaataatattatatttaactaattaatataattttatctaataaaatggttaaatactattcattatgcaattcataactgtcataattatttttaaataataatttcacaaattactatttcgcccttaagaatttatttctcatagaaattaagtcttactcaaatgcactcatcaaataaaattttcccatgtgcagtgttgtatagaggtgactcgggaaccatgaacctatatttcgaggctccaataaatacttaattattatcgatctcatcaatagaataatctagtttattatttttattattattccactataaatatgaaattgtcatctttgatcatatagaattatatttacaaaatttttacttgtagtccattgatataattactttaagtagttcggcctccaattattagttcataattagagttggtcaaaattactattttacctttctaattatctcttgacttcttatgtactgttaatttaatatgaacatttaatctataacttattacaaatttggatccaactatattagcattcccaaaattaacactataaggaacctaatattcattccattaggaaagtttagattctactattgtataacatgttcccaaccactcatgtcattgagctctcaaaacaaaagttgtaa

SEQ ID NO: 237005 - DNA, 1071 bp, Cannabis indica
ttcatataattaatttaaaatatcgcatttttaagcttgaaatataaataatatatttttattttttaaaatctaattatttgaatagtagaaactaacaataataattataaaaaaaagtgaagaacggtttggacgtgttaaccccgaccaaactgacgaaattattgggcgggttgaactttttttaatttttaattaagcgtgttacaattgaatatttgcaacccaatatttatattgggttgataaaaatatgctataaatcgactaaaccgaccgatgtacacctcggttatctgtcacttattcaatcaagataaggacaattcaacaatacaagcattcaaacttaagtatgtgaagaaatcacataagcccgcacaagtaaagtgacttaaaccacatgtttttttcacttgagaatttcatcaaacacttgggggaccaaaattccactatccaaatttatgcctaaagtttgtaactcttgcccaactttaaaaattttactttcaattattcaaatttcaatcccaatatcaaaatcaattcaaaatgatttcaaaatctatcagaatgtctttcacatatcacataaccaaacacattcaagaaaaaaacattcaaacccaatttctatatctaaaaaaaattctatccatgcaatttgtacaaacactaattacaaattaccaagaaagtaaaaaagagttagaaattaattcaagaatatttccaactcccaaaaaccttgaagaatgcttgaaaattctctttctcctcaccaacaaaggaccacagctaaaagacgtaattgaatttaaattttttcacataattaaatttaaatttcacaaattctgagagaagccactagaagacgtaattgactcgtggcgacaaaagtctcaatgggtgctccaaaagatgacgaaataaacaaaaggcgaaaagcttattattttcaagacaaaaagggtacaataacaaaagtcattcctgcattctcgataaataattttgggggtaaaatttatacctaatttttgagaaatcaaaaaagtcaac

SEQ ID NO: 237006 - DNA, 1444 bp, Cannabis indica
tctgatcttctcctcaaaactcagtttgaagatgcaaaaaaatgtgacaccccaatgattttagcaaataagttgtcacttgatgacagccccctttttgacaaaccagaaatatatcgaagcaccatcggtgccttacaatatctaactatgacaagacccgatcttgcttactccgtcaacaagctcagtcaatacctaaaggcacctacaacaaattattggaatgcttgtaaacgggtcttgagatacaataaaggcactacacactttggtcttcatttcaaaccttctactttactcagtttagaggcctattcagatgccgattgggcatctagtcttgatgacagaaaatcaacaactgggttctgcttattccttggaggtaatctaatcacctggtgttcaagaaaacaaagagctgttgcccgctccagtacggaatcggagtatcgggctttagcttctgcagcaacagagatggtttggttgagttctttactcaacgaacttagtgtcacactacaaaagacaccacctattttatggtgtgataaccaaagttctcaagcattagcactcaatcctgtttttcacacaagaaccaaacatatcgaattggatgtccactacattcgagagcaaatagcagacaaaaagcttgaagtatgctatatacccacaactgatcaaacagctgacttatttactaagcctttgtcctctcctagatttcaatacttatgtaacaagctaaatttggccacaaccaaacatagcttgaggggggggtattaggacagttagttaaatacagttgagggtagttaattctgttacaccagctgggtccttaggtggagttgcatctccttacagctggttttagtaacagaattctgttactggctttgtactcactgcacatatatatattacatttgagagcctctgatattcagtcaagctcattgtttcactttcttcatctcaactatagaggagtggagtgcttggactgaagagctagctgaacaagaatgtcaaaaacatgattgttgtaccaattttttcagcaataatctattatacttggcataatggaaatacttgtgtgtttaataaatttacttatagtgtggaaaaaattgtagatatgattagaagggatacaaagtatagacttaacaatttttattttaagaatttgaaggagaggaaaggaatttgttgatgaagattggctcattgtagctggccgttaaggctttgtttggttgtaatttgcttgttgattaataaagatttgtcttttttgataaaaaaagattgcaacactcgcaaattgtttcaaaatcaataacaaatgcatactgttctttaatactcttcacaaaaacaacaaatttgatgatcatataatttgtagtcacacaatcat

SEQ ID NO: 237007 - DNA, 916 bp, Cannabis indica
aaataatatgaaatattgagagagctaagattaggaaaaaaaaaaaacatatagattgccacctcaactccttaatgttttcctttatatatattgattatattctgtattaattgactatataaaccattaaataatgaatacaatttatttttaataaattttttttgccttttatccttccatatatattttttattatctttcttttttaatttggtatcagagcttatgacttcaacttcaagagtttttgacggtattacaaaaatatattttagtgacacacttcaagagagtttaaagatttttagtgactcttcactatgggtcactaatgtgtttaactgaaaaggtaatttttagtaacccttcaatgcgtgtcagtaagaaccttgtatagttcctcatcgagtgtcactgtatacttttagagtcctaccttgttaaagtctaaagaaaccaactaccatcatatcgcgtcgttatatttattttttaaaatattatataaattattaaaataataataaataaattaaaaataattaacaaattattttttcattaactattattaaaaagaaaaagtaatttaacatttttgttgagaattaaaaatttaaaaaactacaaataaaatgtattatctcaaaacaaaaatactatggatcaaaaacaattgttatacattaccatatttatctgtaatattacacacaaaataagaagcaaaaattaacattttaacttcttgatattttcaaacccaatagagaaataaaaagttatatatagctcagccgaaccgaacccacaactacttagaaccaaaactccaaccactgcttttatcacctgcaaagaaaagagtgaaggcaaaagatagtgagagagagcaaaaaaaaaaaaaaaa

SEQ ID NO: 237008 - DNA, 1152 bp, Cannabis indica
cgtttatgtgaggtcgattacatccacatcggccaccacttatcttgcacctactgaaactatgtgcagtactccaattcaaaaagaatcccatcttcaagatttcagtatatttcattaggagcaacttagtaaactctaccccatcagctatttcagcaggcacgttaactaaagattggcatgagtttagggaaaagttttcttgttgcaatgcttccttatgaaaagcagcaaatgaatgatgactttccattagtatagtagtcaactggaaatggaaagatgtactcgatgggctttgaggtacagttgtagaagaaagagaagtcaatgtgatcagaagcaaagttaaatggggttgatacaagactaaagttatgttgaggaactgggcatttctcactgtaaactgcagtgttggctacaagaaaagagttgttggagtaaaatatctgcttcatgatataataattattggaaattctaagaacaggatttttctgactgcaggtgatcgtaaagttaggatgtccacaaaaagactcgtgttgatgaggaatccagaaaaggtactaacgtttggtccatttccgcatgttcgaggtgtgcaggccttgaattgttggtcttgggagaccgtatctctctaacaagtgatgaaaatgatgatgaatgtgcatatgtggaaatggttggtgaatttgaggatgtgcatttggaggaggatagggaaacagaaaaatcagagtacaagaaaacacaaaattgaaagtgataattacttaactatacttgaattttgttttttttttttggctttgttttacttggatttatgattgagtttgaaaagaaatagaaattcaacacaacaagaatgcttcaagcaaaagtctccaaattttataactcgaaagtgggccctaagctataatcccttctaaatgaagcataaatatgtcttccaccattttaaatggtgttgaataagttgaaacaagacattgacaaaatggaccctgtgttttgttaaatgacaaaatggaccctgtattttttaaaatagtacaaataggatcctgaattaattttttatcaaaataaagtttaatataatccgatctaaaagtgctatgacaaaactgttta

SEQ ID NO: 237009 - DNA, 1425 bp, Cannabis indica
cattaccatacatgaatactactactacatgtgtgggcaattatcaatttttaccagtttttccactctccttcatttggattcaaataccatcactaacagtcattaactataagctacactatccttgatcatatacctaaacaattactaagattaagattggtattattgtttattattggagttttattaatatgtattgtcagaaaaaatttaaacaacagctcacgatgcgttctttgtttactaattatttaaaaccataacatatcaaaccacaattttaaataactactcttaatctttatggtcatactaaaacatttttttaaaaaccacactattctttgttgaataaattacaaagataaatttcaaggaattgagtaaaagatattatgatgttaattttgttttagttttgattctacttagaatgttatatgtcatagttatttatttatgaaaactctttatttaaaagtgttaactcaaaaattcgttaacgataatgaaaccttgtaaataaacgtaaaatatttatatctgctaagtatatgtgaaatacaatatttttttacgtgattttgtagttaaaatttacatactccacaagtcagtattatttctgattattcttctacagtaattatggatacacaataatatttctaggtatttctaacactttatcgctgaagtctttttctctccaaaaaattgatccctatactcgtaggctccatctctatttatagaatttttaggaatgacatttactctattttgattttatttaggtaaccgttcatgaaacgcacgtggacaatccccataagtggataaatgaaataaatgctaataactgctttttatccttatcataaagtagttttctttgccgagataacatattacaaatatggcccgcgttcttcaatgatgttcaagaatagctggtcgtattccgtgagacgctagttaaaacgtttgtcctcgcgtttgctttttatgacaattctcgaaacagcctttaagaacaccgagataggtcatagtttgcttattttccttagtctttcaacatactcatgagtatgtggatcaatgagtaagaagttcttaaagaattcattttctaccctttccaacaatatcactttggatcttgtatgcttctgggttatccctgctaactccaagataatcacagaatgtcgtcgcgtctaaccatgtacttttatcgtcgtcatatgttggcgttactgtaacacaatgtgagatagatatctcaattaattgtagcctatcccaagataagataaccgatgaattaatttatgaatcttctttaattttgagactaatatccctgtgtcatgtctaggggtgtgcataaatcgatccaatccaatgacaacc

SEQ ID NO: 237010 - DNA, 1715 bp, Cannabis indica
tttataaacaattggagaaatgatatttttttttatgcatttcagtttagttttgataattctttgtaaaatgtctaaaaattttcgactacctgtctagagtgttggagaccattttctaaataattatcgaaattaggtcaaagtgcgaaatgacttcgaaaattgttttgcgctttggcctagttttcataatttttcgtaaaatggtttgtgtctgaaaatttaacaagctgtctaaacattacaaccaactatctacaaaattcgacatgtctagtctataatgtcagatgttattttgtaaaaattatcgaaatggacctaagattattagtattaaaataatgtgcattgttctacagggattactccatatgcaaatctttatcattatgatcttcctgaagcattggagaaaaagtattcgggattgcttagcgaacaagtcgtgtaagtaccataacgaaaataacggtttcgttttgaaaattttaagccttttgcttatgttcaagataagtaaaagttttaacttatttattctgtttggacaatcgtgttaggcaataacttctcttaatgtcttttatgcaaacacttaaaaaagtacttttttaattctaaaaactaattgtagcttaaagaagtttagccaaactaagcccaggctagaccagtgcctagaacccacctaaattcagggtccaaaatttttatgtagtatacttttctgcattaaaaaaattaatatttttgaaattttttgtgaaaagagactcaataatactcacactttactttagatataacacgcaaaatttcttgggtccattattactcaaggtcggccctgacagagcctatatatctcctagtgccttaacttgttttacttgattttgcagaaaagattttgccgattatgcagacttttgtttcaagacatttggagacagagtaaagaattggatgacattcaacgagcctcgagttgtggctgcgcttgggtacgataatgggcttcatgctccgggaaggtgctcgaaagcatatggaaattgtagaattgggaactcagcaacagagccttacattgcagctcacaatatgatcttatctcatgctgctgcagttcatagataccgcgaaaagtaccaagtaagataaccgattcgtgtaaaagggaacattttctttttgttcggcttaacttataaaatattttgctttgttagaaaaaacaaaggggaaagattgggatcttgttggattttgtttggtatgagcctcttacgagatcaaaggcggataactatgcagcgcaaagagcccgagactttcatgtgggatggtaagaaaatcatctttggcaaaatagccttctctttttagtaattttgcattgtcaaaatcaatttgtgaaaccgattctaactaacttaaccaatagttagttgaggttgttagtcttttgaaggattaactttcaacaattggcgatgagaaaagtagtttatgcatcttatatatggtattatgtttccacacattatcaatgtaggactctttaacaagtcttccagacactctcaatgccttgtttagattccaaataaagactatttcgcaaaaaattaccaaaagaacaaaatttcacagtgacatgatctgttttcactactaattacttaaataacatgcatagttccaat

SEQ ID NO: 237011 - DNA, 1395 bp, Cannabis indica
aatattatcacactcaatttttgtatttaatttttagagaaaatagggatacacaaatacctgaaaggcagtgagctcttagtataccacgaacaattcaaaatgtgttgctcatccgctttttaaatacctgaacaaaagatagaagtcttgcttgtgttagcatgaaaacctaatgtttcaaataattttttgaaggttctcaagagaagtatcactgactgcaaatccccacttgagaagagtaaaagatcatcaatgaaacacaggtggttcaactttaaagttttacatcttggatgatgtttacaacattcatctgagacaccttagcaagcaatcttgagatatactccatcaccaacataaacaaaatgggagacatcaaatccccatgttgagcccactcttagaagaaaatatccatacaaattgccattaattaatcattaagaaaatttttggagttgtgacacactccataactaagttgacaaatttcatagaaaaactaagagcaattgacatttcttttataaacccccccattccaccatatcatatgctttcttcaagtctatattgatcatataagaagaactattatgtagcctcccatactgtttaaccaagtcttgacagattaaattattatggccaatgtatctcccatgcacaaaaccactctgattatcaacaatcaaacttggtaacacttgtcttagtatattacataatacattggtgataattttatagatcacattgcagcaaacaatgggtctaatatcactcacactagatggacatttaatctttagaatgagagttaaactagtaaagtttctctactacaaaatgcacttttggtctcagtttaaaattgagacttatacctttagtgtcggttcataaaaccgacacttatactgcagtgacaaaacgttaaaattttggtgtcagttataaactgagactaaagagctttaatgtcattttaaaaccgagactaaaagtgtatatatattattttttttcctttagtgtcggtttaaaatcgagactaaaaggggtatttgcaaaaaaaaataattattaaaatagactttagtaattccaaaatacaaaaatttgaaatattatataattaaaataaattatacagataaattaataaatataaaaatacattaaattttaataatgcatttaaagattattattacacaacaaattacatatcacaaaatatccattacaataaataataaatagggaaatttgcggcaaaagtccccaaaaagatcactttgatgcagattagtcctcaacctccaaaaatagcggacaatagtcctcaaggttacactttttatttgtccgttagtcctaatt

SEQ ID NO: 237012 - DNA, 1514 bp, Cannabis indica
ggattttgatttgttttttgtatggagattattatccgtatttttgaatgaggacatgtgtagttttcaaagccaattacaacttattacttcaggcccaaccaagataatggactagatccattagcaaagtcaactcttctggatgatggaaaaatgactcgtccaggaaagataatcttcctgcacaacatgaattcgaaagatatcaattggagcgtccagagaagtaatcaacaagcatccaaacatccaattatgtatcacatcaattaaataccaaatctcacgacatcaggacttagctcccaggatctcgtccgaggatcatatcttcccaatatagaaaaatagtaattgatgatcaagcattaaatgtgtctttattatctacaaaagtaggacaaagtttcaacaactatcaacgtgatgtggcattcacatcagcataccgttggtgcctcttgggctggactccaccagatgggcccaagtcaatatattatttgtatttaccccatcaatgggagatgcgaactaataagaaccctagcactataaatataagaacacccattcatgcaaagagtttaaatctcattcctcaattgctcaggcagaatctatggttcaaacatatgtgtaacataaatgtttaccagtcttattgtaatatattgactcgtggactaaggcttgttaatgtcccaaccacataaaaactctggtgttacttcttattattcatcaatgtcttgagctttcacatatattttgttattttaagaaaatctcggtaaatattttagtactttcattgagagctgaaaaaagcagtgatactatcaaaagttttacactgtaaccatggtaatcacccgaagcaaaactggtggtcgcgatggagacgctcctattgtaaaactctacttatttaggagcactacaatattttccaaattaatgtgttgaccttcgctaatcaaagaattatgaaaaaactgtatttttgcaaatgccaataattttctttaataacaatgaagaaaaaaaaaatagaaatagtagtgtagaatttaaaccttgacacaagagaattgtatgtggtatcagtgttctttcaaaaactactagtccaaggggccatgcccagagaataaaatcaattagtaaagtatcaaatattacaaaagcaattgacttaaacaaatttaaactccctctagtgatttgtcgcaaccctttgtagtctaccttgctaatctgatctctgaagcacaccaagtagtgaactcccttcagctattgatgtatgcttacttcctctcaaagtaaggcttaaacaaatcttctcccgtagatatatgctcacttcctctcgaaatgagattggaaaagtcttttcccaaagatccacgcttgttcaaagcttctcttcaacctattctatgaatagtatgggatcatgataagaaaaccaaaacctagttgaacactttaagtttttacaaatg

SEQ ID NO: 237013 - DNA, 865 bp, Cannabis indica
cagattcaatgaatataaaatattcatttatcagaaaatcaattatttatttatttccttaaatagaaaatcatttccttaattagaaaataatttccataaataaaaatattctaataattataaattgaaagagccatttacaacaacaaaaaatatagcagaagagatttcttccaaccaattataatcattttttaatactaaagcctgtttagccaagctattagctgcttggttagcatcccgtctaacatgagatacacaaactgaagagagataggataattgatgtgaaatatttgttaccaggtcttgaaaacaagaatggttagatgctagaaccatgcaaagagttatcgagaatcaatgaatctgtttctacaaaatcaagttggtagccaagatatttagcccaataaagaccataaaacatggcttctacttccatttcttgtggtttgaaattgcctattattggttttgcaagggttgcccgaacctgtccatgagaatcgtttcataatagcacccaatccaattttattcctcaaagaatcaacagcggcatcgacatttaattttaatttattctctagaggagggacctaagggtgatgtaaagcaggagcattgctactcattgcagcaggaattgcagcagtgttatgctgttgaaaattggtgatgtatgctggagctttagaaaaaacttggaatggagactgtagcatttttccatgcacaaagttatttctatcagaccagatatgccacataatacataatatcttctccattttagcagtcgaatagattatagaaaggtaaattagataatccccttctcgcatttgatttgcca

SEQ ID NO: 237014 - DNA, 908 bp, Cannabis indica
aatgcttatgttaatgatttgagtatttttattggtatattagtagtgtttagtacattattagataagtttttttaataaagtgatattccttaaaaattattatattaaagctaattaggatgtttgtccttccgaactttaatatgtaccaactcatgtccctaaatatttaagaacatttaaaaaaatttcttaaactattaagattgctagatttaaaaatttttgtctaattttaataaaaaaaagtctaacattttaggggtcataatttgatacatttcaaagttcgagggacatgatttgatacatattaaaagctagggaacatgatttagtaaataacaaccaacgaattagtaaaattgaatgaaattaaacaaaagtccttaaatctaacaatgtcaatagtttataaaatatttttaacagtcattaaaattcggaggcatgatttggtatatgtcaaagtttagttaattagtcttatattaaattatataaattttgatacttaattatactaatagcgatataacaccgatgaaatactagacacacgattagtattttttaatatttctttaattattttgatatatttaaagagaaatgctaaatacatataaattttttaagcactaaaaataagtgatttaaaatgagttcttttctctttaaaagggatcaaaaataaagcataaaatctactccaaataagctatgcaacaaataataatgtattttataattttttttaataataaatagtaactaaggtcctccctcgaggcataattacgcggtctagaggactaaaaaaatagtgtgcgaagaaagtgatatgggtgctacctcaaatggctgggtgctcgacccaatgccaaggtatcctctgcgtgctc

SEQ ID NO: 237015 - DNA, 1245 bp, Cannabis indica
aaaaactaataaacaactcttttgaatgataatagttgcaaataacatttcaatgtgaattactatttttatctatcaaatcaactattaaacaactattttgaagcatgcaatcggtaataagaataaattcaacaattcttgttagcagatacttaaacaacaattatattactggaaaacaacttataaacaattgtttacagattaaaaccctgtcgcttctaattatgtgcattactattttttagatgcaatcccttcttgattttttgttcagatttaccaaatttccttatcctttcaatttgttcatgatttcctcaatttataacacattttcaattatgtagaatcaaaaattaggaagagattcacgaagaaattgttgaaccttcaattatttctctgattcgattatgggtgaggttcaatgtttttccgatgtccttctcttcgaatcctctcctttgtacgcggtgagtttttgattctaggttgtttttgcattttttgttcagcaatggaggttgattactctttttttttctccttttcgtatttggatttttcgggatttgattgctttttccttgagatctacatcttgttttgagttgattttcctggtttttgaaagaaaatggtggagatttggttgtttggggtggttcagctaggtcacgaaaaaggaggactctcctccgtttattttgggttggtcggtatttttgtaaatagaaatttttgttttctatttatgtttattttttttaggttatatatgtaaattgccttcctttttagtttattatagaaaaaattctaaaaaaaactcataaagactgctacttcttagagcaagaataaaattattttaaatttattttagtgaataaaataatatttaaattatagaatattaaaataatatatgtaaaatatatgttatttatttttatttttatatattattttaatgaaataattcgcgattcacacatatttttacaataatataaaaattttatattgctaaatctttgtgtaagcttatgtactaatctatcctactataagtgtgccttttagctgcttttgttctctttatgttgcatatatcattcatgatataattagttccaaacttctcaccccaaaattttttcttcttgccatatatatgtctcaaagtatttatattttttatgtccccatctcttctatatctatatatttatataa

SEQ ID NO: 237016 - DNA, 576 bp, Cannabis indica
tgttttgggtgtgttaaagttaattttgggatttcacagcacattcgattggagtatgagtatgtgtagtattagagttgaaaacacatattagtttaggacataaaatattatgtattgattatatattactgtatgacagaattatatatatagcagtgagtttaatattgcttctacatttttgatacaaaggctttttgatacaaaatagggtaaaagtactatttcagttccactaattcaacttattcatattttgcttcctaattgatgttcttatatccatggtgtgtgtcatggagcattaagtctccaaatccaagtgctaactttttttagcattcaaacatattatttgggtgtatgtatagcattatttaaacatgaaagctagaattaccaagttgttcattgataaatgactgtggtggacaccattttttggcatatgcttgagaacatgtgacagcatattgcccttttcataaggggcattcacataaccaaacaaagaaaacaaagtttcagatttctcatcctggccaatacccgcacagcacgctcaggttggtc

SEQ ID NO: 237017 - DNA, 1942 bp, Cannabis indica
atctatattaataagtaaatttgattatattgaaatgagttttatttagggcataaaaccacacacctacatcctggcaggaacttggtgtgtagcttacaccctagcaggcacttgttgcgcaacttgcatctagacaacaattcaagctaagaattgagcttcaaccacccacgaaaatagggtataaatattagctatttacctattcttggggtataattaacctatcaattgtctattattttattatgtaacaaatatattatattttgtatttttagggatattaggttattattctcttataagctctcctatataaagagcatcaacctaaacctaatttctctaagtcttaagcatctaaacttgtcaagctctaagttagaaattctagctctctctccctatctcttctacactccctaggcattatagaagagactaagtgtctttcatctttctcacttgagattcgcctactttcactattgtaatctcaagagagccacttcagaatccacaacccctgtgatctaagaggtattatctctggtattaatacaaccaaaaagggagtaggtcattacccgctaactaatgggactgaacctctataaagtacttatctctttactttcctgttcttattgtgtacacttgataatatcggtcagaaatacgactccacggttagttggccaaatcttaggtcaacagtttcgtgctttcattaagagcaatgtcaatttatctgatccatgaccatggttaaaacaaggagaactccagctacaactcctgcctcatcaggtcttccttaagaccctatgactgctaatcccaatattcgtgttctagccacaacttgtatatccacgaatctgacagatgtggccaaccctaccaacccagcaagaacaacaaacttgaccaccacgacttgtcaggttgacattgctgatacggttggtcccaatggccaacctctattgcctagtgtagatccaccattggcaccttgtactgagggtttgaccaacgtggaacaacccctgggaaccgcaactaactctagttcccagtattatgctagggaaccagggccaggaatcagtgagccagccattggcgagcctcacgtggatttaggagaagatctcaaattggccagacttagagaggttgtttgccaagtcgaccaaattgaagaaccatgtgttgttggctgcgatgcattcacacaacaaagtcacaaaattttaagatggatgggtgacgaggagtacgtcctccaatctcattaggtagaggtagaccgccgtaatatataagttagtgacctgatcaggcagttcaataaaagatcttcagggaaaggtcaggatctgattaaagatcctctccaaggtagactagttgatagattgggaaaggtttatagacaaacagtccaacaacgttctttaggaactaggacagacctccctacagatttagtggtgggagtagccaaactctggcaaccagcgacttggggggccgactaaggaattcaggcacaacaacacccccacttggccagtgtttggcaagccagctccttagtggtgcacccctactggtcaacaaggtgaacttcctccctgaaacatttgggagcaagtcgtccaaaggccaatctttaatcgactaggtcaaggaatgggtggaaacacccaagacaataacaactcgagaagtgaatacaatcacttcagatagttagatccaccaaactcaaacaattggtgtgatctacccctgtcaataaagaggcatcacaagctaatcaagcaagaacgagcgcctagacattgcccaacattgggtatccggccatgaaaaatttcccagaaaagggctagccagccatcgccagttacattacccagggctg

SEQ ID NO: 237018 - DNA, 691 bp, Cannabis indica
tttaatacatagttatacacacacgttaatatatataacaatgtagaatatacatatatatatatacatataattatgtataataacttcttgcagtgagaagaattcaaagtcataaacgtaattggatcggaagtttactagatctcggcggctctctctctctctaattcaaattgagttatatattttaaaattaacaaattaaccagtttatatacatatttatatatgtgagcatagttaattgcagtccacatataatggaacatggtagcatcgtgatgaacatattcaaccatttatataattgcaacaatataatataatatatagttatttcttatgtattaatttagtgtgtattcgaatattataaaaaatataaaaacatgaaaatattattatgagaatatgtagctagtgaagtagtgtggtttttttacacaaaagcatatatagattttccaataatattcttagtacaagtatccgatttagaaacaaggttttcagaacttcattaattaagtgttagatatgtatagaagttgaatttatcagcttatggattcattaattataatattgttagcatctatacaatccatataattaactctggatcatatatttgttagacttttatttggacttacattaaattttattggttttattaaaacttggg

SEQ ID NO: 237019 - DNA, 1290 bp, Cannabis indica
ttatttagggcataaaacccaaaacctttgccctcttcaaaatcatccaactcgagcccatttcgttctcttcgaagaccggcctcctccctcacctccttgcctacaactccattttcctttcttctcttcttaaagcccgaaactccattaattgtcgaagctcgggctttctctcctctacgccaccagacaaagtcgtttgtcggcctccaacgtcacctccatagcctacgacgagtgtcacgggccgcctatttggacacccccaagtaggtggaacgtgcggcacttgctggcacaccgagctagcaagtcagcctaaacgcgcctgcaggcaaacaagttcaaaggttaggcacgatacatgtctcgcacatgttgagtgcaaacaagaagcatgagcaagcaaacacaaagcgtccccaaggaccaatctcacacaacccacaagcaaacatatagacaaatggcacgcaatggcccaacaaaggcaacaaacaggcatcacaaagaccatatagaagcatacacaagaagcatggataaacatcgttttattaatatatggccttgatagggcaagggagtacacagctgggcccctatcatgctggtgacaaggtgcttcataagtcacctggtcaccccccctaaagagcttattggggttttaagggatttccaggaacatagatgattttagctctgtagacatatgtgaaggaaatacaaagaaagaaagctaaacaacaaaaggttcccaacccccatgaggtgcttggtgcaagacttgactaatgatcaagcaccaaggcatgctcatgttacaaaataccccaatgaggtgcttggtgcgagacttgactaatgatcaagcaccaaggcatgctcatgttacaaaatggccctagtgtgggtgtgccatggggcagcacgccacattctcccccacttaattgttcggcgtcctcgacgaacctgctgcatgatcttcaatcttctgtataaactgctgcaagtcctccgccttttcccagctgatctcgtcatcagcaaggcctttccatttgaccaggtactcttttctcttctttttcttcacacgaacagttctttcggcaaggatttcttctggttctctgctgctgcgtcgttgaatgctgatgtcgtccctggtagactggttgcgcgctggatcttctggatcttcatgatacggcttgaggttgctgacgtgcaggaccgggtgtatcttcatccatgaaggtagttcgactttgtaggatg

SEQ ID NO: 237020 - DNA, 5717 bp, Cannabis indica
acacacataaagtggtaactcaatcatagtgcgtaaggctatgaagaatccatattcaagagaaggatattcgggcttagatcttggtgatactctgctacagataggatataacggttagagatctgagtggaaggagccattataatttcgctgccccaactgtaaggtctctcaaactttatatgtgtgtatttacattgttttaaagattcatatttaggatgttaaataacatacattgtagtaaatctagatcctggtaaaacttattccaacacttacaagaacatgaaaccaatgtaaaatataagcaaaaaacatattataataatgaaaagtttctactcgtgcgcatgtgtagggggaatcaagctgggagctgcaacatcctaatctccaagattctggttgggcatagcctctacaggatggtcggccagtagcctggccggccacctcctccgtgggcttgctggccatagcctcgttaagatggctagatgatgacccctcagtctggacaattgtcttgcctaccccctagctgatttggtccgccagcatcttactttcatagagctccttcccctgagtgagtgatttctcacagaaagtagaccatatgtacctaaggttgacatcaaggttatgcaagtaaaccacatagaggacctcagaggacaagcctaaatactcgtacttaatggcttattgtccatatgggctagtggcttctctcgatgctcattctcaagcttaatctccaactgtgaagctttagcaacaagcttggtcactacttggcacctgtaccaagtaagtgttctaggccattattcaggtcctaggttttctctcagacgaacctgtgtctaaacatgtgtgtccctctctatttgaagctcgatctctttggcctttaacttatcccaatgaacttcaaaagagcccttggctctatcatgagtaaggctgaacttcaacgtggcctaaaataaaaaagaaaaccaagttagaagtagaagatgacctggtcagctagccccttagtggtgcacttttggtcagccaacccctgagtggtgcccatctagctggccagcccctataattgaaataatttgagtaaaataaaatataaaacttatagatgttatgtcccagtggtcgctggatgtcgagcactctagctcctgcagctccctgttaatgataggtagagtcctatcaatatagttccaagcgacattagcaatcctctgaccaatggatgaacaagcccttcggcaagacttgtgggcccccgttgcctgaagacctacttatgggtgaagtcctccttgaaggaaggtccatgattatcggctggccagccattgcaggccctagaggagggggaggcatttgagactgagtggcataaaaagatctaattgtttgggcaaccttggcttgaggatgacccaaagaagaaccactagaaaactctcctggaagatccctcattttggaggccatgtctgcaaaaataaagtaacaaagttagaaatacaagttacaagttttcaatgcaagataaaacaaaaagttggtactatccccagccgtcaacctaggaggaggaatcatctgagtcgctatcactaatggcagccttgcccttatctcttgaagcagacaggggcgagtaggccttgcagaatcttggcctataggtgtaatcaataaagaagcatcactaacaggcctctgcatgctaaatactgctgtagggccttctccctcttctccatgctcttagcaagcctagataggggaatgtcatcatccggatcaagtgtatgcctaccccacaggaaagtctcctctactactggggcatcatctgggcctccaaacgagcctgtagccccctcaacactagacattagaggatatagaccatacctccaaaagtttgcttcacaagccaacctcatgatgttcgtcctctcaacagggagtgataagatgtaattaactctatccctcatctagcgagttgcaatggagcgtgtgtaagtcgaaaccctctgaaagcagtgattgacttgccaaatatcctagatgatgaagtaagtgctagagtaccctccaaccattgacagagttgtgctattagtggtacccaaccactagtagcctagctggctaaagtaaaactatccattttgaatttatcgcaaaacagacttcaacttaaagaaataactgttcttatagggtgagggctggggccagccctactcttcatacaaaaaaaaaacatggccaaaggtactttatatcctttggagtgatctgagttagacacaacctaaagtagtgggctatttctcataagtaggtgtgcaaaggtagcaccgctccctgctcaatatcacgctctgactaggccatctaccttaatgctaagcgatgtgctagttggtctttagtgaacctatcacaccaaacatctcttaccagtccttctgtctttatctcatcgaatctcttggtggaaatagaagaagggggagatatccaccgttcaaatagtccccatggtcgaggagtctagggtcagcagcctcatccatatcatggtttattttgaccatagagagacgacaaagactactcaatggcggcacatcctcatcatatgaatccaagggattgttcgagaatacaacacaagtcttgtacttcctcctggcatgcacaaccttctcagcctcaaatgcagttttagccccagtcgaggcctccttgtcttggccagccacagggtgcccggccacaggtgcctccacctggtcggcccctggctctccaccatattgaggttgtgtagcctcttcaacaatatcaactgtctccctagtaaccaacatagaaatatgagggttgtggggtggtgccctatgacatattttattggtccttgccaacaaaccttgagtgtctggcaacaaaaactatagtctctacagcaaggacatctctcgctgaagaaattacccgaccaatgggcaaggtatcaaacacattgtcctggatgatataagtcaaagaactagggaagaacaccctacaccctaggttcatctcccaaataaactgactgtagagttcagtaccaattcactctaaatagtgatgatgttggacctctggtttcggtgaaccgccgtggacctcacgatcactcgaggaactattagagggatcaattgaacattggtcttcaaacagaagacctagtaaacctttgtcaatatgattcccacctccccaatagtcattcgggatcattttatgctaaagacaaagggaggtgagcaacaagacaaaccaacaagatttagacaaactctagttaattatacctacgaatacttgggaaataattttattatacaaggctgggtatcagagatgtacagtttcaagtgtatgacttagaaaaatcattgagtcttaagttgatcattcttctacaataaactcaccctaaagtaccatacagagttcttaagggaaccgcatataggaaaaattttgtacaagttttcaaggccatgacaagattcttgctaaggttaaaagaggacaaaaaatggccacccccttgggacaaaagccttgggttagccagtgtcccaaggcattaaagagtgccgacgagggtcctttaacccatacaagaaccgaccagggtcttttgacccatgcaagggccgactaggattctaagtgaaaccttagaaccggccaactcccatgagcaacaccatgggtctgccaggtctcaaacaagaccccataggccagctagggtgtccgatggatcaaaaagtgtgtttttccaagactcaaattttttctttgtgttctttgtgattgaaagagtcaagaatcacaacaaagctcaaaatggaatctttttcatgaggaaatcatacagcatgcatcctaaaactatcatgcgaatcaaaatattaaaaagtatacaatctaacgtgagaattaagaatataaaaagcttgtaaaagcttgaattcaacaacggtagattcaaagaaacaattagagaacgggatttgaaagcttacccactagtagaggaagcttatgggaagcttggatcgtaaaaaaaagcaagaatcccgatattctttggacttggacgtgtcaagatccaaggaaaatgaagagcttctctttttcagagagagagagagagaataagtggtgatgtgaaaatgtgcttgactaaatgagccttaaataggttctggtgagcccttctcatcaaacatgcaacaagcagttacacagcctacaaaataaccgtgtagaattttatcagttccctattggggaaagtgagtagacaataaacaaaatattttataactgaagttgttacataaacttgcccagttaagacttcaacagtcagaactgaatttagaaagttcctatccgtacagacgtccgtacagggacttggggtgttatcccaattttttcccacgtgacatggcacgtgttaggaatattttaccaggatctagattcactaacaagtatgttgattaacatcctaaatatgaattctctaaaacaatgaaataaacacataagggtttaagaaaacattagattgattgaagcggaataatatgactccttctgttatcccaaatttcgcactctgacgtggcatcacgagaatggtgacacgtggagtccacttggaacatcttcttgagaagataggccgagcaggatgcctcccttgcatgtctagagtaaggtattcagcgatccgtgcagagcaatcaacaattagcgaattcagctttcgcatcatgagtcatcagctcaatccctataactcaaggatcaatttacgtggatacggcatacacacgatcccactatcagtgtattcagcctcaatcccaccatccttgcattcagcattgatccaacaatctttctgtttatacgcatgattaaggctcaaatttgaatattttaaggctttactagtgtatataaaattaatttaaattaatattttcagaattttaattgagaaatatcttagttgaaaatatttaatttattttagttgtgtgttattttcagatttggagtaaaaattaaatgatgtaaatggaagaattgattaaagaatgtgaagcccaaagatgaaaagaaaaccaaattatactttacattcaaataatataattatgcatgtgtgtagcactacatgtagcattttttgggtttcaatttaaggcccattatactattctacaagccataaacaattaaaggactaaaaatgattaagttgagaaatcagattcagaaggccacgctcatatccatgcaatctccactactctccaaggttaagcaacacataatcccacgtctcaaacttgtcccccctgccatttgcttctccactcttgtccaacgaaaatgacacacttatggccccactatctaacatttgttcctatgcacgaaaataccaagcttttggagtcaatttggcctataaatacaacattttggcattgtaaaaggcatcagattttagagagagtagagaattactttgtcattttatttttctcttttattactattttatctatacttat

SEQ ID NO: 237021 - DNA, 612 bp, Cannabis indica
agttgggttgaatcagttctttacgtggatggatacccaaaaggaacaccagtacaaagccttctccaggcaaaaaatagattcagaacttacttcaaagcaaaatcagattttgtcacagttccaatacctgagaaagccctagaaggattgtggacaaggatgttaaaggaggagagtccttctatggtttggactccattaggtggaatgatgagtaggatttcggaatcgaaaattccataccctcacagaaagggaatccttttcatgattcagtacttaactgcctgggcagatggagacaaagacccagaaaggcacattgattggattagggaggtgtatgagtacatgacaccttatgtttccaactctccaagacaagcttatgtcaattatagagatcttgatttggggataaacaagaagaacatgtgcttcgattggccaattactgatcattggggtataaggtattacaatgaggataactttaagagattggtacgtgtgaagaccaaagttgatcctcataacttcttcaggcacgaacagagtattccacctttaattatttactagattatatttctataagcacaatgaata

SEQ ID NO: 237022 - DNA, 492 bp, Cannabis indica
tactcattctcacaggtactctagtactaattcaaatatatatatatgatcatctaaatctaatcagtatatacgttacttttttaacgttttgaataagccatgttatgatggatttgtatatatgtttcttattttaatcacaacataacttaacttttgttattagatcatttttagttacaatataaaaactaatttatactagaaaaatattaataagatacaagttatcctaaatttcgtttttaatggtaatagtacttattgttaggactaaaacatatttagtgtcaaattttttagtaaaacaaacaataaatatataataatgagttcgtttgttacgtcagcggtattgtatagtatagtattatattaaatcgtattttatgtcatatttttatgtaaaatatatgtgatattaatttttataaacatttaaataaataatattatatttaatatttagtataaattaaagtttaacat

SEQ ID NO: 237023 - DNA, 2591 bp, Cannabis indica
ggtttagtatattcagtagtagatctattgaagggaagcttatgtattttgcctaaacaacatgatgagcagaaatcaaaggcatttttattgctattggagatattacatttgtgcatgatttgttgaacagttttaatggcaggatgcccaagacgagaatgccacaaatgaaataaggagttcttaataatgttgttacattgcacattattacaggaaattgttgacagagattgagaaacagcatgagaaggctgttgtagctttgatgtaggctgaagagggggaaacacatataggccagcttcaagagtagcctccagcagcacctggtgtgtctcccgatccttgacaaggcaaaagtcagggtgaaactcaaaaaatacgttgagggggaaacagacaaaacaagtttcttaccaatgttttcaatgtttaacccaacaccattgcccatgtaaacttgatcttgcccattgaaatcatttttctgagagagattactgtcatttgaagtgcagtggtgtgttgcccctgagtcaggataccaggcatcatcacacacggtttcagcagtggcaaccatagctgttggagaattattggtgttattactaggaccagcaccaaaaccaggaaatccaggattaaatctttgatagcatttggaagcatagtgtccttgtcgagaacagatttgacaggtgggtttggtgatatttgttcctcttccagagttgttgttttgagtattactgaagttgcctcttcctccagggtttgggggtcgagaagagaacccatgtccactagaatttccagaattgtatccattgttgtttgatcttccaccagtggcatagggattccaatgatctctgttgtgaggattggaagaagtacctcgagatctaaaatttgcaagattcacggatgtagaatcaagatctttgtgctttcgttcaatacgatgttcttgagccaaaagaagggcttcaagagcagtgacttcaagaggttcagctcgagaattcacagagattacaaaagatcatagtcaggcgatggaaggcctcgaaaaatagcagtaacatgttctttatttgaagtggtgtgtctaacagaattaagtttatcaatgagagaacgaaccttgagtaggtattcattgagagtgagagaacctttcttgagattctgtaattcagtagtatattgatcaatcttggcttcagtatgagaggcaaagtacatttcaagaacggcccagagagcagcggaggtttcactattcacaacacgagtgagaataggttcagtcatagatgaaagaagccaggagaacaacaattgatcttgttgttcccaatcaatgaaggcaggattaacattttcagcagatcgatcattatcagaaagaaatcttggtggaggaacaacacttttagaaatgtattgttgaagtttgtgacctctaattgcagaaagaacttgaggtttccagagaagaaagttgtcatagtctaattttgtagccagcttgtgagagaatacaacgcggatgaacgatgatgttgtagctccaaacgcagttgattggcttgttgcagatgacattgttggtgaagaagacattcatagaccaacggagaagacgatgaatgagaatcagagcatgctctaataccatgtgaaggaatgaaataacagcaagaaaacgaaataaactgattctcattaattgtgaacaaagaggttacagccttttatatacacagtaaatgaacaaagacaaaagacaatactacccttagaatataacaaacataactaaaaaatagctaaggcagttaatacagttattgtatattgtctttaacaaggccattcgtagtgaaattgaaagttgaaaattgaaatattatttctcttgagcagagttggtatagtcgggtcagaaattggaccccaaatttggtaatatataatagtaatcattgaaaataaaaaatcagttaataaaatacaagaaaattaggagtccaaacgatacaattttgctaggattcttctgcatgtgggtttatcctgattaggatttaggatgtaggtctctagtgcttggtaaattttatagatatagtcaccataaaagtatgggataattaggttagcaaatgtttagaaattttactcccaattattacaattattgtactttctaaatttttttcctagttaaaaattttccaaggcaatgttgaaatataagactattgttaagttttttatcatttatggctaacaaaatactaatatgacttatgtgtttttgttattccagcactatatgtacaacttaaataggttttaaaaatttgtttccttttatttactatcaataaataaaagtataataattttaaactttttcttgttgataaaaaaaatacattttttaaattttaattttacacctggatttcatgtaacaataacacataaaagttttatattttaatattgtaaatacttcaagtaaatttttaccgatacaaaaaaaaaaaaaaaaaaaaaaaaaaaaagac

SEQ ID NO: 237024 - DNA, 852 bp, Cannabis indica
atattgagtgagatgtaaccttccacgtcagtaataaccttctaaaggagaagactaaaagagcagttgggtagttataagatattatcccacatttgattaatgaaaagtggggattatccacgtatcatgaacaattgtatttgaatcaatcccaaaatagtgtaactgtcaacctatattcctataaatagggacagattccatgggataagggacgaaaaatttgagagataattattattattaaaattctgagagtgtattctgtattaaaaagaatatccctaataagaaggactcatggagtatgtagattttaactacaaaaccacttaaaaatatctggtgttaacctatcatttattacttatatatatttctgtagaaaatttattacgaaaaaggctattttaatttagttaacgaaaatttgcgttaacaaaacgagtctcctatgtcggaaatgagaaatgcgaagttgttaagttgacttctctgtcttcatgaatcttagttaatgtgaaaaactagacggacacgcaaaatggaatcagaatcggataagcagaacccagcgcaccaggccatttgtcaacttgggcgttgggtacccattcctgagctcctgtgatctcgttttaatacttccaaggcttctgaactcgaggacgaggtctcctacctcatttttgaccattctgaattcaatgttggcatcagattttgcatttgagcaattgaacgtagcgtcctaggttgattgttaacttgggcgttgggcccaacaacaggtcaacctgggcactgggccctatatatttctaggggctcgggtttgtggttttctcc

SEQ ID NO: 237025 - DNA, 767 bp, Cannabis indica
taactagatataagtgaaatgatgtttccttagagcttgtgtaatagacataaatgaaagagctcttattttggtagttatattagtttcccaaaatattatttataggaagtcaagtgtttaagaataaaatatattaaagggtattaggtaacacagtatcaatgtagacaatctaaaaggatcattgattatttagattgaaataattgataattaataccaaactattctcggagaataaaatgttctatgtaatcaagagtgcaattaattagaattagataatcaattagaattctaaatgagactaaatcttatttgtgaattttactaagcaaaagtgaatttgagaagaaaaaagaaacaaagagtttatttattaattaagagactttgctaagtctaagtaataaataaattaattggtaattttatttgataattatttataattattaaatagaaaaataacatttaaagacttagaacagaaaaatggtattattgagaaaagataagtattatcccaacttttatcctcattacgtgacatgcttacgtagatagaaccagtgcaacatgtcagtacatcttgctaaaagtaaggccaagtcagcatccgaataaacgaagatctcaacactcaaacgggcatcaagtgatagaccagctccagctccctctcgggagctagtcggccagccttaggacataaccatggtcagccagtctggcctccataggggcctggctagccaaggagt

SEQ ID NO: 237026 - DNA, 674 bp, Cannabis indica
tgaccgcctgaatcactagtaaagaatctgattcaatcaccacctccgaaaaccctttcctctttatccaactatgcgcttctttgaccccaaacacctcagccagctccggtggaacatgatcgcttcggctgccagccaaagcttctatcaaaccgccaacatggtcacagatcacacaaccaaaaccgtacctactctcactttcaaagatagatccatcgacattaatcttgatcgtattccctattagtttttgccactgctcacaggcgttattatcattcaccaacaacaacgcttcttcttttgcttttgagccgctttccattgatcaagaacagtactagccgatcgaactacagtcaaagcaaaccaagatttattactccaaaacagatcatttcgagcttgccaaattcaccaactgatttgtgtcacgtcctccacctgatgagagttgttgtggctaagctgctggaaaaaccagctactgaaatcaatagcagcaagaccttttgacactatggagaggtttcagcaagagctcgcgaagccacaatccactaaaacatgtaaagttattatttattattgagaattccttaaatattgggcttttttagttttaaccaaaaagtaaaaatattacaaaaatactttcagctggccaa

SEQ ID NO: 237027 - DNA, 821 bp, Cannabis indica
tctctgtttctggtcatttttttttctctggtttataaggctttacatggtatcagagccatggcaaccgatcgaccagaagctccaaaaaatctgctaccaaatgcagctacaccagctgctttacccaacaacaacctgctcccattgaatctgagacttgatcgatcaaactaccctctgtggagatccttagtccttgctgcagttcgtgcgtacaatcttgatggccacctgcttggaacaaatcctcaaccacaacgaaatcttgcaggtaataccccaaacccagcttttcaacaatggattcgtctagatcaatttattatgcattggttaatgaattccatatctgaggcaatgcttgctcatgtgattcattgtcaaacatcggccgagatctggacggttctgaatcaattgttcgccacaagatccagagcaagactactgcaaattcgtggcttattgcagtccaccaagaaagggtcacttaccattgatgattacttcttaaagatgaagcaatatgcagattctttagctgcagcagaacaaccaatatctgatgatgatttgattctatacatactcggtggtcttggatcggagtacgaatcggtagttgttaatctcacctcgcgaatcgacaaccccaccctccaagaagttcagtttatgcttcattgtcacgaagtgcgactcaatcaactcaccacggattccctcaccaacatacaggcaaatcttgccaatacaaacatgccacaacaaaatcgaggtggatatcaaggaaactcatcaagaggctacaggggcaa

SEQ ID NO: 237028 - DNA, 804 bp, Cannabis indica
catggaccggaaggggaagaaaaggacaaccaactttggagtccctactgtcgccgaagtggttcctcctaagaggaaaaggaaaaccactgcccgtaagaagaaatcgctggccgagcccatcgatcttgaggtttccgatagcgagatcaaagaacaaattcctcctctagtcgtttacgacaccaatgctcttcatcccgaggcacccccgctactgcttcttcgagaaaggccattgtgaccttgtcggccgcaggaggggaggcctggtctaaatttgcccaagcatatggagtcgcctattggcgcaaacttcaaactcttcttctccctgattgggattttctcaatcttaggagcccaaaagagatgctttcaaggagcctggactataacttcatggtacgttggctttattataataattatattattctatttatacctctttcatattcatctatttgcaattctccaagcttcttttgcttcttttgcttccaatcaactactctctgagcaactcgaatactatgagggcgagctccacaagttattatcccaatgcaaggttgtgagtaagcatcgggacgacacccaacaggaaaatacccgccttaagcaagaagccgagaaagtgaaggaagaagccaataaggcaatgaaggaagccaagaagacaaaagagaaagccgataaggaaaaagaggaggccgagaagatcgtcaaagcctaagccgatgagtttgagaagaagcttgctgaaaaaaaaaagtcaagagcgtagaacggtgtgacatg

SEQ ID NO: 237029 - DNA, 1490 bp, Cannabis indica
gttatttcgatggctagcaataagaaaattgggtttaaaccttttaggtactacaatttctgagccgaacatccagaatttaaagatgtgctccttgaagactggtatagaccgatgaaaagagagggaatgacagctttatacttaaagctcatgcaattgaagcacactattaagaggtttaatagagagagaattggggatgttgggaagaattatcaggaagctaaggattattatttggaagccacaatgcaagctcaggtgcatacgcatgatttttcctatcaccaagccgagagagaggctgcaatgaactttaatgcccaagaaaagatgtaccatagtttcttgagacagaggagcaaggtaacttggctgtgtaaaggggttgagaacaatgcttatttccatactttctaaaaaaaaaataaatgaaggatggaaaatagcatagtttcttacacaaatgattaaggagagattatagatgattttagtgaagtggtaaggcattttatagtgcacttccagggctacatgggaattagttctagtcctactcagaacctaagaaatgattgtatggagctggggagcagactaaatttggagcatcaatttagtatgataagactgttaacaaccaaggaaattaagaaggctttctttagtattctgaattcaaaatctcctacgccagatgggtatggagttggatttttcaagataatgtggcctaaattaggtgttgaattcactaaagctgtggagaatttttttcatgataggttcaatgcctcgagagtttcatgcaactatgataactctcattcctaagacagtttatcccactaaggctgtggatttcagacttatagcgtgttgctcaactgtgtataagtgcatctccaagttattgtgtatgatactttctcaagtgcttccagggctgattaataagaatcaaggagcatttgtgcaagggatatcaatagctcataatgtcatgattcttcaagacctcttgaagaattacaaaaggaagaacatatcaccaagatgtactctcaaggtggatattagtaaagcgtatgacacagtcaattgggagtttctggaagcgcttttgaatgcctttaaactgccagccaaatttatctcgtggataatgacatgtttgagagctatttcttactcggttttcatgaatggaagagagcaagggagcttcaaaggcaagaagggtttgcgacaaggtgatcccttatcccttctcttatttgtcatgataatggagtacttgaccaggaggttacttttagtagccaatcagtctaagcttagataccatccttaatgcaagaacctcaagatagtaaatctttgcttcgcggatgacttgatgttgttctgcaaattaaggaaacttaagcttcattcgggtgttaaaggaggttttggatgaatttagtgttgggttttatgcc

SEQ ID NO: 237030 - DNA, 665 bp, Cannabis indica
tctggtagtctttgaagattataacagtcacttagatttaaagtttgtaggttacataaatcacacaatgactctggcaatattctcaaattggaattgtttgaaagatcaagatatctcaaatgtatcaaagtggaaatattttggggtagattagtcacacctggagctggaagacataatgttcgaagacctttcagattcgtgacaatgaaatcataatcaagtactacttcaatgtcatctattgaaatgacaagtgtacgcaatttcctttgaaaatctcttttgatatccttcaaagtgataactttgtctgaggaatttgattttacatttagcaaattcaaatgagaaactttatgctccaaagccttcattcctagtttgatgtcgtcacattcaataacaataatcttactttttgctaaaaattgagtgaagtcatgcacaatatcatgcatttggtaataaagtcttggatcaaaaaaacccgatgcattgaattcctgaaagtattcatcaaagaatgatcgcatgactaaactgttgaaacactcttgacctgttttcgaatcaccaacataaccttgtgacatccacatgtcaatcattgtctctctttcaaatctgtagtctttgggaaatagggaacaataagaata

SEQ ID NO: 237031 - DNA, 845 bp, Cannabis indica
tcctgggtttgaagcagttgcagaagcaggcagcaagattggagcaacaagaggagcatttgagggggcttgttcggtttccaccattttccttggatgccccaggttcttagtcttagccatgaatatctgaaagtatgaatgagaaacaaagaaggaagaacacaaaggaatagaatcgggttggtggtgagaataaatgacaaggaaaattggtttaaataaacatgggagagtggaataaaagaggaaaccaattttgagtaaccaccagcccacgaacacaaaagggaaaccgccccaaactttttctaaaattatttttttaaacaaaaaataaaaggaaactggaattaccaaaatattttccaaaaatagccaatttaagaaaatcattcaagatcaatgacaaattacaatgaataagatatcaatctttaaaatgaaacatatcaaaataaatcaatgtagaataaatgttgaaacttaccaatcaaagcacaaattttcttagcccacaatccaagtcaccaacgcctccctctctttttttattatttttttttattttttgaaaaaatgaaaataaaataaaataaaatttgtacaataaatacaaggtattccataacaactaatcaaaattcatcacaaaagacgattatacatgttatgctttcaaaagaaaataactaattagtatctcaaggacaaaccatacttagtagatgttgaggaaaacgatatgcatgttacaaaaaaatgtgaaccatgattttttaatttattttagtagaggagacttacaaacttgtacacacttgtcagacataagtgtgtgcagt

SEQ ID NO: 237032 - DNA, 1123 bp, Cannabis indica
aagtgagttttaaaaattatggcgcgcacttataattttattgggtacagataaattttttcataataatattattcaaataataataataataataataataataataataataataataaagatcctcttgatacacaccctcttatttgaagataagttgaggattatttttttttgtattcattaatcaaaaatatctttatattgtatttcattaaaatctacccacttttgtgagtgggttacctaatataccctcactatccacttaaatccaccacataatttacattaacataatgagtataatagagaaatcatctataaaaataaatatatcttaaacaatatgaaaataaaagtaaaaaataaaacaaataaattaaaatagatatacaatgcaatttcttctcttatttcggcatccacacaagttttaaattaattttttaatatactatgtaagttgtagttttttcttttcgtaaggtgtagtttacgtataacttagtgattttactactctcattataatactctctcacatataaacaaaataattaagtctaaattatccaaacaaataaaacatgtattgaaaaggttatttgccctgtactaaataacaaaatgataaaatagatcttatattttttaaaattgtacaaataagaccctgaattaatttttatcaaaataaaacttaataataatctgatctagagatattgtgacaaaactagtgacattttctgtatctgttcatgttagaaattatcataaagttggttatattaaaaaaaaagttattaaaaattgagttcagtgttctatttttactattttagaaaatataaggtccattttgtcatttaacaaaataaaaagtctaattagtaacttttgcaaaacacaaaatctaaaatgatatttactttattattttttttaaaagttttttcctttcttttttacacgtgtacacaacacactctcattatgttattttggacattaatgtgatgttacacataaagaaatcctaccacatataactctatttatcacctttagccaaaaagtaataataaaaccaaaaaaaaaaaaaataactatttat

SEQ ID NO: 237033 - DNA, 1532 bp, Cannabis indica
gccacataggacatgaaaataattttctaaaaaaagctccagaccacataggacattgttatcccaatttttgcactctgacgtggcatcacatgatggtcacacgtggaatcgactttgagtatctactccgagaatacagtccgaacaggatgcctcatatgcatgcctaaagaaaagccatcagcaatccgcgcagagcgaccaacacttagcgaattcagctttcgcattgtgagtcatcaaagagatccctataacttggggatcagattgtagagatatggcaagctgtccaaatcccttgatcagtgtattcggtatttatcacacaatctttctgcttatatccattgtaacgagaagggaaatacttcctctccaagttcacagccctataaatagtgatgcatgctaactgggcaaagggtccagagattttacttaagagatattatctaagaattcatattcagagatactgttgtaagagctataagaaaaggaatctttctccttattattgagttaatacaaataacgaggattaggctattaccgaactgctcgggctgaacctctataaaattcctgtgtctttatattattttactatatatcaatcgttataaactacttgtcacttactaaataagactcactattgttggctaaaagtgaggtcaacattttggtgctttcattgagagcagaatcaagaatcgttcttcattcaaaatataaccacaagtatgatggtggtacagactcgtaggggcctggttgatccagcaaatccacaaacggtggatcctgcattgcaacccagggagcgcaagggttccgccagctgttaatcctgaacagtcggcgaacgtgggtcatggtgtaacgactcctgtagatgaaatcgcacctggtgtgtaagagactgggaataacggttcagcacccaaccagggcattcataaccaaccactccgcctgctaccaacattcaaacaaccattggagatgatattgagatctgaaaccttcgtgctgctcttggactcatgcaagtcatatcataccctacatcatgatcaggaagaacttcgcgctgcggcaaatcttgcatttgaggaacaaaggcacatgtttgccgagtggagaaacaaagatatggaagcgttaagggctcatcatacagagattgaaaatcgtagtcggtaagctactgtgcttatacgaaaagcctactaaactgtcaaacagcaacctccgagtgtcatcaccctgggtgagacagacgaagatccagagatgaatacttcccagactataaatggtcagccgccaaatcaccagtcagaagttctgcttgtgggcctagcagtaggcaggcagaccttttctagtaattcatcaggtgtggtcatacttgatagttccaaccaggttaacggtgtcattccacttgtcaaccaagcaaatcaatcactaagagtgccaggagcttctgtatttgataggttagggatgactcatga

SEQ ID NO: 237034 - DNA, 1809 bp, Cannabis indica
agaaaacgatgtgaaattttagtgacatagttttaattaaagacaattcttttgttcatattctgtattctgttgggacaaagtagtgaaatattatcaaacaatgtctgatgtcattgtcagtatgatgaaccgtggcttctataatctctataaaaccatagatagatgtgtgtatgctgtttccatatttatatacggtatttgtaagtatttgtgcaaaattacacttgttttctacttattttagatttaaatgctaaaattcataatataaattgaaaatgaaaagaaacatattaaataaaataaatatatttgatgaatttataatgaaatttggcgttttaggatataatgggtgaataattttaagttttgaatgctcaatacgttctgtttgtgatcaaaaataaagtttcaagtttcaagccaatttttaactataatgcattcactttcaaaaaaaaaatattgcgaatctagatctctttcagatttttaaaatatcttgaatcgtctaattccgaataatatcaaaagaattatgattaaaatattaccagtagtcgcccgcgacattactgaaagggctatgtcgcccgcctacttttagaggcacattagggcttttaaatcctgatttcaaaaatttaaggagactttcgttgggcaacttgggaggcacgaaaattaaagagaaaaaggaaatttttcaagtacaactgtcattcttcatcacttcttctcttctatcttttatttgatgtttctaattttatttgcaattttttagaatgatgattatgagctaaactcatatttaagattttcaatagatattatttgatactttttatggtttaatgcaattctagttttttttttcttcaatttttaagtgtactatttctttcatgttcaatgcttataattgcttgatcactaattatttgttttatgatttcaatacaaaatctaaaaagtgaattttgattatgttttaatgaaataaatatagatttcgatattggatgaaagtacttgtatagtctgtgtaataattaagatttctttgtttaatgtgaattatgtgtaatttaccacaaacgggcaatactttgccatataatttagattttatatgtactaataagaatataaattaaatcaataatttgcaatcacatgaaattgaagagtaattagattgaattttcccataagaaattgatgcaattaaaattaaatatcatatatttctaatcattgttaattacttttttgtttatttatttaatttttttattcaattacaatcattattcaaattatttatttgtaaattgaaataaagatttgattatttggcacttaattaaagtctttatgggatcgatcttactcttgtgagtattattacttgtaaacgatacgtgcacttgcgtgttggaattttcacaatattttgctattgcgatttaatttttgctattgcaattagtcttgtctctatgacaatataattttgagtgttttaatctatatccttgtaatataattttgagtgttttaatcttgtctgttatatgatttattttattttgtttcgttgttagtcttatttgtttttcgatagctcgccatcaaattattgttaatagcaataacaagttttctaaaattaggcagctaattatttaatttgtttttttaattttaattttagtgatgtctacaaaaatatccgattaaattgcaaactattattcaatcactcaaactattattttaattaattgttattaa

SEQ ID NO: 237035 - DNA, 738 bp, Cannabis indica
attctatgaactgatgcctttactcgtcaaatccaaggttgatagctgcccagaggtcctcctgatcatgatgcaaagtgttgtgatgaccttgcatgagcccaagtgcagctcgcagattttggagttcagtatcatttccaactggcctctgagtattagtagtcgacgggactccagtacaaggagtggtttgattggctgctaaactagtgtttccagtttcttgtatgcctggtgtaatcctagccagaggagaagccatttcaaggcctacagtaggaggctgtgtattaacctgctcggggtttatccctagtggtcctgtcgtgtttccaggagtttgcacgttgggatctgtcaccatcggatcgccctgatcagcaaggccacccctaagagtttggaaaaccatcatgttttacctgtcaaaactaagacaaaagacttgagttcaactctcaatgaaagcaccaaaatgttgacctcgcttctagtcaacgacaatgagtcaaaaataaagcgattaaataagatgatgaaatgaaagcaaaaatagtaaaataaagtgaacaccagattttaaagaggctcaaccctgtgagtgtggtaatggcctactccccttgtattgtatttacttgagagaaaggaacaaaatgttcttcctcttgaaaactcttacaattgatctctgagtatgttcctctcttacatcactcttttctttctagaata

SEQ ID NO: 237036 - DNA, 567 bp, Cannabis indica
aaaaaaaatagaaaaaaaattcttttgaaaacaatccatatattctgaccaaaggaatatatagatcaaaagaaatgttttgtcagaatgacgaagaacctgatttggagctgatcaagaacaagcttaaacctagaaaagttaaagtactatgcaagcctcagttcaacaaaatttctcaaggaaaacatatattcgtacatcaattcaacaatttgaccctgtgcaagcaactttattaacaaacatcaaattaaattcaagcttttattcaaacaatgaagaacatccatggcatgaacctagattttttgcaaaaaaaaacatgtaatatcaaatgcaagaaagcagagtagaatgtacataaatcacagcacttactgagaaaatggctggatgagaatgggttagatgcttgaaatctccaaacgtgttcttgcgattcaaagagagtaaaagagcactctagttttttaaggagttaaaagtgccaatgaggtttcttttttccttttataagaattttgagggatacaattgtaatttgcacaccccgaatcaaatttt

SEQ ID NO: 237037 - DNA, 1073 bp, Cannabis indica
tattaccaatgtagaaacaacccctgaagtacttttcttatcatctagacaccctgcctagtcagaatcactatagccaaccaaaaatatgtcagtatcacacgaataccaaagaccatagttaattatccctgcaaggtatttgaaaattcttttcattgcaaagagatgtgactattcagggttggtttgatatctggctcatagacctatacataacgaaatatcaagatgactggctgtgagatacattaagctgcctatcatgctccagtaaagaatgggatttacagggtctccagactcatcacacatcagtatgggtgtgtgtgcatgcttgacttgtgtatacccaaaattttctagcatggacttaacatacttggactgtgatatgattgtgccatgatctaattgtttgatttgcagtcctagaaaaaaactaaggtcccctatcaaactcactagtcattaatgtcagaaatgtttttacttctcgttcacaagttgatctaaaaatgatatcatctacatatatttgagcaacaaaaatctcattttctagatttttaatgaatagagtgctatcgacagttctttgagtaaatccatgggaaatgagaaaaaaggtaacacgatcacaccatgcacgaagagcttatttcaatccatacaatgctttgttgagcttgtacacatgattgggaaagtgtgggtcttcaaattcttgaggtttcttgacatatacttcctctcaaattacaccattgagaaacgcactcttaacatccatctattatggtttaatgttcagtaaacacgcaataataagtagcagtcttagtgattctaatcgagccactgttgtaaaagtctcatcaaaatcaattccctccacttgcttgtatccttgtagccgacaagtctagctttatttcgagtaactattccaaattcatttaacttatttttaaatatccatttaattcctatcatatttgctccatcaggctgagtaaccataatccagcaccaagtctctaatgtttcccatttcatcttgcattgcagcc

SEQ ID NO: 237038 - DNA, 966 bp, Cannabis indica
ccttttttcttcctaatcttgtaactatataaactatatccaacactttcataattcatgagaatcaatctttgttaattcattttgtttaacatggtattagagcgcagcatggttctcattcatcattcgaatcttgttgttgaataattgttgtcttcttcttcgttgatttgccatggattattcactagctctttcctctacaaatagccaaaatagagctactggttcaagtggttcttcgttcactcctattgtgtttccttacaaattggccacaaagctcgatcatgactactaccttttgtggaaacctcaggttttttctgccattagaggtcacaagctccaacaatacatctccaactcgttcactcctcctcctcctcagttcctttcagaacaagatcgcatctctgaaatcatcaatcctgacttcatggattgggatcaacaagaccaactactgtattgttggctattgtccttgatgaaaaaaccaattctcactcgtgtcgtgaactgtgaaacatcttgttatacccaaaatttggttgtacttcagaaagtgacacgtgtcaatctcgtgaaatgtgaaccaacgggtaaaataacgattatatcattaaatgcaaaatggaataacttattaaatatggaattaatagagtatattcataactcgctgactgtatagtcttaggcgagacaagaatacataaaatatcaattcgtgtattgacgagaaaccatcttgcctcggaaggcataatctcgagggagctacggacactgcataacgagacatctacctcgttacatgtaagaaggtatgacgaggcgaatcgactgttaaaacacttagcgtataatttacgttataataactaagtgtaacaactgggaaacatggaggacatgattgtccagcctgtaaggtcttatagtcaaagagtagttctt

SEQ ID NO: 237039 - DNA, 1497 bp, Cannabis indica
tttaacatgataagtaatagatctataacatataattaacaatatataaacattcttaaaagtcaaacataacataaaaatctaaaattcatgcaataaaaaatttgacatacaaaaaagtttaaaattatacacagtcatatataaaatatatatatataaatcaattattcattataaacggtctggtctggttcaacagttaactatttattacaaaccgcaatcaaactattacgccgtaaatggtctgaattaaccaaaccaccaaaaatgatttcctcggttacggtctatagtggttcagattttcgcggtccgaatttaaaccttgattttttggtttatatgaacaaccctaggtaggataattgataagattttcgttaaagttcaacaatttggggtttcaaacaacaaataggcttagactaaaatggggtagctaatgatacaacttttttggattgactagaaaggctcaaatgaatcaaaaaaaaattgtctacatcatattcctaagcacacacactacctaagattttgtctcaaataacaagtaatatgttaaaccccaggattaatagggttagagagagaatagcaaataaaagagtaaattggtcttctattaggggtagtgtttggaaagaaagtagaataatatatataagacactaagatgagagggttatccaatgaattgagaggttttctctttgcataatggagagcctaggcctttgctatccctagggtccattcctctggaattttcttgttgcaatatcaaattataatacaaagatttctctgttgttcttgttagtctctataattcttaagtgatatccatcgggttacatcaattggtatcatagcaattaatccgccatggaaatctacttcgtgatagacaaaatggatcaacttctttacgaacaatcattgctgctcagactcctccgtggtactaaaacatcactgcagaaatttaatggaagtaataatgcttcgatcaatttggttgagcaatcacttttggagtcgactaaggtgactttggattctgaatcgatgctctcttctggttgtacaaaaataaaaattgcaatcagaatgtcaattgtccctccatggattccgctcaaactcatgaacaaatggtggtgggtgacagtgactacgactttgtaaatttgagactctttggcagtaatgggaaggtggctccatcatcatcacctatgctggaacactgaaataagagtcagagatcttacatagaagctacaggagaggctgactcggttcttctactagaattgatgccagaaaggctgttagagacggtggtgaagataagccagccactgaagaccacgtcagagaataaacaataggtggagacgtcgacggagaaggttgactagttggagatcatgccaaaaaagaacggggacactggtggagaagcattagacgcatggattctcg

SEQ ID NO: 237040 - DNA, 788 bp, Cannabis indica
gagagataagcaatgcctaaacttcctcaaacgagaggagatcacaaagatttgacgccagggtcgaattcagggccaagaccatttaatagttccaacaccagatcttgagcgttcataaaggagccaacgattgacagagctttagcaattgattgagttttatcgacatattcagatatgaaataggtagcccttctgaaggtaagagaactggcgtttcaattgtagtagatgacccttggtttggctggataatcactgctccaaaacatgctaaataacatagtacaagttgaacgtggcaactgaggcaagaatcgatttggacattgctgattagatccaacccttaaaatctttctcctcaatttccagacctaactctcaagatggctcccaatgttcacgagcttggataaactagtatatagttattatttcagtacactttagcgcgacaaacaaatgggaaaattggattatatggttgacaggcgagtcgacggaggaatgtgcgcccaacccactactcaacgagataaattaatttactattatatttttagatttttaaagttattttattttggcataaatctattgatgtcgttgtacttttgaagctgtagattttaaacgtacattcatcttcttctatataattatttcgtttaagattggaatttttcaatgttcatattgattgacgtgttttagtatttatttagtatttttgcaatacatagtgtaactatgtaaatttacttttgactaaataacatttt

SEQ ID NO: 237041 - DNA, 303 bp, Cannabis indica
agactgaccggagttatggctgaagcgacaggggtggttgggacagggcagttcgacgcggctgaggcggcttgggtgagtcgagctgtgctgggtgtctatggaagacgagtcggagccacctagatcgatagatctggggcttgagaaagattccaccgaatgggaacgcagaggggatgagtgtgaactcattggggacgaaggtgagggtctgttcagattatgcatgtcgagagggaggagaagaagagtctggaagtccatattcaccaatttttctcccttttccactcatcattt

SEQ ID NO: 237042 - DNA, 579 bp, Cannabis indica
gtccacgtatattgggcgattttaggagcaacaaaattaatttttaacagtccaaaatttatcttaaagaaaataaatttgaaggaatgagaatattttatggatgagagcatctttaaatttgcggaatgagagcattctataaatttagatttggcagaatgagggcattccatagatgaggacatctattttaattggtagaatgtgtgcattccatggatgagaacatcctttagaattgtggaatgagggcattcttttttcatctatgaaatgagggcattccatagatgaatagagaaaagaagagaatgagtattaagtaaaattaagaaaggaatggatgcactacttacccttgaagactctaagcaattggaagaacaacaatggtagtttttttctgttcttttctttgcaaagtgtcgataccctccgtgattttcttctctttatatactctaattttttttacattatgtgaaaagtgataagagtggaaagtgggaagttagagagaaaagtggatctatattattatttaatatactcttttttttttgtctgatttttcat

SEQ ID NO: 237043 - DNA, 1377 bp, Cannabis indica
gccactatgcaaattctaccccaatggcactaaaaatcattcatacagaaaatactcatcaagaaaatatccaagatatccaagaaaatataacaattaccataaaatatccctattagcattctgcacatcaagtgaatacaaaccaagaaaactatgaaaaaatatgaaaaataagaaaaaaaattatcaaaacccaaaattacatagccatccacggtgatgagctttctaatcatcgtatatagccatcgactccaaacagccacaatcgccaaccccgaacaaccaccatcgtcgtcaatctgtataaaagaatagagagtcaacacagaggagaagtagagaagggcgtcaaaattagtctacttcgatctacaaaagacggtgacagggtgaggagatcgtggcggaagacgtcggagcccatccacctgcacgaattagagacaggttgagagagagagagagagagacgagggaatcgtgtgagatgaagggggtggagatcgtgggcgcttggggtgaagaagccggcgattgagcactgaaagtcgaagggagaccttcgttcgccatcccaggagcagtggcattcgatgggagaccttcgtcttcatcgttccagtgggagacgaagggagatgatgagatctcatcagattttatttttttttttgtaaagcaaattcgtggagactggagaggctagagagaaatggctgaggttatttagattggttttcttacatttttctagggtttgggagttttttttttttttttgataagtgtgtttgggagtctttacttttgtattatttcaatagaaaaaaaagactcttcatattaaatttatttttcagcaaaaaaaaatttaataattttatttcaaataaaaaaaattatttcaaaataaataaatacataaataaaacaaaaaatattgtttattttatcagatcaaaaaaaatatttaaatatttaaataaaatattttttgttgaataatgtccacttttttttttatttattttgaatatgaatttaaagttatgatatagtgacacgcctaccgcgtagggaaacgtttaccgagtcacacctggagagtcactaaaggtcaatatttttttaagaaaaaaattaatataaattatgaaaattactctttagtgacacttcatatttatagtgacgcggattataggacactaacattgaaatttcagagtctttttgtgcgtatcactaaaacttacccccaaccttttagtgacccacactttttgtgtgtgtcactaaaaggtaaatttgtagtagtgtgtaagaccaacaatggagatcgaatgtcctaatattaataaagctcattat

SEQ ID NO: 237044 - DNA, 236 bp, Cannabis indica
gtaagagagactagcaaagctagggagcgctatgctcggacactccgtcacaagcctaaaagtgacatcctggtagttgaagacaggggctctaagcaaccaaagcttggagagcctgtaatatctttcagagaagaagattgtgctcaagttaggcctccttgaacattcttctcaagtcaacgtatgaaatgatggggcttcaactcagcgacttggcaccctgcaatcaaggg

SEQ ID NO: 237045 - DNA, 516 bp, Cannabis indica
tgaaatgtaaagattgcttaaaacgtacaagagaattgacagtaacctttgtttccataagaaacaaaacatgaggagtttgctctttaacaagcaaacgaagacgacggaatgcactcgggttccccaacccccgagcattccaacttatgattttcatggcaaaccgcgagattgcttagcaatctctgctgaaaagtcttgagaattagtcaaatccaccttgtctgtagaaatagactgattgagatcagcttcttcatccagtgaagatacattgtgagaattgttggccctgcaccgtttgagtgtttgtctcatggatttagagtcgaattatcgtttgaaaacacggttaggttgttcgttttcttgtccatagacatcagattgagttttgttcaaaccagtagtaccaatcaattttgctatagtggtaacagcagtagtcgacagtgacttgtgttgtgttatagtctgaatttgggtagtgtgtggagggtaagtggcaaaaat

SEQ ID NO: 237046 - DNA, 940 bp, Cannabis indica
ggtctgggtctccgatctaggtccaaatcataggtcccattcctagttctggggcccaagtccctatcacagttcgaggttctggtcccggctttagtctgggtttggatcctagtccaatttctagtctgggattgggttcgggtcttgctcctggtcttggtccctgtcctggtgtagttgtcgttcccgttgcaattctgggttggggttcgggtctaggtcaaggtcggggctcaagtactggtctgagtttgggtccgggtttggatcctagtctgggtccgactctttgttcgggttttggttcccatccgagtctcgagtttcgatcccaatctcggttacggtttggttccgagttcgagtcccaagatccgatcccagtctggattcgggttggggttcgggtctggttctaggtttaggtccgcgtttaggtcttgttccgagtttgggtttgggtcttggtttggtcccagttcaggtccgggtttcgatcctgatttgggtccggggtagggttcgagtctaggtttcgatcccgattcgggtcagcagtcgggtgtagatcctagtcccggtctcgttctaagatcccgatacagtttcggttcaggttctggttttgagtcttgagtgtgggtgtgggtccaggtatgggtcagggttctaatttgagtttgggtttgggttcaggtccttgtccgagtcccaaatctagagaccgactacgggtcaagtctaagcctcgagtctcaaatcccgagtgtagatcctaatcccagtttgggtctcgggtcccgagcagggtcctaagtctgggtttgggtctgggttcaggtccgcgatcccaaccctagttccgaggctctggttttggtcccagttcgagggcccaagtctcgggtctgggtcccctatctatgtttgggtccta

SEQ ID NO: 237047 - DNA, 770 bp, Cannabis indica
gagtcttcaaaaacttcaatgaattcacctattttgtttccaagtgcctcagccaacttcttggttttgctcataaatggcagcctgtaaacttgaatccaaaaaggcgaataaataagattcgatgaagagatattttggaaaacatttggcatgtaaatcacaatatgatgattctaaaaatgaaatagttctcgggtcaagactctttgcttgtctccttcacacctaaaagtgagcacaaacatgtcctcatcctcagaaattatcacaagaaattttccattccaatgttcaaccatttgcctctgtagtgtagaaagccataccttctttgtagtcaatattcgtgcatgcagaacacgatctagtaccaattcagagtcaattggttctctaaaatcaaaatcaaatactgtttgttcttcctcattgagtgtgatctttaccttcattttgtcatttgaagtgtccattacgatgaaacaaagcatgcaaacctgggcagatgctttgtatttggattaaagggagcaattaattgtagaaattaagggaaagaagaagatggcagaaggaaactgctaaagaaaattggaaaaaaaacagttaaaaaaccattgtagacttaactctgagcacaactaaagggcatgcaaatgctctttttcctaattaaatacttagtgacattaagtttaatatgtcatatttacttaaattttccatctttcctcgtaattttgtaaatagccctatatctatttttt

SEQ ID NO: 237048 - DNA, 551 bp, Cannabis indica
ttagctaaaaaaatttaattttttgagaggtacaaggtgtttacctcctctcttatagcaaaaacatcacttaagggtaattatttaataacccactctacaacctatctttgaaaattttacaatccatttttattgctgagataggcaaataaatagccaaattattgctatagctatagagctttcacttttaggcaggttggagttaaagacccatagtatggaacatgtagctagtccaacacaaggagctttcacttttgggaaggttggtttttaacttttagtgttacagagtctcacattgttaatgcgtggaaaaaaaataaaatatataaaatctatgagttattcctctcatagccaattggttttaggataaaaactactggcagttgattttaagatgaaaatagaatatagaagacgtgtcttatatcccactacattactattttcatccctcttggttttaaatatccatttacaaccaattattttaacaccttctagtaatgggacaacttcccaaactttattatcttgca

SEQ ID NO: 237049 - DNA, 740 bp, Cannabis indica
caactctgggttcaggttttgtcctggtttgtgtctaggttcctgtcctggtttttgttcagggcaggttttgtgtccgggtctgggtccgacttcagattcccgggtgtaggtcaggtcctggttcgggtttgggtccctggtcttggtcccccatctaagtcgggttactaagtcctggtctgggtctaggttttggttttggtcccgagtcttagtttgagtcctggtccccgtccgggtttgggtccaggtctcggtcacagtcttggtctaggttcgggttcatatccctatttgggtccagaacctagtctatgtcccggtgagtgtataggaccaggtcatgtccaggtcgcggtacaagtttaggtccctggtctcaggtcccactcctagtcaaggtctcagtctaggtctcgtctaggtttgggttatggtttgggttcggttctggtctcaggtccaggtcctagtcacagtttcagttctaattctgggaccgggtttggtttcgagtcagggtctaggtccaggttagggtcggggtccgagtgttaatctgagtttgggtacgggtttttcggatcccgggctgggtccaggtttgagtttgggccccaagttcgggtctgggtctacatttgggttctagtccaggtctcgtgttttgatcccagtctgggtctgggtcagtattctgttctaggtctaaggtcgtgtccatgtctaggtccaaa

SEQ ID NO: 237050 - DNA, 987 bp, Cannabis indica
  modified_base (41)..(41): a, c, t, g, unknown or other
agcatcaactgagttcttgaaatagggagaaaacagggagngagcttataaagcccagtaggaaaataactaatatcaaaggaccattggtttaatacattcttgcatggttagcttttaaaataagttatctcatcaccattatcaaaatgtataaacaaattagagagaccacaaataatcataaaatcaaccatcaaatacatatcacaccgtctactagatccctagcactcaatatcaatcatagaaaataacatcctaaatcgagtacttgtacctgataacaagcataataatggggctcacatttaattcactccctgtacaaattctaagtctttcacttacaggtgagtgcacacctgatctacctatgatgatacaaagactggattgtgaaataataatatgcacaaatcatcataaacatggctctcatcaatataactgaagcaagcaaataataagaataacaaaagaacatattcttttttattttctagaaaatcttgcaacataacggttgtattttgaatgaacccaaaaatcataacttgcataaatatttttacaaaaatatatttcgcactccgtgccccagaacaatctagaaaaatatgtagattaagtattcaccttttttcgaaaaaattgcaaatcataaaaattagaatatgtctaatgttctttatagtcactttgttcaactcctgacagtctatacacatccgcatactaccatccttcttcttgacaaaaaacattggcgcacccgaaggtgagtaactttgtctaatgaaccccttgtctaaaaaatcttgtagttgagccttcaattccttcaattcattaggagcaatacggtatggagacctcgaggatggtgcagttcctggtgctaactcaatcacaaattctatctctctatctgggggtagcctttgtaggtcttctagaaaagcttcctgaaattcacatactatg

SEQ ID NO: 237051 - DNA, 1240 bp, Cannabis indica
cttgaagcggggacgttacatggtcattataagagattatgtcaatatcaacttaattaggtagaaagtcattataaaacatatatagtgtctttgtgattaatgtgatttttagttacaataaaaaattacttgcaattaaaatatagtatttaaactcaagttgtcaataatttagttttagtcacaataagcagggacggacgtaggctatcatatgaagaggccatgccccctagaatatattacatgtaattggtttcttttgataattagtataatgacatctaaaattataaatatgatatgttctatagattaaattttacttatttacttatttactttttatgaaaatctatttgcttccttttttgtcttttaagatatcaattatcttctttaataatattaatttgtttttgcaagatatgccactttagatttttccaattgtatacaaagtgataatttttattcttattcttttaatttttatagctaccacaaagtcattttttttcaattatgaacatagtgaagactacactctctaacaagataaaataattttttaaataattatttgttagtgtatattaaaagagaaattgccaaaaatttcataaaaattcactcgatgacttttatgatatgcaagaaagacgttttgtattttaattttaactataaatttaataagggatatttacggcaaaatttccttaatatttgtagttttattacacatatgatcctaattaaaaaatggcggcaaaagtatcttattttacaatttgattgcggttgtacccttaactgccaactcaaaaacacatattgatatgttattggataacatattaaaaactattatttatcttattttttaattaaaaatatacaaatttgaatagaaaaatgaaattaatttttttaattagataaataaaagtttttttagagaaaaatataaaggtttttttttttatttaatatatgacccaataatctgttattaagtaattttgagttggtacttaaggagcttagttgatatttaaaagtacgactgcaataaaaattataaaagaaagtacttttgttaacactttttttattagagtcaaatgtataacaactacaaatgttaaagaaattttactccaaatatcctaatttaattaataaagtatttttgaaatatttatcacttaaatttataatataatttgccccc

SEQ ID NO: 237052 - DNA, 719 bp, Cannabis indica
ttttttttttaaaaaataatgttcgaatccaaaactgtgatccaactccatggtaggccgatcttctaacttaattgggcctgaaaatgaacccgtctcaattaaccttaaaattttaacagtacacgtgtaactaattcaattattcaaaaatgaaaataacaattatagtatttataaaacgctaaaaaaatatataaaattgatctcgtgctgcacttttacaaacgttatcatttttattattacaatttctacaaacgttatatatatatacacgcataaaacaaaaagaaaaaaaaaggaaaaaatatagagtaatagtaaatgagactgagacagagaacagagatagtcatagataagaatttttcacatggtgaaacctaaacctgtggaagagaaaagagtgattataaataaggttgctggatacatagtaagtatattgtacggtacaatccatactatacatatttgaatcctacgcgattaaaatcgagcgcgtggataaacatataagtgaaattacagttgtaccctttaaccaggtcgggagcttgggaagccaaaaactcagtgggtcccaccaagcttcgttggcattgacatttttttttttcttctaatatttaaccaaacacaaaactcaaaaaacaacacaaaaatcacattcccaatccccaacaaacactctcatatttctctcttcttcatca

SEQ ID NO: 237053 - DNA, 1245 bp, Cannabis indica
gtatataaacatggctgtgaccccttcttcatcatctctttcccctgttcaaaagataagctctaaaataagtttgaaatcattagctaataaggccaagggaaaacgacctattattgaggaggatgttacgagaattgattagttattactttgtgttaatcctctgttttactgcactctaatgactggtttattaattgtaaaaggttgtacgaattctgttatgtatgtttcctttggctccaacactagggccacatgtcactctataatttgcccttgtattctctttttcagaatataaatagaaaatgttggacttcagcctctttgagctgagaattgttttcaatcctctttcgtgtataatttaacttggtatcagagcacaatcggcctgtgccaatgtctgctcattctcagactcctcagggaacaaccactgctgcagcaggtgctgttattaagggacatcgtctcgacgggtttgttaatggcagtcgtccatgcccggttgaacttattgctgcaccaacaacaacaaaaggagaacctggttttggtctcaccattaatccagagtacgagaactggatagtcagtgatcagttgctaatgggttggttgtacagctccacgactgaagggatagcaactgaagttatgggatgcgactctgctgctgctctgtggaaagctcttgaaaatctctatggagctcactcgaaatctcagatggatgatactcctacactgattcaaacaactagaaaaggttcaacatcaatggaagattatctgaagcaaaagaaggcttggtctgattctctcgccttagctggtgagccatacctagaaaatcagcttatatctaatgtcacttctggctttgatatcgagtatctacccattgtgcttcagatcgaagcccgatcctcaacaacctggcaagagctgcaaggaattcttcttgccttcgacaacaagatggaaaggcttcaaaacctaagcatcaacagcagcaacaaatctgcttagtccaccaacacaccaaatgctaatttggcaaatcaatcgtttcccaacaatagagggcgaggcagtaactcttactctaatcaaggaaatcatcatcaaaatcaaaaccagaccaagaggaggtcgatgttgggttttatgccctaaataaaactccatttcaatgtaatccattttattcaacatcaataaagaaacagaagt

SEQ ID NO: 237054 - DNA, 2056 bp, Cannabis indica
cagatgctgaggcgtgtggtgccaggaagagccaatgaacatgggggcatacattacattgcacctcggctcacacagccatgaaggcactgaacagaggcactatcgaggacataaaatatgtgggcgtgctccatcagcttctactgctactggttttcattcagttcatgtgaaagaacaatccgagcttgtgcagaaagctgtgcagcctgaaccaattcagtttccctgagccatcaaagatttaaaaaagaatatcataataaggaaaatgaacagtatgatgttttgaagttggcctcccgttaaaatctcatcttttgatttgggatggtgtttttttgtttttggtgtttcgttcatgctgactgcagaggtgaatagcatctttaaaagttgagttatagatacatgctacttccatcttcccttgcggcacaaagtgttcaagattgcaataatgccacttacagaaactagaaatgtggttggggatattattttttctgtttctcaacttatcaataataattttgcaattcatttctatgtttgagttgagataagcaaaccaaaagcagtacaccattgaattgcttgctgcagtgcctttgcttccaaaataaaaaattgaattcattttaccatgttctgaaatagctaagctaaccaccttgcccttaaaatctcttaaccaccacatcatatctagttttacaaaatgaatacaggcaaccagtaggtggtgcaatcgaagtagctctggctcaatcaaccttctgttttagcaaacctttgttgagcgtgttgtaaataaaacattccttgtcaatacactaacttctttttctttttgtaacttgtaaggtcatatcccaattcccaacttcttaaatagtcttgaaagattataattacattgcactccatgttggaaatgcattatttttagcaatcgttaaacactttcttatgactttattattatcacatatactacagcagaatactcaaggtatgctccaagatataagtggggcataagtgtgataaatatttatttgattgtgttacattccaatacaaaataaataaataaaataatttagaatagaatgtatcttttcataaaaacttcctaataaatctacatattaataaatttaaattttaatacaacaatattggtcatgaaaactccttatccttcacagctagtgacacttaaacccctaataagaaattaaaaaaaaattgtagtagccagaaccgtaccactcgcccagacccagacctagacctgtatgcccatgtcatacgaaacgggaataaattacagattgggtttgatccatgaacttaacgaacgagttttgagtttatacatatgaagttcaagggtacgggttcaacttgtgaaacccaactatatcccgtttgaaaaatgaaaaatacataaaattcctagtacgatcaatctgtcaaccttaatatttctgtcttctctcatttttcttgcgcctcacttctctttctcaatatcacgcacacgaccgccacaccagtctaaccaccacatccacaactgcgggcgctgcatcaccagatgccacccttgttggggttttatgccctaaataaaatctaactttaatataatcttatctattatcaataaagatcagaaattatatttcgatcttgtcatatactttgtttacatgtttattttatgattttatgattatatttttaatatacaagttctatgaaatcctaagcatttagttatttgcaattatagtgatgtatcacagtgaaaaataattgtgattatatgcttctaagttctaacttattaagtctgagatttatcagttctccaaatttacactgacgtgataatcaataatgtggtttacttacacttagacaagtggaatgttttttccaagacattagtaaagtagatttgtatctgacgcatagtgtttacattggactggagcgatattaacagtagaaaaaatatcataaacttaccgtcatatct

SEQ ID NO: 237055 - DNA, 882 bp, Cannabis indica
gggcataaaacccaacattgataccattgagaacttaccaaagcacgatccaaacggacctctatccaagaatcagtacctctcccacgctcccaagtaaatggataccccaacaagtcaagatcaatgagatcgcactcagctagaacatcattaaacccatccagtaaccaccgaggataatcgttgcctcccctcttatctagatgactagtaacattattcatgtctccaataacacaccatgggagagtagattctgacttgagagttcgcaacaaatcccaggtcttatatcgcatactcctattaggctcaccataaagacccgtcaacctccagggagaagaagcagcgtcagaaatctctatgtcaatatggttgaaagaatagccaagtaaccgagcttcaatgtcattacgccagagcatagccaaacctccactatgtcctctagcatcaaccgtaaacaaaccatcaaatcccaacttcacccgaagacgttcaagtttctctttaccagaaaaagtttcacaaagaaaaagaaaattgggtttcttttggaccacaagatccacaaggaattgataaacccacgggttcccaagcccacgacaattccagcttataatactcataatgaccggtgggcctgggaaccagcacccaccgaaaggccactttttgagcccgaaaaatcattcacaacaacctcatcaccaatctccatcccactatcaacatccaccacattagacccatccaattgggtacgacctacatttgcttccaccatactgttggaaattattttaccaggatctagatttactaacaagtatgttgttaggctagaattagtctaagtttcgggtcgtattt

SEQ ID NO: 237056 - DNA, 589 bp, Cannabis indica
ctttcccatactgaccatatcttcataagtatatagcccttttctggatgtctcaataactaaacagcaaggaagacgaaaaccatgttaaacatgaaaaaaatctaagacatcactgcagatgaaattgagtaataaaagtattatttttgttgacatacctcgagttccatcaggagaagccactaaccctctgaatatgcaattaccatcctcatctttgctagcatacccggcaataggagtgcggcaagagccatccaatgttagaaggaaggccctctcgcatgcaactgctagtctcgtctcctcgtggttcaatgaggctatgtaatttgcctgcaagcccaaagtaactaaagattaaaagaggacgagaagtatcatgaggtgaaaatttttagacgactactgcaagaatattaagttattagaaaaagagattgcttcatttttccaaaagaaaaaaaaactacataaaataaagaatgtgctaaaattatggcaagggactatgcttttgagcccattttgcccagaagagactatgcttgcatttacatctatccaatgtgtcagcacagaaagg

SEQ ID NO: 237057 - DNA, 506 bp, Cannabis indica
attaccatcaaaaattaaacttaagaattaatttatatattataactaattgatattatattgtgagctataataactataatgtagtactttttattgttataatatttaacccatacattcataaaaaagaggaatatacgtacaaaaattcatttatgacaacttagaacataaggaaaaaaaagtgaagtaggagacaatatagtaccccatacataattacaattttcaatttcgaaatgaaatcacatacatatttgtacttttacattgttatagcaaaatctaccataattattataagaaaatttatttgggattgcttagtatttttagaaagtattttttttttgggcttaaaatattaagctttatttaagtaattatattgtcggtttgttatatatgttatttgtattaaaaaatatataaatatacattattttataatatgatgtagtattgaggaaggaaacaataacataatttttaatttatttttt

SEQ ID NO: 237058 - DNA, 1324 bp, Cannabis indica
gtttttaatttcttgactttatattgtcaagagacaattttaatcaagtaacatttctattgtggaaaaaataaaatttttaatctttaggttcgcatatagtatatatttctaggtggactgtagttattatacatatatatatgcctcaagtaattttaaaggaaaaaaactttgtaattacttgaacaaattgtaattttactcataattatcataaatcattacagagatagataaaacatttacacattaaattcaatggtaatacggtcgtaaatgcttactaggttctttattagcgagctattaagtcaagctaatttgtaaacctcagttcctacgacagcttcaataacatatggaccttcctagttttgattaaacactccagcagctggatctcacgtatttgcaaatacacatcttaatactaacactccaactttaaaaatcttttttcagactcttttaaaatatcttgtgattcgatgtttataagctgcattggttatttgcgactcattacgtctttcttcaagtagagccaatgacatattcagaagttcttggttttcctattggttatagaattcacgcctatgggtcacaatgttaacttctactggtaacattgcttccaagccaaacgccaatgaaaatggagtgtgtcatgtcgctgttttctctgtagttctatgggcccaaagaacatgtggttgctcgtctaccaatcttcctttagcagcgtctaacttctttttaatagtatcttctaaggttttattaacaacttctacttgtctgtttgcttaaggtctcgatactgatgagaagcttataataatcttattcctttcatagaacttagtgaataattcaccatcaaactaagttccgttatcagatactattttaattggaattccaaacctgcaaatgatgttcttgataacaaagtcaagaacttttttttgcaagttatggaaatcagtgcttcagcctctgtccattttgtgaagaagtcgactgctataactgcatattttgctctacctcgccctgtgggtaatgccccaattggatcaataccccatattgcgatgggcatgaggaggtcatcattctcaactctgtttatggtacgcgaggtatatgtgaaaaccttcggcatttgtcgcatctgttaacaaattcatgcgtgtctttattgattgttggccagtaatatccttgtcatatgatcttcttggatagactctgccaacccgcatggtccccacaaaagccttcatggatttctttaattatttcattggctttt

SEQ ID NO: 237059 - DNA, 1263 bp, Cannabis indica
atttatattaaatttaaaattttgatatacatattttaaaataattatataataagtattttactatactttcatttttgtattacttagaaaaataaatttattatattcaaaactatcatcatcaatgtatcttacttgtgcatctaattaaacataaagtacaaacttgtgtatcaaaaaaatcactcttcaataataattattatacatgtaaactttcaatcttaaattaaaaatagtgtgtgtttaattataagagtatttttataaattcacactctacagtgttgaccagcgcaaagttagactttaataaataataaaacactaagaagataataaggaataaaaaagacaatataaacaccaagtatttgcaccatatccttatcctgccataaaaaaaaaaaaaaaactcaaaagtcaccccaattgctcttaagaaaaagccacgtaattataataaaataagttttataacaataaaattataaatatttataggataattataaatttttattaggagaataatatatataaattaaataaatatttaattttaataaattattcaaatatgttattattattttaaaagatattaaataaatataatattattaaaaaaatagttattaactattaaaaattaaattattagtaaatatttaatttaaatttaagttactataaatatttttattaatattcataataaattaaaatttttaaattcaaatacaatttatatattgaaatgtattgttataaatattttttaatttagtttcttaacaccacaagaattaaaaatagggacggatatattaccggcggagcatgtccactcttattaatggggttattactggcggataccagttaaatttaacgatagttttttttttttacaataaaatgaacaatatcggtgggctttagttattactgacggaatgtcctatcggtattgggcgatgtggatttgtgtgagaaattcttgttttttttttgtttttttttttttttttttaaaaaaacaattagcaacagatttttaccagtggatcccactattaataaaaagacaatttgaccatgtaccctattaccgacgaaacccactaatacggacatgtctctaccggtaatagttttatatacataaaaaaaaattactgaaatcatttcaagcgtcttccattattctcttcttcatcaaatctttcttcatctcattccatctctttctcttac

SEQ ID NO: 237060 - DNA, 865 bp, Cannabis indica
atataggcctacgattaaaggtgttgctcttccaacatctaactatgatcgatatagaacagactttgcaaaagggaatgcctggccatttcttcctcgactggcaagaacatcactaacctcagcaattccatcactcagtgaaagatctcagccacaacgaacaattctgtttcaaggagaatgctctcaacaaaacagggaagaaggaagcatgctacaaagttctagtttgaactcactcctggagatgttgcaacaattgccacatgtggatattcctcctattttggatacagatgagcacaatattaattgtgaagaaatggaagtgcccccaagacatacaataaatgataaccggactcttaaaggcaaagaagtcgagaattaccctggtggttttacattagcaacttacacatagtagagtcatgtttccagcatttcaaacttgaactcatttactcaaccaacctctaattctggttcatactcgaaccagggaatgctgaaacaacaatcaaaggtgggaatccatcctaatgttagtcaaactccaaaaatttgagatgtcaaatttacacctgcaacttttacaccaggaagtgtagcataccagaatcatgctgctacttcactacctgctgctgtcactagtgtttctccaaatttggaaacagataaccacagtgatttatctaacatttatatgcctatatcgggtcttggaaattcttccaacataattgctaccgacccacctttccctgagaatattatggcaaaaataaattgtgcactgaatgtatcagtgaccaactcctctgttgtgccatctattgttgtttccaccagaatggag

SEQ ID NO: 237061 - DNA, 1126 bp, Cannabis indica
tttttttttttaatttactttattaataaaagaaatggtaaatactattgggtgatgcgctctctatctgtttcggcatttggaagaattttttaattcaattttcttcatattcgtgtaagttatgttatttaagatattctacaaaatttcgaaaaatttaaaataatttataatatagaaagcagtgttcaaacagtctgtttcacatacgtataaaataaaatagtactcatgcgtgtaacacattgtttgaatcatgttttcggcatattggattttctaaaattttacaggatgtcttaaataactataacgtacatcaccatacgaaaaaaatttgactaaaaaattatttcggataccaaaatagataagggtgcatcggtgcatcattttaagggggtgcattgaaaaattttctaatactattatagactatgtcttttataaaagttactgattggaccttctgttttgttatatgataaattatactttgttttttccaaatggtataaaataaaagttaataataacttaatctaaagttgttatgataaaattggatttatttttctatatcttttcgtgctataaattgtctttaagttggttatattaaaaaatatatatcaatatttgagctcaagttattattttgtatcattttgaaaaatacaaggtttaatttgtaattttacaaaacagaaacttcaatcagtaattttacaaaatacatggtccaaaataatattaaccctaaaagaaaacttagacctcacgatctttacagataatatgtactgaaatagttgacacattaatcataccagttaagttctgagcataaactcatttagtcattatagactacaaaattacaaaaaaaaattacaactcaaaaaataattagagagtattacaatgcaacctatatttatcaatattttagacggaacaaatcacgtttagagttttgataattttctcagagttgctctcaattaacacaaaatggtgtttctaattacctcgggtgtttttttgttgtgttgtatgtgtttttttatttttgggcaggggtattttggggattgtgctattgtgaagaaagattagtctt

SEQ ID NO: 237062 - DNA, 760 bp, Cannabis indica
cttattgtctctactcgtatggagaaataagggaaggaaaattgttctcataatcgcaacccaaagaaacaactagaaagagattcacttagagacattcttaagaggtgcaggggtaatcaaccttgtcaattgaagaagatccaaactagaaagtttctaatgctcttatggattctgttggttttcttgataatgcagtggaggctaaatctcagccccacaatcaaccatgaaaattattagttggaatgcacgtggtttagggaatctaagcgcattttttttcatctttgtttgcttgttaaagagaaatccccacatgcactttttttaatagaaactaaattaggtcctaatgaaattttgtcgcttttgtcaaattttaaatttcaataatggacttgaagttcctagaatatgtttagaggggttgatgttgctttagaagatgatgtacatgtatatattttaaattttaatgcaaatattttttattgttatattacctttgcaaataacacaagatggaacttcctactttttatggagtttcctttgtccagcaaagaattcacacttggactcctttggaaagacataaggatgttgcacctctatctacatggctggttataggagaattcaataaaatcctaccaaatcaaaataaattgggtgggctttgcgcaataaaacacaaatggagcattttagaaatactctcgacagcttctatttaaacgaataactgtttgag

SEQ ID NO: 237063 - DNA, 586 bp, Cannabis indica
aaatcccagcagagggcatgtatcaacccgttcccaaaggagaaggcttatacgtgatgaggcaagttctagcttggacgtacaaaaacccgagatcatagttgatctatgcaatgagtggagagaagtcgtcgtagtaatgatcaagagagactggaaaaactaaaactgaaagttactcaaggacgagttttgtaagtaactatgatctacaacggttggatcttcgtgagcaattgaataagaaaaagcctgacttacgtcaacaactcaatcaaaagtaagaggatcctatccaattgcgaatcattgagttggaggataaattgaagagataccaagatggggagtatgggaaactacctggttacgactaggacgaggaatctgagccctttcatccagacatcatgagcgctgaattcccgtagagatttaaaaaccctcacgtctcgtcatacgatgggactacagattcggtctttaaataattttaataccatcatgcgagccagtaatgttacgaaaaaattacgctgtattttattccctacctcgctagttgaggcagcgagcagctggttca

SEQ ID NO: 237064 - DNA, 1256 bp, Cannabis indica
cactcgaacaacaatggcctcttctagaacgtctcagaatcccagtcgattcactcgaacaacaatggcctcttccagaacgtctcaaaatctcatggtatgtcattaagtttattgggttattgggttattgttacaaattcttgtatttatatacatatttaatttttaaggatcagtcgatatataccaaaagtaaaaaaaggggtttaaggttcgtagtgtttggttggcttgtattggttcttcattctcattatggaaaaaagctcactcaccctcacttcagaacgatttggttctttatctaggaaatcaatcgccattgtaattacatttaattttgttacatttaattttaatttcaaggtcaatcgttgtgctctttgttgcgaattagatgcaaatgatacaaactttaatcaaggtcaaactcaaagtcagaaacgaagttgaaaaacgatttatcagcgacgcttacaatggaggttgttcatgaagaatatattggaatggatattttcacttttcagagaaagggattcgattctgaactccgttttctttcgctcaccgccatttggtctgatgcaattcttcaatctggaaaggtaatttgtattgggggattttgaccgatattattggttatgaggaaaatataaaaattgagtattgttctaaatcaaccagttgtaattagatcaatggggatactgaattgtttgattacttttgtggcttcaggttcccaaaggatgggacaagttggttgtgtctgttgtctctgtagaaacagatttatcttcctcttcaatttcagatttgcgatctcctaaacccaacttcagttcctctgtgaaatgcctctaccctctcaaatacccctcttttctaattctcttatggtaagcttcacttttcttttccaattcagatgtcgcgatttacatttctcagtttggagcttttaatattaaattttctttttctgtaatggtttcgcttgaaaaatattagtgatctatgattggagatgaccccactgccattacttagcccaacctccgtaaacgcccaagcaaaaatgtatgttctttacatcattcttcaaactattatggaattgagctgatttttatcgtgacagtggcttttcttgctgctaattctgctaatttcaaactattatagaactttcattatttttatttttattttttatttataacttataacataaacatataaacata

SEQ ID NO: 237065 - DNA, 937 bp, Cannabis indica
taactgttattgcgaggtagaattgataactgctcgtaaatcataagcctggtaaattataaactgctcgcgcaaatagtagattactaactatttaaataggaaaattatgagcaatggaaaaaccaagactactctgcatttgatcaaaatataattgtttacattgtgaatgaaaacgcaagcaaacataaatatattaagttcgaatgcaaaagtacaaagcatttaagataaaaaaaagagctaagttggccagctaactttacaaactagcttttacgaaaatgccacaaggggcaaaccattaggtcattttcctaaaacaaaaaatgcaagactcattataggagacagcagggcttgaggataaccatctccgaacaagaaccagagaactcgacttggtgtgctgacccgatgagatgcacctcgacaaccctcgtagtagagacctcattccctcgcagcagagacctcattccctacaaccgagacctcattctcaacctcgagaaatttatcaacatcaatgataggcggctcgaagatttcctcatgtaatctttggtcttgggccgtttgggttctttagtggaatatgcgacttcatcagcttggaccatcttcttcctagatctcttgtcaacttggggaggacctttgaacatactctaaaaatctaagtccattcttgtggagacaaaggtaaaaaaatcaatgaaggaacggtggtgttgaataaaaacattaggtttgtagatataaaaaaataggttcagaccaggccaccatttacaaagaacaatgcttactttcagaaatctcttgtaagaatcgcctataacggtgggcagtttcttcttggtttggattaatcggacgatcttcagtcctagaatcattcatttccgatttgaactgaggtttgaagttt

SEQ ID NO: 237066 - DNA, 547 bp, Cannabis indica
tttatataaatattataatgtgagatagttaaataaaataatataatataaaatattttagttattgtggttttttttttttttttttttttaaaaagaaagctttatagcctgggaagagagagtacaaagcagcaagaaccctcaggaaagccaggaaggcaaatagccattccaaacatactcgctatctagtcctaaacccaccctagcacaagtgtgagccattttcttgaactcacgaggtacataagagagtataaggacaggactaaacgataacagtgtcgaatacgcactacaagatcactaataacagaataattacaaaaagagccattaattttatcaactaaactcttacaatcagattccacaatactaacaggaagatgaacactttgagcccattctagagccagaagaatagcctttgcttctgcaatttcaggtgacacattcccaatcaccggagcaataatgccagcagtcacctgatcttgatcatttcgaacaaccacaccaagactatgcttcttcagattaa

SEQ ID NO: 237067 - DNA, 919 bp, Cannabis indica
ttattggacatttttagtgggtaataaatgtcattttagattttgtgttttgcaacagttaccaattgtaccatctgttttattaaatattttattaaatgataaaatagatcttatattttccaaaagagcattgttattgggcaccagtggtgcctagcaccttctcgacatgtcgcgttgtgattggctagtgatactccctaaaagctattatcttaaattatataggacccggtacttagtttgagtaataacgatattgacatataggagggtgctaagcaccactagtgccctttaacatttctcttttcaaaatagtaaaaataggaccctgagcttacttttgaacaattttattttttaatatatacaaattttaagacaatttctaacccgaatagatacagaaaatgtaaccacttttgtcataacatctttagattagattattattaagttttattttgacataaaatcagtttagggtcctatttgtataattttgaaaaatacaaggtccatttagtcatttaacaaagcagaaggcccaattggtaatttttgcaaaacacagggtctaaaatagtatttaccctttttagtgctcgatattttttataagtggcgtctcaccattgattagcaatattacttaaaagtttcgtaaattatataaaactcggtataataccgagaagattgctaagcactaataatatgttttagcaatactcatattacaatgtcatgccacttttcgttgataatgatgatcactagtgtattgtgtatagtaatttatttatttatttattattattattattcttatataggttattaattactcgatatatttaaatacacgttttccgtaataaaaaacgtttgagttgtaataaggttctgtttt

SEQ ID NO: 237068 - DNA, 1442 bp, Cannabis indica
atcttggagataaccttatacaccacattacagagagatatagggcgaaagtggttaggtctcttcggattttgaaccttaggaatcaggacaatatttgtagtattaacacctttatgcatacgacctgtttggaaaaagtccacaaccgcttcgcagaagtcagccccaacagaatcccagtagtgtttaaagaaaagaacagacatcccatccgggcccggggctttgttactactcatagcaaacaaggtagttctaacttcctcaagggagggtcttctaataagatcagcctggtcttccaaagacaaaccttctcggactaaatcgttgcaattaggcgccataccactgtccgatccagagaagatgccttggaagaactccaaaaattcagccccaacaagctcccttttcgagatccacacattgtctttgttcaggatactatcaatggcattccttcgcccttttatggaagcggaaaggaagaaaaattttgaacacttatccccttcctttagccaagagaccctggctcgctgcttccaatacacctccttcctcatacgggcttcgttaagggaagcgcgcaaatttctttcagtttcccactgcctagagcccacaggcaaactctgaataaggtcaagcttacgttccaggtcccgaatgagggtatccagtttaccaaactgggatctattccaatgcataagggccactcgagtcgccccaattttcttgaaaatcctggcaggggcccaagggaagataaccgaattccacgcagattcaaccaccagtttgctgcgatcatccctagtccaggcttcttcaaacttaaagcttcttcgggacttctcccccagaccatcagagaacagacacaacggacgatgatctgagttagaagtttggaaagagcagagaacggcctttggaaaaagccgcatccaatcaccattaattagacccttgtcaagggcagatttaacatggttggacccagaacgatgattgtcccaagtcaacctctccccctggataggcatgttaataaggcccctggcattaaccaaactggagataaccgggacaaattgatctctacttctagacccttcacgttcagagtcacttagcacaaagtttgtgtcacctaagataagccacgggcctccaaatctatccccagatgccattaaagtttcccagaaagatttcttagcatggaagtacgggggaccatagacacaagagagaagccaggggtgcgaatggggatccgaatacacaataccagtaatgtggtgacgggagctagcaatacattcaaactcaaaaccaaatttccaggccaaaataataccacccgcagtacccactgccggaacaataatatgaaaataaaagtggagagagtgaagagtacgtac

SEQ ID NO: 237069 - DNA, 1676 bp, Cannabis indica
ctatgtatccatctcacccatagattgtcttgtttggatgagattgcccatacatatttcctaacgacaactatgttccaagttataatcttcctaaagtcgagccccccttctttttttggcttgcattttttccccatgcgacataacctaggcatgcacattctaaattgcctttccataggaatgcccaacacacgacattaacttttttcaagagctttttagatagaatcatgatctgcgtccagtatgtgtgaatagagatcaatatagaattaatcaaggtaacactacccgcaaataagatgtttcttaagctccaaatgctgattcttttcgtcatctttctaccaaaatttttgattcagtacttgaaagtttcctggcagcaatgggaatgccaagatatctaaatggtagtttgctcctagtaaaacccgaagcgcttaacactctttggatttcaaaaacagccatcccgctaaagtaaaaagttgatttggaatcacttggtagaaatccaaaagtgttcgcaaacaacttgagaccttgaagtaagaaataaatggatttgaaatccccatgacaaaagagtaatacatcatctgcgaagctcaagtgattcaattgaagaaccttgcatccttcatgaaattgaaagtcattcttttttccaatcttaaccatgattcgggaaaaatattccatacccaaaacaaataagagaggggacaaaggatctccttgtcttagactcctctttgcttcaaaaaagccatgtaaagatccattaagaagaatcttaatcttggagtgcgaatacataccatgattagtttgatgaagcttgccgggaagtcaaaagcttgtaacatctcctctagaatgtcccactctattgttagtttcttttaaaagaaactagtttctatgtttcaatttatctttttgattgttttaggtcgtattggtatttggttttccaatttagttattatatttattgttttacataactgactctaatattctaattttaattttgttcatttaaataatttatttctcaattatagttttaactagttgattattgtaactagtttcagtgtgtcaaattctaacaccagtgacaactctaatgcctaacttcagtgactttcgtgtaatgaagtcaactctaataccttttttgataattaatagacgacgataacaacttcagcgaatattattttttacttttttttgtggctaatattttattttcgcggataatgattattttgggtagtgtagtacgttgatggttaagtcttggagcttttaaaaagtttgcaactagttttattttggtattgtatttaatttattcaatattctatataatatctagaatacaagcatgtaaaatttatgtacaattttcggtatttgtaataggattattttttttcattaagataacaactctagcgtatatactctcattctattttctacttcttttgcggctaatattatgttttagtagataatgaatattttggtagttggttgatggtctagtattagagtttctgagaagtttgtaactaattttaatattagtattatgtttttattagtttttttagggcattttacaaaatactggatttggggtaatactt

SEQ ID NO: 237070 - DNA, 914 bp, Cannabis indica
ccttgtatacaaagctcctcccaactcgatttatcaattaaaaagagcatatatggcctcaaacaggcttctcaatagtagtacgataaacttagcatcacattattaacaaaaggtttttctcaatctctacttgacaattccttattcatcaaacgaaccaccaccatattttttattgtcctcatctgtgcggatgacattgttgtggctagcaacaatgatcatgccatatctcacttcaagaaatctctagatattaaattcaacctcaaagacattagttcccttcggttcttccttggacttgaaattggtcacaccaaataggaaatctcaatttctcaacgaccttttaccctttaattattaaataatcacacatgttacttatgagctaaactaacctccacacatatggaattcaactccaaattaagcaaagacaaaggatacattctccttgatccaactgcttatcagagcttgactggaaaactcatttatttgacgataacgagaccagatatatcatatgttgtcaatcacttaagccaatttttacaatcttctcaagtaccacaccttcaagccacacataggctcttgcaatatctcaaacgcactcctgaacaatgcttattttttcctgtcactacttctccaacagtatctacatatgcagaaatcagtctctccccatcaaattttctagtgtccttctttgctgatgtagattggagaagttaccaagacaccagccactctatttcaggctattgtgtgttccttggtcaatcaattgtttcctgaaaatctaaaaaacaacaggttctttcccgtttttctgttgaagtcaagtatcgcgccatagcaaacgccacatctgatgttacttgggtcattgcactcct

SEQ ID NO: 237071 - DNA, 1144 bp, Cannabis indica
acattgaatatcaacatttaaattagtagaaacataaatataataaatgaagaacagtttcggcccaattcactaactatagcaacgtatgtgaccttggtggtgcgagttgtctgttcatattctcaaataagctcgtgggcttaagatgcgtacaagactaattgagtctcacgtgtttaagatatatgcgtcctatttgagatgcgtatatggatctcttgtaaaaagtcgataacttaggacatacgagtccttatcgggttatcgagtgcattaggtcatccagaataactcgctgagtaaagaatcgatatttactaacttgcaggaaaacctttatggacatcgcatatatcttggtatatggaagtcttaaacccagtcttcagtccagcatcatgcgaggtgtaataatgagactacactgtgtcaaggtcacatcatctcgctgagtctggttcaggcgaggtttttactcaagtggtctccttctgacagctcagcactcctcgagtgagtccacgtgttatttttacgggtagcctggtcttgagtttctaggtgaaaaattcacactataacacgtgcccctagttgtaattgacagctatgtcacaaggaaaactataagcgagaggtaggagatagattgtcacgagatggtgacttttggttgtcttgtcgagggttttgaaaagacagctgtaattattacttttaatccatttgaggtgccacatcatcaaaactctttggagtctgtgcaggtgtggttatggataaccgttggattatgagaccttaggcattcctttatggtatcctattttttgcactatgatgtggcaatatgtattagtgacacgtgtcattattctttacacttggctagagaaatgtttcgaaaaaacttcaagtaacacatttgcacgcacaaagtctacttgaccgagtagagcaaagggctgatgattcgagcaaagagtgaagttacctctccgaccggtgtatcaagacttaactacttcagagctaatatcgtgaagctcaagcacaaaagcaatccctacaatcatgggatcgttccagagagatacacaagctgtctcaatcccccatttcatgtattctaaatatgtaa

SEQ ID NO: 237072 - DNA, 949 bp, Cannabis indica
agtcgagtactcgccattctaggtcgaatactcgcgcttgtcacttctctgaaaattctcctttatattaattaaataatacattttggtgttgcgaaattcactcgacaacaaaagatttgaatataagacagagttggtggttggagctggtcaaggattatgattgtgaaatcctttactatcccgagaaggccaatatggtggcagatgcacttagtaggaagggccccgggtatgtatccaacatgattttgatttcaccccagctagaaaatgatatggtcagatcaggtattgagtttcttattggcaaacttaataatttgacattacaattcgatctgttagacaaaattaaagtttctaagttaactgattctgaactggtgaagatccgagaaaaggttttagctagtcaagctaaagactttacagtgtcaagtaatgggatgctattgttcaaaacaagagtgtgtgtaccaaacagtgtagggcttagaagtgagattctcaaaggagcttataccactccttattcattgcatcctggcactacaaaaatgtatccagatttaaaacccttctactggtggtgcaaatgaagaaagatatggtgtaatttttatcccgatgcttgacttgtcagtagattaaggctgaacaccagagacctacagggttgttgtagcctctgactcttcttgagtgcaaataggaggatgccacaatggattttgtggttgggttacctagaaccatggggattttttattctatttgggttgtggtgaattgatttactaagtccacatatatttctaccagtgaaaacaacatttataatggatcagtatgcgaaattatgtgaaataaatattgaggatacatggggctccaaagtccattacatcggacagagatcggaaggttaccttaaaattttggc

SEQ ID NO: 237073 - DNA, 1453 bp, Cannabis indica
cctagtaaggacataacacttatccaaggtgtaagtataccttatcgatgattatcatgtcactctaaatccagtgtactgacaaatcatgagacttaaaattttgaacatataatcataattatatgtcactatgttggcgacactataatcatgaataaatatatatttttggacttaataaaatttatacattaagtatataatcatgaaataaatcatgtgaaccattcaacataaaatgatttttgatatttgattaattagtaaatctaattatatttaaatgagtattatttagggcacaaaacccaacaagctcccacttgcactaatataaaactaaaagtgtatttaaattaatctcaatactttgatgaatactccctggtgtaaaaccggttaactggttttacaggccctgtaaaaccagttagctggattagcagcagggttcccgaacttgtcgtgttctcaattcgtgttagtttcatagctttggttggttaattccttgtcagtttagggtattactatgttaactttcagtaggaaaacttttagtttaaaacctaagtccatggttgtgatttagcgtgtcacttacccgtgttatgaacgatgcgatttaggggcctgtatttcgccaagtagctgttccactcaggttggctgacacacctaaattcggaaagaaggtgagattagtataatgttatgcatatgtatttttatgtttagcatacatgttttttatacatgttagagcacattgatagcggtatcagtatacatagagttgtgatagatatcgataaatgtatatttgtctaaaatactgatcgatgttatcacatcaatatggatagagtttaactgccatattgagtataggctggtattatggtcgatagtattgtcgtatgaatgttctaaactcagtaccgtgtgggacacaggaatagggttatggctgggtgtatgggtgcctgattataatccgggttgttattatgttattacttacgctattctgactgagtctgttgacccgcagtttctatttccatgtgtaggtaagggtaagggtaaggctgagctgccgtgagagcgagcagatggagattgtacatgtcgggacagttaggcctggagcatacggtctttggaacatcagggcttattttgaatagtcacaaggcgataaacttttatatatgcgcactgaaacttttgtaaatgcttttgtatacgggatcctggaatttcgtatgtatgttattttttgttatgattaattaagtaaaattttaattaatcacgattttcaagaacctcgttgattagcaacaagctgtacagtaagttaaaaaaacacgttaacatgcctaaaatggttagggtgttacaatttggtatcaaagccgtcgggttgtctttcgaagatcgttac

SEQ ID NO: 237074 - DNA, 1870 bp, Cannabis indica
gtctttgtctttgtgagccaatggttcctggtagtcctctggctcccctttttcagtttaaaaggatatactctgaccgtggatatcttttagatggaattagtcctttagctgaccttctgcgagattgctcattttctggttactggtacttctccccatgattgatatcttcttgtgccagtacatcttcttcagcatcactgtcatcaccatgggtcatctcagcaacttcttgcaattcatcgtctgaccattgttgttctggaggaaacaactcaatttcagccttttttggttgacatttttcttctcttgctccttcaattgttaattgtttgatcttcattaaagaccacatctctgcttcttatgaccttcttgttaactggatcccaaagcctatacccaaattcttcatctccatagccaatgaagatacattgaactgctttatcatcaagtttggacctttgttcctttggtacgtgcacgaacgccttgcatccaaacaccttcagatgtgagtatgacacatctttccttgtccatactctttctggaatatcaaactttaaaggaactgatggagatctattgatcagataacatgcagtctgtactgctgctccccaaaatggctttggtagcttggatgatctcatcatgcatctgaccctttctataatggtgcgattcattcgttctgctacaccgttatgttgaggagttccaggtacagtcttttcatgccgaatcccatgtttagagcaatagtttctaaactcatgagaagtatattcgcctccattgtctgttctgagacactttaactgcttcccagtttctctttctaccatagcatggaattgttggaaaaatccaaacacttggtctttcgtctttggcatatagacccacacctttcttgatgcatcatctatgaaagttacaaaatacttggctcctcccaaggattcaacttctatgggaccacagacgtcagagtaaactcgctctagtacctcccttttcttagcagaggaactcttaaatgaaactctatgttgctttccaaataagcaatgctcacaaggatctgatatcgtacccttatccaaaggaatgaacttcttctttgcgagtagttgcaaacccttttcactcatatggcccagtcgtttatgccataaatttggtgaagtgttgtttgctacattaatactgttgttgcaagccttcccataagtcttgtacaacgaacaacataattttcctctcgcaacgatcattgaccctttacagagtttccaattctttttgccgaagtagctttcgtacccttgctcatctaaggcatttacagagatcagattaaggcgcaaatctgaaacatgccttacattcttcaatgtcaaatgacaaccaacattcgtttgaatacttacatctccaattccaataattttggagcatgtagaattacccatcttcacatttccaaagtcaccagctttgtatgtggtaaacatctctctattgggagtgatgtggaaagaggctcctgaatctaccacccactcaaccatgttgtctccgacatgcaaacattcatcagcaatcactattgccacatcttcttctatagtggcggctgtagctgtgttgctgtcaccattatttttcttcttgttggcctcctgcatttcccgcttcaaaatcctacaattttcttaatgtggcctggcttgccacagtgaaagctgccatcaattctgcttctagatttggatctacctctggacttatcatttctataccttccttctttgttttgacttctccccctattttctaaaataagggcttg

SEQ ID NO: 237075 - DNA, 687 bp, Cannabis indica
taaaataatttccaacatagaggacgtgtatctaacctctttcgtaagagaaagccggtataaaatgaagcaagttcaagttcgggatgttcaaggcctcgaggacatagttaatcgagtaggccaatgcgagaagaaagtagatctcgatgttatgctgaccaagaaatattagctatttgtaaagttatcaattcaaaagttactcgaagacgagatctgtgagtaattatgagcgaaggtagccagacctttgagaacacttaaatcaaagaaagctagatcttcgcgaacatctgaatcaaaatgcacttgatttgcgccatcaacttaatcaaaatggaaatcaacaacaagtagaccccatccaactgcgaataactgaactagaagataagttcaggaaatatcaagatggagaacatggcaaattgccaggctatgactcggatgaggaaacagagccatcacatctagatatcctaaattctgagtttcctcagggattcaaaaacccacatgtcactatcttgcgagccacaatgtcacaaataatttgtgttgcattttattcttgacctctttaacaggagctgcgagaagctggttcgataaatttactcagcattccataacgtcctgggagcaattatctagggactttaaaaagcaatttcaagccgcaag

SEQ ID NO: 237076 - DNA, 629 bp, Cannabis indica
tggactagcggtggtcatgattaatttggcaaacaattcttgggcttacagtactcaacaagtcagagcagagtcgacaatggaggcggagactcgtgcaatccaatgtgatcttgagtggactattcaaaactcttggagtaaaatctatattctctcagattgtcaagaagtgctcagggcgttggaccagaagaaatgtccccttgattggggttttttgaacttatctttgttggttttagatttagttaataaactttcagattgtaattttttctttattaagcgttgtttgaatacttttgcaaatggactagcaaagaaagctagagtttctagccatgtgtctggtgtgttttaaggagagggaattctctctctaattctcatctatgtttcttagtttaataaacttgatgttcttctaaaaaaaattaaagggtttttgaatttatgccattttggtgtataatctttacctttccttctattcattttaatttgtttaaaaataataaattagttgttcataatatgtataattatatataaattagctattattccttattaatgtaaataatataaaaagtgatattttttaaacaaaattattttatttggta

SEQ ID NO: 237077 - DNA, 1034 bp, Cannabis indica
gatatcaatagatatatgctaggtgaagtagtagccatcggattagcatttcaggatattggtgaagtgtacatagagttgcactgagatatcaataaatatatactaggctttcagaaagtatgaactaattgctaccacatcagtacgactagagtactgagtataggctaaattcgtagttagtcatactttaatcaagaacgttcatgacctagtttttagacctataggtaggtgtatgggtgcctggttatacgtcagttacatgtttatgttttatacttttgactcacaattattatttgcatgtgcagataagagccggaattaaatcagaatgagtctagagctggatgaagattgtacatatcaagaaaattagacttggagtgttcgggtcttcgcaacaagttagactcattttttaatagtcgctaggcaacaactttgtagtaaatatattttgaaagcagttgtgaaacttttaacgggatcccaaaactatgtaaattatgtttaattattaaagttttaagtttatttaagaaagttttaattaaatacgttttttcgataaaaacttttattagtaaaggaacgcacaataattaagaaagcactgtaacgcgcctaaattagtaggggattacagtaagcctccactaccaagaagggtgggtggaaaattgtagaagtttgtaaaaatttttatttttttatatataaatttttttgatctttaataaaaaaaaaagttattaaaatcttaatcatttctttatgatgtggacaaataaaattttgacatgtggaaattttaagaactacaaatgtaatagttaaattatgtacctacagactaacgagaatcttgagcgtgaggctattactataattttttgagataaaggacttatttacatcaaagtgaactttttgagaacttatgttgcttcgacacgtgacattttgagagcaactaacgaatttgttaaaatgaagaccaacagacttataaaaatctcgagttt

SEQ ID NO: 237078 - DNA, 1111 bp, Cannabis indica
tttttcatattttatgcccgtcaacattggaacgcgatgtatggccgatagaatcacattttcttttagattagtattttagtaatagcagggcaatatagtttgacatagggaatttcgggattattcgggtgttagattatatgcaaggaaatcactaacagtccacaacagcagaaccttcaaattgaaaacttctttcttaaaaccatcgtatgcatcacaccatctccgtacaactctttcaagtcatcaacttacggtgccaaataaacatcgatatcatgtcctaattttttaggccctgaaattattagcgatagctttgtaaatttccttttcatcacccaccaaggaggaaggttgtacataacaaggaacacatgccatgaactatgtcggatgctaagagatctatgtggatttactccatcggcagattgaccaaggcgtagatgtcttggttcagcttgaattctggattcaaataatttacttttttcgaagcttgtgaatcagcaggatgtcggagtttagcgtctttcactcgccttttctcgtgccataataagttttcaaaagtttctgcacttcgataaaggcaagtaccacaagactttctctagaataagtttccggatctccttactcttgttcggcttgtaccgtggcaaaccacattccagaaaagtgtccatgtgggcatactctttacgatacaaaatgcaatcatttggacatgcatgaatcttctcatacttcaaccctatcgaacttaaagttttcttcacctcatacgtcgacttcgaaaaataattttccatcagcagaatctctttaaaagtagatagaaattgactaaaacacttatcacttactccattctccgcctttatgttataaattttcaccatggttgatagtagtcgtttttcacagccactaactaacgacctatttgcatctctaaccatgctatcaaatttttcaggatcatgaataggcatgtcaaaaagatccatttagttggagcgggttggagctccgatccaatagatcaccactgatctgaaaccttcgaatacttattggatcttggatcaaatccgct

SEQ ID NO: 237079 - DNA, 1453 bp, Cannabis indica
tgccttgtgggttcgcaggctaagtcctaataatggacgcctagcgaaacttcagaaggcagggtgaaatggttgagaccggaggtggtcagggtggtagaaatccccaaaacccctgtggacgcggtagaggccgcggtattgctccgaggggtggccaataggatccacctcaagctccagttgattgggagcaaaggtttgctgagacgcaagccataattgctcaacaagaagatgagattcgaagactcaggcagcaggatactcctgttgagcttccccggcagccgcctgctgcagttctggcagcttctgcggtgctagtagaatagcatgttgctggtaattgtatggagcctttatatgagaggtttaggaagcaagcacctacagtgtttctgggaggtcctgatgtacttaaggcagaacagtggctgacggtgattgaaagaatattgaaattcatgggagtggtcgggaatgacaaggtggcgtgtgccacgtttcaatttcaggaggattccttggtgtggtgggaaatggtatccctcaccaaggatgttgctagaatgacctgggaggaattctgggatttgtttaatgctaagtattacaatgaggcggtccgcagtgcaaagcggaaagagtttgttgagttggtacaaggcgagggtatgtcggtgattgaatatacaaccaagttcgatcgcttggctaagttagcctttgggatcgtaccaacagacttcagtaaaaaggagaagtacttggcggggttgaatgccaagattaagcacgatctggttatcacaacaaatgatactacaacctatgctgaaatggttgacaaggctcttcgagctgaaggagcagttaagttcttacaagaaacccgagagactcctggtgctggtgggaccactactctccctatttctagccctggaaaagagagtggtgattccacttttgagcaaaataagagaactttcccattttcggggagttcagggcaaagtaaaaggtttcaaggaaaccagaataaagggggacgccagacttattcctatcctgagtgtccgcgctgcaagaaacatcatctcgggacttgtaaccggatagcttactttcagtgtggatcagtagggcacctcaagaaagattgtccccaattgaaaaaagaggaacctaagcctaaagtcaaacctgggcctgtgcgtgtatttactattactcaggcagatgttgctgccagcccttcagtagtcacaggtcagcttcttatcaacggctttgctcttactattttatttgatttgggtgcttcatgatcatatgtatcatcgagagttcttaatcaacttggtaggcctagtgatgtttttgagatggaatttggaaccctattgctcaatggggaattaattatttcaaggaagtgggttagatc

SEQ ID NO: 237080 - DNA, 614 bp, Cannabis indica
tggagaatcgttcatcggaggtggtgatgatggtgaatcgtttatcataggtgctggtgatgaagaatcattcatcggaggtagtggtgatggagaatcgatcatcagaggtggtggtgatgaagaattgttcatcagaggtagtggtgatggagaatcgatcatcagaggtggaggtggaggtggtggtgatggagaatcgatcatcggaggtggaggtggaggtggtggtgagggagaatcgtgtggtccgagtatgaaaaaactgtgtttgaaaacagcggaggcaaaaacgatgataatggctataatcttctttctattttgaataatgttatcctcgttttgaaaaatggtgtatatataggcgagatcgagagggagggaaaagaagaaaatgcaaatacagtgaagtgaatcgtgaggaggactgagcgaaaatggttagaccgctttcctttcagtcttggtttattttttaaaaatattactttttattattatttatgtccttagtacttttttttaaaaaaaaataaaataaattaatatatatatgtaactataaagagtataatttctcaaacatatatatatattgttagaaaagtaat

SEQ ID NO: 237081 - DNA, 4064 bp, Cannabis indica
ttttttactatttataaacagtaaatgtctccaaatatacatatagaagttcatggaacactatattattagtttaataaattcattcccaaacataaaaacgaacaaaaaaaaattcaaaaaacatctcttgatgataagcaatgaaagccgttattaaatgaacccaagtgatgatgatatggttgataattattcatatgatgatcaattttagttttaatgtgtttggaaatactttgttggttcatcattcaaaaattatagatattggttactagtatgtaagtatttggagaattaagatgtcccataatgtattaaatcaatttaagtgtgttaactcaattaattattttttaaatactattaaatataaaccgtttttttcctttaaaatataaattgatgtctcatatttaaattagtttaatacactatgatatactattttttttaatctttattcaataaaactcactcccgaaaagttaatctagtgtccaaataggaaccaagatctcccattaataaaaattagggtttcatttcgaatttttcaaaattttgtagaatatcttaaataactataacatatatagatatgaaaaaaaattaaaaaattaaaaaaaaattctgaatgctgaaagaggtagatggcacatcagtattgtaaaagcaccctatgttaaaataaaccagcctacgaaatccaaatggatattttttcttggtacgctcctttagaggagtggcaaaaaatactctgggatgaatgagaaaaggttcgcaacaatcgacaggtctttgtttgtccatcaggacatgtagccaacatgatggattgatatactgtcttctttatcagtcttaatgcaaaattggacgagaacaagaaaatagtttgcaatcccacttttgaactatacggatcccaagaagcacgtttcagagaacaagatgcagagtacagagatctccaaaagattatctttgagaaaaatcaaactattccaccaaaaatttggccaaaaatagaagaggatgcccacatccaattattattattatgttatttttaaactaacttattttatttattattatcattttttaattatcatctacaatgttacaaaatttcccaatcatttcatctttttcaacttttttcattaatgttgatcaatgtatgctatgatcatattttgaatacttatatatggagcttagtattttccattttcttggaatataatcaagactactatatatagtagaatagaaatgtctctatacaatacaagggtttgtgtggttgtgaaatttttgaagatgggactgtccaattaatttgaattgataattgaaataacccttgttcataattttcattactttgttttcttttttttggaccaatcaatggtactaataaaactcatgtggggtgtttttcttaggcttgtgttggatcatataatatatatagtactagtggttcatgtccttgctaggttaggcagttgaattcagttagtacatctttgcctttataattatctaaaactcataataattaattaattacaacgtatgtgagtcttctcaatgtcttcatcaatgtcctttctttgtttggtatacacaacataaaatacaatgatttgattttagctagtaatgaaatgtgcacacataaaatagttattagagcactaatattaggtaaatttggagtgtaatgggctgatttttatagagtaatgtaaatatttaaatttaacttttagatgtgatgtgaataacttctgtgagtatctcactgttaattaatgtcaagttaagagccatatggtaatctctgattaggcaaagtcattaaattttttatttttttatttaaaaattcatttaaatatactaataataaaataatacgtggatattaacttgacatttaacgattagctactgaagtttcagaaatattcatacccaagtcaagttcgggacgagggcaagagaatagatacttgtctgaacttgccccaatatgatatatgtatatatttaagttttaaaatcttgactattacaattaaaataaattcatgttttaggtttttttattgattatattaatgagacattttatttttcattaaaatatgcggtgatgcatattaataatcacatttaacagctttaaaaaaaataacatttaactctaattttttattatactaactctatttattatacacactattctacttatgtttgtttttttaataagttttttataattttttttttaatttcttacattagtttttttttcaaaaatatatatgtaatatgtacctgataagaatccttctcccgtcaagtaatccctgtcctgtctccgctttaatttaaacggatattgagacgggtataaatgtgaatttaggaatagtatggaggtgggggagcgatccccgcctctgccccacctcgtttacatccctaataattagagcatgtgataaaggtctccatgctacttggtggactccctaaaagagtattgctatttagcacatgtctaacactatattgacgtgatattttataattagttagcagttttttatattatttattatattaaaatatactgataacaatatttcatatcttgtagtagttgacgctttaaattgccttttaatatttttctaaaataaagtataattataaatgtgagattttaatttgaatttcattttaaataatgtgattggttaaaggtattatcatactattatataaaataccttataatattaatattgctataatttaatatagaatctctcctattttaatttgaaatagccatatgtaccaaaatgttacataacttaaaaaattgagtcaatcacatcactcacatcactgtgaaattggtgttggaagtatgtgcttttttgcactttaattggaaatatgtcacatggggatcatattaatacattattggtctcctcttctaacatttttgtagtgtttacatgcattttggaaacattatataatgactatatatcttagtgaaaaaggcaactattataaccaataataattttaggagatgaaattcaaaaatgttggaggagaggagaggagaggagttagtgatatttttgtactatgtactatgccagctctaagggatctcaatccctccacatatatattttagttacctacctaatactatatatccacagccacatatcatatatccctaattattattattattatcaaaactcatcacatgaatttttcagatgcctaagtactcatagaatctcatatttaaagctctaaagaaaaaatattaatgtgtaaattttgagtgcttgcttatagtaaattttaataacatggttaaatattgtagaccacctatcagatcaacaacattttatttttttttatgattcttatattcagcatgaaccacataagcctcatcaatttaccaaataaattgataagttgatcggacgtcccaccaaacaaaatcagtagtttcttggtcacgactaactaaaactaaagttatatgagtgttttcatagggtagaatctcctcaaagaatataattttttcatgtgaatgattcaaatacgaatttcttcgtttaggagaatatttttacactgatttatagaaaacaataaaatcatacacataaattcaaaagactgattatactcttcgagcactcatccttaaactgattactggtacaaagttttcaaattttgtacatttcaaaacttttaactttgggttgtactctattagtacatgtacaacttaattaagttttcaatattattaatgctataatcttaatttattcaaaaattatccatagccacataatacatatggctaataaaaactctctttaaaattgtaaaacctaactcaatctctaatgtgtattattctaaattttagaaacatgtgatgtgtcacattaatttttttttttttt

SEQ ID NO: 237082 - DNA, 2124 bp, Cannabis indica
gagtgagttcctacacacatcaagtggtatctcaatcatagtgtgtaaggttgtgaagaatccagaatcaagagaaggaaatttaggctcagatcttggtgatactctgctacagataggatacaagagttagagatctgagcggaaggagccattaatattccgttgcacccaatgtaaggttttcgaaactttatgtgtttatttacattattttagatattcatatttaggatgttaaataacatacgtggtagtaaatccagatcctggtaaaacatattccaacacatgcaaaatgggagccaacttcgtcacctagggtttcccctggcgcccaacttgacatccttaactagggtttcaaattttaggactggcactgcaaaatggtcaaaacttgcattggaacatcaactagacataccacaaacatatttgaggcatcaaaataagaatcggagcaagttgatatttgaacacccggggccccaagcacccagcaccgaggttgacaatctatcaatcgaggtgccttccaagggtccgattagtgatccaacttttgcatcttttttggcttcatcaaaaataaggaaataggtcattttagaggaaaaagaacaatttttaagtacaaataatagggcttagtgctcaggttgacacttggggctggccttgcgccgaggttaaccttttgtcaacctaggccatttaaaatggagtttttcatgaattcttttgagcatcttcttctttttcagaaaatattaagattcaactatttttggggaccaaatggaatttcttaaggggcaaaaggggggacccagtgcccaggttgacacttagggctcggccccagcaaggttaacatattgtcaacttgtgctattttcggtcaagttcagaaaaaaagttttttgggaattttttctgtcatcacaaataacaaagatttaagtaaaatcggggagaaaaccacaactttgagtccctagaagagaaagctatgaaggtcaataaacagtggctagctgacttgaaaagaaaatttctagaagacttacgtgaagtagaagagctcacaattcatttcagggacgtagtctaaaatgaggatgctctaggagcgagtacttctgaaagtggtgagacactctttcgcataattagggctccctccttagcaaattttagtatatatcaagggggatttgacccatattttttaaacttagacaagaataataagtaccctatgcatagtaaggagcccaaatcacttcgttccaccagtgcatcaccacgttagagttgacgtacttagcaaaatctatttccagggttcttccaccatgagactaatttaggtcgagaggatatttcctttttacaagggaaaaaatcaattatgctaagataaacggtttggatctttttggcacattatctcgtaatttgtatttgtgatcgtatctgctacaatttgatatgtgatatgttttctttcttcttgtagaacaacccaccagtttctaaatgggtctcctcaacaacttcttggacgccatcagctataaagctgacaaagttcgtgaagtgcccaaggatggtaaaggcaaaagcaagaaggggtatgtctctatgagtggatctcaaaagctagcacctccgaccttgaaccaggaggctgctccgaaggctccagccctagaagacttatttgcttccatcactgacctaacagaacctattcaagatgttgtgtcgttgcgacaagtgcctgtggggtatgttgagaaagaagtactcgatcaagcaaggattatcaagatcttcctctagcacccccaacacctaaaagcattctagctaccttcacttagatgtctaaggaaaagagagtgttgtcttcgttacctcatcctcatttcaatcttccacctaggcccacgttgatgctggaggaagtgtgagaacacatggaagccatcagacaattttacttaaaaaggtgtagcattgagtatgatgaaataaggaagttggccaccaacatttcttccaagcgcaatgctgaatttgataattatgacaagtaggatgagcctgttccta

SEQ ID NO: 237083 - DNA, 783 bp, Cannabis indica
aaaaattatgaagcttttaggatttttctaataaagtgttcctttttatagaaaacttcatcttctcaatatgatgaacaactttagacttctttatatagtgtctaaaatatcatcctttgaaattctaactcataacctcttatggatgttatggactcattaatattgaatataaatacgagtaaaagaaatgtaactcatgcacacactaaacattaagaatttcaaaattaagatgtataacacatttttatatacttaatatatatatatatatatgataatagtgtgtacatattatcatatatgttacatattatttattcattatacatattaatctaaaagtaataaaaaaaaattatgaacacatcaaggatcattatgtgaaaatttcaaggcgctttattaaatatataattatagggcaagactaccggtaggaaactttttttgaccattgattttaaatcatgtggttattatgatgtaaggtgtatactcttacgataggactgttcgtacacaattaaaaatttatacatattataataatatttataataatatttaataatatatttatttttttaaaaaaataaaatcatattaataattaaaaattttattatttttttttaccagtagggaactttttttgactattgattttagatcatgtggttaatatgatgtaaggtgtatactcatacgatatgattgcttgcatacaattaaaaatttatacatattataataatatttaataatatatttatt

SEQ ID NO: 237084 - DNA, 2256 bp, Cannabis indica
ctagttttcccatttattgaattaatgatattatgatagactgatagtctagtctaaggctcttcaaaacctaatgagagttcaatctttggattgtgagtttcaaagagaatttgattcacttcagttagctgttttcagttaggaaatctattttgttaacttcattaccatcggccatttaattcttctgaataaaacacataaatcttttctttcaactaatagatcttaagtctaaaataatgaagtgggaagtttgtgtgtacaatatatatgcagaacccttacgttgagttaggggatccgtgtggatcaagtagtggatcagctatatcagttgcagcaagcatggtggcagtgtcactgggaaccgagactgatgcttccataatctgcccagctgatcacaattccgtcgtcggtatcaaacccaccgttggtctcaccagccgggccggcgttgtccctgtgtccccacgtcaggacacaatcgggtaactttacttgtatatattgagaagaacctgttaaaatacttggccatgcaaaagttaatgaatggtccaagtttgtactgtatatttaggcccatatgcaggacagtgtcagatgcggtttatgtgcttgatgcaattgtgggatatgatccaagagatcatgaagcaacaaatgctgcagcaaaattcattcctctaggtggttacaaacaatttctaaaggaaaaagggctcaaaggaaagagacttggagttgtaaggaatccatttttggacatttataatgggtcttgtgctatttcaaccttcgagtgtcaccttaagacattaaggtgtgaactaaaacaaacatgaaaactttttcacttattagtactcgaaattcttaatgatctgactctgatctggaaactcaaggcaaggaggtgcaaccgtaattgatcatttggagatagaaaatattgatatcattaatgacgctaaccagagcggcgaaggaattgctttaacaacagagttcaaggtcgagttgaataaatatctccacgacttagtaaactctccagtgaaatcccttgcagatatcattgctttcaacttagagaaccctgaactggtaagcatatcatcgcatcattttttttgcttcattattttgacaaggtttctcttgccgaatctcaggaattgatgacgaaatatggacaagagcagttaattgcagcggagatgacaaatggtattggagaagatgtgttcaaagcagtggacaccatgaagaaactgtcagaaaatggatttgagaaattgatgaaggagaatgagttggatgctatggtgacactaggctggggagcttcgactgtactggctattggaggttatcctgcaatttcagtcccggctgggtatgaattaagcagtaaaatgccatttgggatatgttttggtggattgaaaggtactgagcctaagttgattgaaatcgcttatgcttttgaacaagctaccatggttcgaaagccacctccaatcttgcgaatgggaccaatgtaaatgcaatgaagaagtttataacttaatggtccatttgttcaatatcaaatgctttgcaatgttaaaataaaaagaagagtaaattgccgcaaaacttaaaaacttctatcttactagctactagataatatagctgcttaattttttttgaggaattaactcatatattattttctttaactttttttttcttttttttttttacaaatttacggtttgagtttttaaagtggttgcagcggtagttgtcaataggggtttctatacgattttttattgcaattcaagttgcaacactagttacaatagggatttctatgtaaaattccgtaaaaatgcaaataaaattatcttgaaatgtaaaaataaaaaagaccctaaattttttagtattataataaaaagtaacaaaaaaattaaaaataataaaaatgcaaagaataattattaatatatcaatatagttacttaaaaaattattataatatataataatagtaaacttatattatataattatatattattattaataattttatttattaaaacataaaatttcataaaataagataaaagaatttaaatctaggagaattaccccatatactattttttttaactttttttttttttttttactaaatttacggtttgggtttctaaagtaggttgcagcgctagttgtaataggggtttc

SEQ ID NO: 237085 - DNA, 777 bp, Cannabis indica
cttctatttatagtagttaattttatttaattaaatcaaattgaattgtttaaataaataaatatctataaccaaattcagttactgatatttatgatagaatctctcaattacttgagagaatatctcaataaccttgaaatatctataaccacttttcaattagatatttacctaattaattaattaacccaaaaagacaaactccgtagggataggaacaatagtaggcgcctacccttatcttttaggacaaggttgtctgaaaaccccaaattatagccactactatatttcgacaactaccaaattgtgctccttttatttaatagaagttctgagatgtagcagtggtaaaagttcggggacaaaaatattatagaggtcatactttcagggtaaaattgctaatcgtttaacgaagtctagcaaaagtttcataatctactaagttttatggttgagagagaatttttaacattgctaataattcgaggatagtggtcatacttccaggataaaattgctaatcatttaactaagtgtaacaaaagactcataacttactaacttttatagttgagagagattagttaatattgctaataatttgaggagtatgattttattaagtgacaaaatttaaggggaaagattcctatttattcattttaatatgtgggttgctcttttgttttgcttttgttgggtctgacagtgtttaaatgtgtgataataatttgtgaatttcttctgtaatgtatgtatgtttgttgg

SEQ ID NO: 237086 - DNA, 2134 bp, Cannabis indica
ttccagaatacctaaaatgagcttacacaatattttccaaccaacagaaatcagaaaaacacactaaatcaaaatatgccattgatgactcaagtttgagttgtcaaactcaaacttgatcatccaccaccacaatcaacaaaaccagcaacaagaacttatttctagcttaaattaaacttagaaatcaaaatataacagaagcaaaccctaacagcccctataactaaaaattacacactcaaccaaacttaaagcttcaaaaacacaagtctaaggattctaggattaccttggcttgattcccacttgaataacttgttaaaaacacaaaaatcagcagcaaatccccttgttcttgctggttcgaagagagagtattttgatttttttcttatttttctttgtttttctctaaaaggttaattaattaaacctaatgttggctaaaaatgacccaaatggacagctgcctcacaaccaagcagccacctaagtcaccttgaaaaattatgaaaatacccctcaagttaaaacttaggcattttaaagtctaggggtaaaatggtcaaaattcataacaccgctcaaacccggtattctatttttctccaacataaatcccactaagaaaaggttatagacttacccatgtgattaaaatagttatccatcacatttttcgttgtcaccgagcaaaaattgcaaaaataatataattcatatttaattcaaataatacacctagagtttaataaaattttcattattgaaaaattataactctaatatccacttttgataatgggacccataattaaataaattcataaataactataaaaatatcactaattagtgctaattgctttactaatccatattataaatgcggtcattacatacaaactcagttcatgactgagactaaagcatccataaaaaatttttgaaacagaagtggggaaactgtctaatatactgcatgagagaccttaagagaactttctaagcaatacagaggtaaatcctaaagaaaactgtagtgcaatcactctaagaagttggaaagagttagaagagccagtcaagaaacctattcctgcaccaaagatcaagattgagaatgatggtttagaggaagataagacaactgagaaccttgagaaaaagcagccgccaattaattatgaccaccacatcaaaattcaatctcttcaacaactttaaaagaagaaacttgataagcaatttttgaagtttcttgatattttctagaagcttcacattaacataccttttgtcgaggtacttgaaaaaattttcaggttatgtgaagttcataaaggaaatcttatcaaagaaaaagagattggaagactatgagactgtagcacttactgaggagtgcaatactatccttcaaaagaaactatccccaaagcttaaagatccaggtagttttaatattccatgctttataagaggcttagttaaaacaaaggccttgtgtgattttggggctagtgtgaatttaatgcctctatcagtctttcaaagcataaattaagagaaattcttcctacaactgtctcgttacaaatggaaaatcactctgttacgcatcctaggggaatgattgaggatgtcttggtcaaggcaggtaaattcatctttcctactgatttcattattcttgacatggaggaagatgaaaatatcccaattatattagggaggccattcttagccatagggagagcgatgatcgatatacaaaagagagaattgaagttgcgagtgcaaaatgaagaggaaatatttcatgtttttgcagcaaatgatattcccacttgttgtagagttaatgtggtggatgatggtctgagagtaaaaaggagaaagaagaagacaaagaaacaaccccattctgttcagagtcttaaaaaggccaagcgacctgtagtaaacaaggatgagagaattcaggtggatcacctaaatgagctagttcaaaggctaatggtgagccccaccatggagaactttttcaccgatctgacacagtacatatagtaccaatggctaccaccaccaacagctttgccatactgatgtggcacgtatctcaagt

SEQ ID NO: 237087 - DNA, 687 bp, Cannabis indica
ttaaaataatacataataatatttattatagtatcaaaaacgaatttgaagtttttaagaggtagcagactaaaatatcaacatcttaacgcgtagtgtagatcatgtggtttagtcatatcttatgaacgtgttggagccggcaataataatgtccattgaattattggatcacttttcccaccaaacaaaaccatatcacttgttttcacacacttccaatactccattttgtgctcacattctctaccaatacactgcttctttctctctctctctctcaagatcccaaattgaaaaccatggctgccgcattggtgggaggagctgttctctccagttccttcaatgtcttctttgagaggcgtgttctcgaggacgtccgtcgattgtttcaaggggacaaactcattgaaaaactgctcaaaacgttgaatattaggttgttatcggctactgcactgctgaatgatgccgaggagaaacaacttggagacaccaacgtgaggaattggctcggtcaacttaaacaagtagtgtatgaagcagatcgcgtcacggacaagatcaatactgaagctcagctactcgagatgaagaaggatgaaagcacaacaacaagtaagctcctcagctttgacgtcaatagtccttttgaagtaagtgttgtgaaatctgaaatagaag

SEQ ID NO: 237088 - DNA, 689 bp, Cannabis indica
agagagacaaaatgtttattctttattgctttagaataggaagcttacaatgtctactcaacaactaacttgaattacaaactatacaatgtatttataggtgtccaaagtagacaaaaaactaactgtcataactgtcaagatagttatgacctaactactttaaatatgtatattagaaggacacaataaatacaacaattctccaccttaacctgtaatatacctagggaagactcctgagacttttagcccttgttgtggctcgaaacattcagaatttggagacacttagtgaacttagcagtaggcaatgattttgtaagcatatctgctgcattgttttcagtggggactttcagtagtttgatctttccacctgagattatatcttgaataaaatgcgtccttacatcaatatgctttgttctctcatagaacacttgatttctactgagatggagagcactttggctgtcacatagaacaggtatctctctttgataaatgccaagttttgctataattcctttaagcaaaagtgcttctttaacagcttctgtgcaagctatatactctgcctcagctgtagataatgtcactatagattgtagattagatttccaactgattgtgcatccattcagttgaaatacatactagattgggatctcctagtgtcaatatct

SEQ ID NO: 237089 - DNA, 1005 bp, Cannabis indica
actgcctgctgttcctattactttgtgtgataacttgagtgcaagtgctcttgcctcaaacccagtgtaccatgctcgaataaaacatatcaaattggacattcactatgtgagagataaggttctaaacaaagctctagagatcagatatgttccctcagcagatcaaattgctgattgcatgagaaagggcctgtcacattctcgttttcagtatttggtgtgcaaactcagagtgaagattacaccctctcgtttgaggggtggtgttaagaaaatagattaattagtctctgttaattatgcattagttgattaatgttgtaattctgcaatcagagtttgttattgtgttttccgtgtgtacccttttctgttatgagttggtctctcttttaccaacattagggccacttgtcatcttttcatttgtgtttgtattccttgaacagagtatatattgaatatgttgcctcaacctccatttgagctgagtaaaacctttttaccatttctgtgtaaacttcaactggtgtcatttcgttatgagcgactgattactctatgtcaatattgtgattgtttggatcatgagaaagagagattgtgtggctctaactgaattagtggaagaagggtagtatcctatccttcaatacaatgaggtattctgaaagctatagggattgatcatgcaatgcctagtgctagatcaccaactgctggtctgaatgggtctctacatcgggctattgctgatagggctaaggaggtttctacatctcacacaaaacactcgtctatggagccttcactgaagaagcttaaaataggttcttttggtttgactctgtcttttattttattaatttatatgtgaaatttatgtcaattttataatttaaaggataattgtttttttatataaatttctataggacaagaagaaagtgttactgaagagaaaaatgtatttcttgtggaaggaattaatccaatgaatcc

SEQ ID NO: 237090 - DNA, 655 bp, Cannabis indica
aaaatagataccgagactttagacgaggataccaaaactaaggcacatcaatatgtatgatttaattgtaatgtcgtagaatcgtttatttagtaagtattatttatgatatctttaataataaaaaaatattgaaacaaaaaaaagtttaaaatttttactatcaataatagtttccgttccctctgctttctccttccatggtgaggaagaaaaaagtaagaagaaaaccagtcactcatgttacagttgaagaaagtttcactgagagagaggatgaaacagaggacattgatgaagttcattcagccgaggggttcaacctgatagcagagatggttcgatctcaggatatccttgaaacagagaatatgagcagatctggcagcgttcgaactcagagttgggtggaggaggttgaggatgcaatgaagatgaatgtggagaaacaaaaaactatgagatctgctaagcaaacctaggaggcgttcacgaaagagaaatctctgaatcgggaccaacaacttttgttcactgagcctctaatcagagacgggattaagatagcgcaagtcgatttggaagaggttcaagaagaggagaagaactggaacacaacagtcatatgcaaggtactaggtgctaatccccctgt

SEQ ID NO: 237091 - DNA, 661 bp, Cannabis indica
aaaaacaactataaaatgtgacctgaaacataggctaaaaatagtctaacagtagcttacagtcgtttcaatctcaaatgtcaaatttttggcccagttataaaccgaatctcttctttcaagctcccaaacatcattatacataacaaaagcaacaacagttgaacctatcaaagttaaaaaaaaacccactattaacaatttagtataaaaatctaacagaaaagtgatacaaattcttgaaaatgccttaaatctgtaatgcatcggacacaacatcacaacactatcggcacccatcgggcccatcacaaaatagagtgtcaatatcacaatcggaccacaccgtcaggccacaattgcgcccatcaaaaatcaaatttcccaaacctatatcggacccccatcgggcccatatcgagcttttatccctgtcctaataccaagtaaagtatcggactaccatcggggtcacatcagaccccatcagactagatgaaaaaaaatagcagattccaagaaaaatacaatattcatagacaataactatttgatcacacagaataacaaaataatagtaacaaaccacagatcaaccatcaaaacaacattctaaactaaatataacagctaccaacaaaattaaataataaaaaaaaat

SEQ ID NO: 237092 - DNA, 1720 bp, Cannabis indica
ttttttaacttttttttataacaggattctttaaaatatggaagtaattatttagtaattaacaatcataatttatgattccaattactataaattattaaataattatacaaaaactaattatatacatatagagagtaacaaataataaataatatacatactctaagagcaaactcacaaacaaattattttaatggctaattgggatttttttctcccgaactttaacatgtataaaatcataccccctaaacttttaagatcgttaaaaatgctcctgaactattgagattgttgaatttaaggacttttgttcaattttagtaaaaaaattctaacatatatgaaaatttaatggacataatttagtccatatcaaagttcgaggggcatgatttggtagatttcaaaatctggggagcatagtttagtatataaataatcaccgaaatagttaaattgaatgaaattagacaaaagtccttaaatctaaccatctcaataattcaagagtaatttttaacgacaaaaaaaaaaatcagaaaatataatttggtacatattaaagtttaaggaaaaaaaattataattaacctattttaattaactacgatatatatttataataaaaaataatatttataaatatagtaataatttgagtgtaataattaagctaaaattttcaaattcactatctctgtctgtattattgattatttatacagaaactaactacatatacaaatagagtagtaatatatatagatggaagtaattctttattatttattaatttcagacatatattatttaggcataaagtatcacgtacgagtttttgatcgaaattttcacgtactttccggttcttattattaattaataattacgtaagggatgacgaagtttttagttgtcattataataaattaaaccttctcttataaaataaaaaacggtatataattaattaataaaaaataattaacttcatattttaaaatcccccattccaatgataagaatatacaaaattattaaatatatattcataatctcgacgttgaattatttttatatttatatatattgatggggtgggagtaatattttgagtatttatatataataattaacgttttctaatttaggtcaaagctagctaagtgatttttatttatataaatatagggcttgtgttttgtatgtactatttacgatattttgggtaatcactttttgaggcattaattgtaagaaagaaaaatatgtaaatatgtaagaattaattttcttggaaattattataagtctttattctgtatataaaataaaggtaatgtattttgtatattttgataaaaaaaggaaaacgaacatgtaattttgatttttaatgattcacaaactcttgttggatcaacaattattattgttctaacaattattttttttaaaagaaaatgtgttattattaatgaaccaaattaactgctacaggagtactaataaatttaagacaaatattagtctaaatacgaattccaaatgcacacacgtataacaaaatttaccagtgtatgagccacaccatttgcattacaagaaatgacctcacatgaacaccgcagctaaaagagaaacaatatcctcaacaatagatttgtagacaatattactactttgaaatctaacccaataacaaacacacaaa

SEQ ID NO: 237093 - DNA, 749 bp, Cannabis indica
ttatatatgctaatattcttacatttgatccatgtgtgacaatattgtccaatactcaaaagggtattttagtcaatttaagcatgctgattactttttctgataaagtaaacaagataaattactataattctattttcgagaaattttagtaaacaacatattataaatattgattctgattattcttcattattttattttgatttcaaatactgtatagtaaatatgccataaaagatgtactttaaacgtagttagggtgcgtttagaaaaatacaatataattaaatttgtgtgtaattaaagatatttaaaataatagcttttttttttttcttttctttctcttttaatctattatttatatatgtacacacaatcacacgttaaaaataaaataagtataaagtcaacaaatgtggccgcgtgcatccacaggaggaccaagatacggtgcaccagcaactactagatcatcaggcaactctctttcttcaagcactgaataacctgatagcgatgatcaagacaagagattgaaccaattaataatcccattaatttacatttcaaataatatatttttttctttaatattctaaagtacagtatattatcttttaaagaaaataatatatattaaatttttaggaaaaaaaaaacatattccctttcaaaaaaaaatgttaaaaaaattgtaattgttaaaaattaaacaaaaataataaatataggtgccgtttggt

SEQ ID NO: 237094 - DNA, 986 bp, Cannabis indica
ctccagttaattataaaattttgcataaggtacctgttaaacacaaatatggaatgtggtaagatcatacatgtattaattattatttaatgggaagtttagataaatctatttttaatattggtctttattattattgttatgtttattattattattgttattgttgttgttattattattaaatttaacattcttcttgatgttaagatttggactttcagaatgtttagtaagaaacatagatagtggaaatcttctcttaaaaatacttattatttggagaacttatcatttgaggagcaaaaaaaatgtaaagataaaggagtatatgatgatcaatgggaagactttttttttttttgtataaattagagaattgcacaaaccaatctttacatcctactagcaccctataaacaaggcctaagaaaatctatacaaatttgattgcctctttctattaccttttttttttacatctataaagcatgaaaccaatctttatctacaatcttaattttctttggcaaagatagagcaattcgaaactttaaactccatttaatgtcctcgatcaacttggtggaatttaaaggattctcttgccaaataatgacattccttgtcctccaaatgctataaaccagtgtagcagttgctgcaggataaaattgcttcttgaatttggtaatttttgccttgccgatccatctcatcagttgaggaagactattgattcttgcatttcaatccaacaatcttttaatctccatcagacagtaatcaacaacactgcatttaaagaataagtgctacccattttcattttgaacattacaaaggctgcacctttcattctcttgtgtaccatatttaaccaatctatccttggtttttaatctattgagcactgccaaccatagtattagactatgctttagagtattcaatctagcccacacttcatgactccaaactaacct

SEQ ID NO: 237095 - DNA, 691 bp, Cannabis indica
ttttcgaatttattattattataaaatacgggcgttacatatttcctcttccttttacaggaaataaatatacttggactaataatactatttttgagagacttgattgggccattgttttagactcttggtgtaatttattcccttctgctgcccttcatcacttaccctattatggctctgatcatcgtgctttgaaagtgatggtcactcagaatgtccctaatcatcatcctcacagtattaaacgatttcattttgaaaatgtatggcttgagaaccctgatttctataccactcttaataatgcctggggttccaattctcataatgtgtccactgtaggagcttactctaggttccttcattcccaaaaagcttttatcacttcccttacttcttggggtaggtctgttgggaattcctttaagcctaggatggcttatcttcaaaaagaaattgagaggctccaatccattcatcctagggatagtgatacactttctcacattaaacatattcagtcacagcttgatgctcttttgtatagggaggaggtttattggcatcaaagggctagggttaattgacttagggctggggataggaatacaacgttcttccatcgttatgcctctaagaggaaatgtaacaataccatttcactccttagggatgacaatggtaatat

SEQ ID NO: 237096 - DNA, 899 bp, Cannabis indica
taaaataatttccaacatagacaatatgcaagggcgtaggctgagatcaagactgagctagtttgcagcatgttatgggcgtgttttgtgtttatggggacactggtgttgtatgggacactgtaagccgaatggttcagaatgcatatgccgatgggagatagcggattgggatgacttcaagtcttaagagtaagactggtgttatcaagtttgtctaaagttagccagtcatcagaggatgcaaggttgattttgggacatagacttttgacatagttttgagagccgacacaagcaggagctcggaggagcaagtaggcagtgggtcagtggggcctttttgcatgaagtcgtgggtatgcggtagagccggagggccaatgttgagatcttcacgaagaaatttatgtgcaagagtgcacttggtgctgcattgggtgcagttggcttgcgagcctcgtccaggtgggacgcaccaaactttatcctgcgatgagagtgtcttgctcgattgccatcaggaggatggtgcaccatagagttggcatgtgaagtttccggagggacttgtctagaggtacttggcttcagtggaagcgtgttttgtaggtgcagttgggaacgattggtttgtgaacctcaccctaaggggtgcaccgtacttagtccttgtcaaaaggagtatgcattgaacgaatggtgagtgagctacaatcagaggatatggtagctacagggtcagtgttgcaagggctacttggttgactggagggacgtggtgatggactcggaggagttcatgttgggggaagtattctagtgtagagacactactccatgggtggttctgaatagcgacagtagcacagggtccttgatcaagtccaagagtgggc

SEQ ID NO: 237097 - DNA, 771 bp, Cannabis indica
gatcatatgtgcattagggggaggtatattcatgaagcactcttttccccttagtttaggttttgtctcactgagtttttctagcaaggtttttaacgagacaacgtgcaaaataattataaatatatgtatgaagagaatgcatgtatgtattgcattattttctccttagctcaggttttattccactgcatgggttttcctgataaaatttaatgatgtaattttaaatcatgttgagatacttgcaattcatgagcaagtagagaatgtgtgcgactgatgagatcattggttgagtacatatgaattacacttaataaaaaagtacgaacaattcactatgaagataatactgcttgcattgctcaactaaaaaaatgtacattgaaggagatagagttgaacccatttcatcaattcttctttacagacgatattcaagagagtggtgacatcgactaatgttcaacaaatttgatcaagtgacaatcttgcaaatgtattcacaaaattattatcaacatcattatttgagaagacgatatataagatcgaaattcatcgattagaagatctccacaaatatctaaaaaggagagttatttcacactgcactctttttccttgaccgagtttttgtcgtactaggctttctgggaaggtttttgatgaagcaattattatggacatctaagggggagtgttatagaatattattaatagatatctaaattatcaaattaattatctccataaatgcttgattgt

SEQ ID NO: 237098 - DNA, 1172 bp, Cannabis indica
tccacccctgaatgtacatcaatatgttcgaatatagatgtcttaacgcagatttttgttaaccaaatttgagcctgaatgataaatttgcatagaaaaataaaaacagtaaagaaaagaaaatgaacacaaaggctttttacgtggtttttcagttaaaactctgcaaagtccacaagacaatcttataagatttcttatggttttcagggctttttttcttatgaatttttcgtcccctttttagtataacttgcccctatttataattacatagtcagacagttaattacagagttgactgtaatctttacaacaattctcctttgaaatcatggggtttgattacatatcacctagtatagatgcagttattatttgaatatcacacaactatgattaatttgcttttattgggtcaagataatagtgtattaaacatgtttcaaatcataacgttctgggatgtcttgacaggaactcaataccaatgaccttgatagcgaggaggagcttttcccctatctttcagaggttgttgatgtacgcctcatgcattcttttcttgaagggataacacttcattttgataatcattgttcttaataacaaagagtacttcaacagtcatcattcaaatgtcagcttctgctcgagagaactaattcgccaagactaataacctcactaaaagatatctgaagctgattggtgaaagtatcaggagcatgcaagactgttatacttagtttgtttgggttcgcccgactgttatacttagtttgtatattatacgctaagtgttttcacagtccttatgcatcgcttacattttcccaggcgcagcgaagttgatgtcttgccttgtgcatccaatgtcgtatgttttcttgttattacgtgaggcaacagtttgtatatcttcatctcccataggaccttatagtcagcaagttgcaaatatactctgtcatttccgcatttaatgagttattcaattaaatgtaattaccgttacatgcatcgatccatattctccttaacttgacacgtgtcttccattgaaatggtagccgaattttgagtataaaaattgccccttaaaaatttctttctaataaaaaaagctttttaaaatgcttacagagggtatatttttcataatccctttt

SEQ ID NO: 237099 - DNA, 1277 bp, Cannabis indica
gaattatgcaaagattatttatttttatttaaaggttaattatgtaaagttttaattagtcacgtttttaataaaaacccgttgattagcaatggattgcatagatagtattaaaatcacgataactcgcctaaactagtatggtgttacaaaacaaaacttaaacaccttggcgtgatactttattttgcaatcacataccttgaggaatttcatgctgcttgaaatgtcacttcttcatttgctgttagctaccagatccgtagtcccatcgtaccacaacacgtgggggcttttaaatccctgggggaattcagcgctcataatgtttggatggaaacgctcgggctcttcatccgagtcgtatccaggcagcttcccatactccccatcttgatatctcctgaatttgtcctccaactcaatgattcgcaattagataggatcctcttgcttctgattgagttgttgacgtaggttaggttttttctggttcaattgctcacgaagatccgaccgttgtggatcatagttacttacagacctcgtccttgagtaactttcagttctagttgtgcccgtactctctcgatcattactacgacaagttctatctcctcctcgcgtagagcgactatgatctcgtgttcttgtatgtccgagctagaacttgcctcatcacgcatcgtccttctcctttgggaatgggttgatacatgccctctactagggtttgtattagccccttccctatcagtgcgagaaggatattgacattgtctcggggtcaacccacttgccctagtttgagtcccaagatctctctcattaccacgagggatttcctgttcccttgtctggggttgccttctactggcattcttgcgagaggattctggtaaatcacaatttacattcccctgggttgtaaatccctagggtctacatggcacttcttgatgaggtgcctggtcatctggttgttcatcttcaggtgcatcctctgtttccccaggttgttcttcctgagcattctgagggtcctcctgagctgtctccttcctcctggttcgtgagctgcgaggtctacctcgtggcctcctcactccatgatcaggttggttttgtgcgttgttcttttgagtcaccctagttacggtcctctcgttccaactcagcgtttcattagttttcctcctcaaaacgtcgctggagttggcgattttctaacccaacaaacggtacatatctggcggggtcataggcaccctcactcc

SEQ ID NO: 237100 - DNA, 1585 bp, Cannabis indica
tttttaaccgttaaaaattctccctaaattattatgattggttgatttaaggaattttgtccaatttcattcaattttactaattctataattgtccatgtattaaattatgctccccaaagtttgatatctaccaaatcaccgcttcaaattttgacatgtatcaaatcatgtctattaaactttcatctatgttagactttcttaccaaaattacacagaaatccttaaattcaataatctcaataattcaatgagatttttaacatttaagaagcataatgtcaaaattcgaggggcaaaaatcctaattaacctaaaaaaatttagtcacatatataattgtgcgtggaatttgtaaatgattcaggatatcattacttttgtactttttgttatcaatttaattagattgttgttaattaattattaggtggtggaaagagcatgagtttgcaaagaaatttccttttgcaagagataggatggtggaacagtatttttggatattgggtgtatattatgaacccaaatactctcgagcaagaaaacttctaaccaaagtcattgcattagcctcaatcactgatgatatttatgatgcatatggtactattgatgagcttgagcttcttacaaaagcaatgcaaaggtctgatcatctcatcatccatcatatatattatttctaataatgaaatattataatctttttaaatattaattccattgctattttataggaaatttttagaaagaagttaaaaaatatggaaaaaaaaacagcataagttatctggttattcttttatggtaattacttactcttttggttactataagggtatttttttttttttttaaaaagtgttctttattaaatcgagcaatcgctcgtaagaatagacatcaattccgtaggaacactattaatagaaaacatacgttcagctaaagaaatagagtgccgggcaacaaagtgcgcagcacaattcgcagaacgcttaacaaacaaaagcgaaacattaaacaaactctcaaggatcttcttgcaatcttgcaccactgaaccgaaagaagaaacaaacacctctgcactacgaatggcttctgcactgtaacgcccgtattttataatagtaaaatccgaagtctaatttttataattaatatattaataattatatggatcgggatcccgagtatcaaaatacttgttaaaagtgttttactaatatgtacatatacatatttttttttaaatttagcggacaagcattctcaaaatacagactccaaaatactaataaaccgaaaccctccaggttgcactgccgcgatatgtacaatcatgccgagttccacctcactgttcctccagctttgcttttcctttacctcgttccttgctcaagtgtgccggtcagcctgagtggaagtgcagctcgacgttttatagggcccttaaacaaagctttcaatcacaactaatatcctctgattcaattacacaaatcaaattcccagctgctgcccaagagaatcgaaagagagagagagagagagagagagagagagagagtac

SEQ ID NO: 237101 - DNA, 2327 bp, Cannabis indica
cacgcccccaaagaatactacgctgggaataagatggattaaagccaggagcagcatcaaggattgaagaatgaggaaaatacctagctttcagagtttgactaagcaaagagttaggacacataaaaatccgccaggcctgcttggcaagcattgcctgattaaaatggacaagagatctaaatcccaaccccccaacaaacttggattgacaaatagctcagcaatttttccagtgaagtatagaagtatcccctgaggaaccccaccagaatttagaaagaatagactcaatatccttacaaagtttggttgggctaaaacaggacatggcataagtaggaatggcttggagaatagctttcataggagtttccttaccagctctagaaaaccacttatgatgccaagagtgaatgatagcagaaattcggtctttgcgaaagacaaaagcaggatatttggacctagacagacattgaggtaaacccaaatattttgtaataaaaggtcggtcctctaactgaaacgtttaaaaaagagattcctaatatcagtaagagtatttggtgaaaacaagatagacgatttactaaaattgatcatttgtccagatgccttggaataaagagcaagagcttgattaagagcagagcaagaagtgcgattagcagatgaaaaaagaatgctatcatcagcaaacaaaagatgagaaattgaaggagcattcctagagatagaaagacctctaagaagaccccgattttggtaattgctaaggattgctgagaggccttcagaacaaagaatgaacaagtaaggagataggggatccccttgacgtaaacccctagtaggcttgatggaatcactaacatcaccattcacagaaaaagaaatggtagcagtgaaaatgcatttaaaaaggagagaaacaaaatggacagggaaattaaaatgaaacataacatttcgaagaaaatcccattcaaccctgtcaaaagccttagccatatcaagcttaagagcagcccatcccctcttcccaactttcctatttgtgatagtatggactaactcattagcaagtatgatattatcatatacaacacgaccagaaacaaaagcgctctgaaaaggagaaatgacactatctaaaactcttttcagcctatttgccaaaacttttaaaatgactttataaaaagtagtacaaaggttaatgggcctaaagtctttaagcatgttagcacgagccttcttagggattaaaacaatcaaagtggaattaatctcagaaaaatcaaccccattattgagacaatcaaggacatcagcagtaaaatcactacctagaacagaccaatttttttgatagaaataggcattaagaccatctaaacctacaactttgtcaccagaaagctggaaaacaacccgcttaacctcctcagcaacaaaaggttgagaaagactctcaatatcatgatcagcaagaccagaccctaaacagtcaaaaatagaggcatcagcctcaacatcactaccctgggaggtgaaaagggttgagaaataactagtaattaaacccacaatgccctcatgagaattgacaacctcaccagtattagacttgagataactaatataattggccctgcgtctagaggttgcatgcttatgaaaaaattttgtgtttttatctctagcattaagccattcaatcctagccctctgtttccaataaatctcctctttatagagcacaacatccaacaaagactgcaaatgagataaacgagccctatcttcatcatctaaaatcatcttatcttgaagcatgtcaatttcatgagtaagatgttgtattctggtcttaaaaaggagattattatccctatgccaacatttaagagaggaaatacaactgctctacttcctaagaaaatccccaaaacaacgcacaggagagctactatttccttgagttgagcaagaaaccaaagaggtgttccaggcagttttaacaacagtgtagaaagagagatcttctagccaattattttcaaaacggaatcgcttaaccccacgtataacacgatttggttgagtgtgcgccaagcttaacttgagcacacgatgattagacccataaaaacctaaatgctgaagagtatgggtaggataaagatcacaccaagaattagacacaacaacccaatctaatctttcacaaatagttttgttagaccaagtgtatctattgcctaggaaagagacagggaacatactaaaattatttagaaaatttgcaaacagagtcatag

SEQ ID NO: 237102 - DNA, 1558 bp, Cannabis indica
catggaggaatggtagtctgtcaaaaagctttaagccaaattaagaattgcatgagcttgatcgctgggtttacctttcagagctttattcctgttgaaccaaataaaccaagcagtgcaaagaaaagactctacatcttttttggtgagagatgtatatatcatataagctaagtcatgaaacataatctcagaagagcaagaaaaaatataaggataaaactgcgtacctttccagactcttctaatactctgacagtaaaacaatgcatgtgacacagactcttccgattctccgcaacgttcacaacctagggattgaattattttcctatgggataggttcttggctgtggggagtgttgagtttgaggctctaaaagcaaaatgtttcaccttggctgggatgttaagatgccagaggtgtttccaccaaggcgaaggggaggaggacgagggaatatcaggaggggaagtggaagagaggctaagatggtaacccgatttgacagtatagataccaaaatttgtggattcccagatgcagtcgtcgggacagggggtaaggggaagggggatggaaagaatttgctcaacaacatgaggcggaaaacagctttgtaaacgggttaagtcccaggtcatagagggtgtgatgaaagaagcaactttgtccgggacagggaggagaggggaaaactgacggatacccgggatccaatgatcgcaaatcgtggatgtggtctgcccgtttcctattttagaaataattcctttatgcagcaactcttttccccagcaaatgctacgccaaacaaaggagggagagtgacctagagaactttggaggaaagaagagtgagggaaatatctagcagataaaattttggacaccgttgagtttggttgtttcaagatacaccaggcttgcttggcaagaagagcttggttaaaatgaaccagggagcggaagcctaaccctccgtccctcttggacctacacaacttagtccaactttgccagtgagttttggggcggttgttgtcactgacgccccaccaaaaattggccattatggactctaaggaatgacaggtggccaccgggagacgaaaacaagccattgagtaagtagggatggcctgaatgacggattttagaagagtctctttgcccccttttgaaaagactttgttcttccaattatggagatgaccccagaccttgtcgtgaaggtaatggaaaagttgcttttttgatcgaccgatatgctgggggagacccagatatttttcaaaagaggagcggaccgggatttgcatgaagtcagaaatcaaagtttgatccctgagctccacatttggggagaaatacagcgaggatttttggaagtttaccttttgaccagtggctcgctcatacacatcgagaacgtctttgataatgttgcaggagctgatggcactaccacaaaattcactattcacatcggtcaacgcgactgttcatcgcgttgactgacgtgaatagtactatatttaatatattcgtcatttt

SEQ ID NO: 237103 - DNA, 894 bp, Cannabis indica
atgcctaagtgatattttgacattagttacttagtttatgtattttggcgaagctgatcaccagttctcgaagatgttattattttgtagaaatgagagactcgaaactcttcatttctgggtgagctggaaatgaaaaatgcaaagttgtgaattcgacttctttgacttcatggatctttgttattttgaaaaactagacaaattgtcaaaacaacgttagattcggataagcaaaacccagcgcagcaggtcatttgtcaacttgggcgttgggtacatactcctgagctcctatgatctcgtcttttatacttttaaggcttatgaacttgaggacgaagtcttctaccatgttttcaaccattctaaattcaatgatcgtatcaaatttggcatttgaggaatgtaaggtagtgtcccaagttgattgtcaacctgggtgctgggctgaacactaggttaacctaggcattgggccctattcccagaggctcaggtctttagttttttccttgagtttacttgaatctttcatcatttctaatgatgaaaaaatgcctaaaacactttttgctaaacttgatctgaaaaagcataggctgacaatatgtcaacatgggcgctgggcccaaccccaagtgtcaacctgggcactggatcctagttttggccctttggaaatttcgtttggtcctcaaaaatagttgaatcttaatattttttgaaaacaaagaagatgcttgaaataattcccaaaaaactccatttaaaatggcccagattgacaaaatgtcaacttgggcgcaaggctagccccaaatgtcaacttgggcaataggccctattttgtcacccaagaattgttgtttcttctctgaaaggacctatttc

SEQ ID NO: 237104 - DNA, 736 bp, Cannabis indica
atagattctagcgtggaaaagagaatataaaatatggtctatctaatcagcataaacccccttgaagaaccacattaaatagtatagtggttaggaaatacatattatgccaaggtaccctgaataatccactaatagagattttatcaaacaacaaaaaatccaataatatttcacatttcccgtgagcatgagtcaatcaataatagtaaggcaacaattagaatactctatgagtattggaatagacaacaatccaaaggttttaatgataatgtcaacatgcaaaatcaacagtagcatagacatcatcagccacaacagagccaaggcagaaaacatcacatatgttagaagaacgttgttatgactttatgacaaacagtatttgttatgagctatgatgggatccgcacttttttcagttaggacacaagtgcttatagttaataacacatcaatagtgcaaaattaggtgtaaatatttgtatctctatagcatcactcaattgatagtactatgacgaggggtcgtaattaaaatttactgcacctaaaaggatcatcttgacaactggtcataaaaatgcatttggtccgagaaagttgtaatcccttccaaataaccaaatcctcacactgaaaataataaatattaaggggaaaaccttgcacactctgcaaattatattcattggccctaatcatcaacctgaatgtgctaagtatgatatgt

SEQ ID NO: 237105 - DNA, 1437 bp, Cannabis indica
gagacaaaaaggtgatgactccaactgtgactgtaaagatcgcgagccatgtgccaggcacatcttggaagcggagctccccaaaaatttcaagatgcccgaaatggcagcttataccgggaactcggaccctagcgatcacctgtcacggttcaaccgagtaatgacagtcatgagagtcagcaatgacgccaagtgcttatgcttcccgctaacattgagcgggtccgcggaagaatggttcaagaaactggagccaggatccgtggactgctggaataagctgcaaaccagcttccggagacagtttgtcgccgcaaggaaagttaatctggaggtcagcgccttgactaacatcaagcagctgcctacggaaacattgaagaatttcataaagaggtttaaggaagaagcctcaaagaccaagaaagttgatgacggacaacagcttgctcttcttcaagcagggatccgtacagggactccgttctggaacgagttacagcaagaaggagcctccaaccttcaagatttccagaaaagagtccaaaaatacatcaacctagaagaggcccaaatagtggcctatgggggatactaccctaccgggatagcggggtatgtacccggagctcagctcccgggaactttacaagcagctgctccaccgatgagcggcatacaattttccgctaccccaggatatagtcagggtcaggccttagcccctgcatcttctcattttgggaatccttctgggataagtggacaagtcccgtctcactccgctccgactgcaagcttagcaggtccctctcaaggctctcggagcaagaggtcctcaaaaggcagcaaccggacagaggataagcagcagaaaagggggtacactccccagtacacctagtacatggagctaacggactcctatgagcgtgtgtatttcgcaactaggcaaaatacgcactaccggagaccgcctcctttgtacagggatagctcccggagggatcccaacaaaaggtgcgagtaccacaccgacattggacatagcaccaatgaatgcaaaaacctcaaggacaaaatcgaaaacttgatctgattgggacagctttacgaatggatcaagaactggttgcctcatctcaatccggttcagggagcaggacctttgccccaaggagcaccagggggtgcagccggagcattggcaccagtcgctcccccaggagaaacccagaaaattcatggcctaccaccgagacccaacggaagagtagccatgatctctagaggcccccacatcggaggaactacctgaaaggaactgaaacattacgcaggggccgtaaagcacaatgaggtttgggaggttactcaactcccagctcaaaggccccggctaatggatcaacccattacgttcatagaagagga

SEQ ID NO: 237106 - DNA, 1335 bp, Cannabis indica
atttttatcctccttagtccatgggttacatctggagcaatctttctcaagtttaatacccttgtaggaaagagcaagattgggtggggagccaatgatggcaaagcttccagataaatattttcaactagagaggtagtttcatcttccacatactattccaccaagcttctattttttccatagtctaggcttcaataactttcttttcagaaatggcaactcgatacccactcttaatattctattcaccatttcttgaatagtgccaaaggattttatcctcaatatgggagtcaccgcaagggatttggaggatgagatcggcatcctctatgttaaaattttgtctaattaagtcctcgtcccataagccattcagaagcataacattaataacaaacatatttgaaggaaggtggagtttgtcataaattttgaaacttaaaggcgtggtaccaagggtccttgagaactctgacctaattaccgtcaccgattctccaccgatgaccttaaacaataatctccttaccccagataaggctctaccaaatagatgaagctcttaacccaagttcagcatttagaatggtttgattaggaatgtaacactctttcaaaactttgccacaaagggaatttggctttctcaaaagacgcaagacctatttagtcaggagtacctgattgaaggcctccatgttacgaaagccaagaccccctcttccctttgggatacacaatgtttgtcacttgcactaatgaatttttttgctttttgtctgaggacccccaccagaatctagcaatgaggctatggattttgtttatgatgtttttaggaagtctaaagcaactcatagtataagttgggatggcatgcaccaccgctttgataagagtttcccgacccgcaacctagaacaaatttgctttccagccattgagttcgccctataccctatctttgatattttggaacacacccttcttccttttcccaatattagggggcagccctagatacttgctaaagttatccaccatcttgacattaatcataccagccaaggccttctttttacaccagctgacatgctttccaaagcaaagctcaaatttagtaaaatttataagttccaccgaggctttggagtaaagctcaaggataatattcacttctttacactcttttttagaagcctcatacaaaatatgacaatcaactgtgaagaagagataagagactaacacacggcattgcccaaatttcagaccgttgagcctcccatgacattctccattctttataaggctcgagaaagcttcagc

SEQ ID NO: 237107 - DNA, 542 bp, Cannabis indica
attatttactttcatgtaatatggaatttaaaacaatgaatattgtttattgtgttgatttggatgtgttcatgttggtttatgtattatttaataaatgaatgtgatttacgaaatttttccatgaaaataattttattttcattctaaaaatatattttttggatttcttgtgaaaatttaagcaattttggtttttacaacactcaattccaataaaaaatgagagagttatggtttttttgaagttttcaggttgaatgggtgtcgagatgccttaatcgcacgcatagaaccacttggacaaagtactcctgcgcgcgcgaggcagcaaaatctgtctgaagcttggcatcgcctgggttcggacacgtgtcacacgcacttggaggctgcaacacaccgagatttctcggcaggtgaggttgcaggttcgcctgctccacgcgcgtaattgcctgcagccttcttgggctgcacgtgcaaaattccttggcagtaggtgcatgatccgatttttgggtgatttttcacccaatttt

SEQ ID NO: 237108 - DNA, 1984 bp, Cannabis indica
ttggttgtcgacctgccatcggcttacaatctattgctgagtcgtccaacatttattggactaggggcatttagtttgattaagcacttatccctgaagtttcaaacaccagtgggtgtgggagtagtgcgaggtgataaaatgctggctcgcgaatgctattgcatagagctgcagcaaagaaaagctggtcaccagctaatggcagtcttgactgaagaaggtgagaagaaggatgaagatcttgatccttggattcaagatgaaagaaatttattgaaaccaattgaatagttggaagaggttgttctggaaccaagaaatctcacaaaggaaatctcacaaagtgtgtttacattgggaagaacctggatgaacaattgaaatagcagctaataagttttttaaggacaaactaggatcagtttgcctggtaccatggagatatgatagggattgaccctaatattatctgccatcacttaaatgtcaatccaaattacccagcaaagagacagaagaggaggcccttagattccgagagacgaggggtactcaaataggaagtggataagttgttggtcaacgactttatacacaaggtattttatccctcgtggatagccaatcctattttcgttccaaaacccaacagaacttggagaacttgtattgatttctctaatctgaataagtcgtgcccaaaggattgctttccactaccaaggattgaccagttggtggatgcaactactgggcatgagattatgtcattcatggatgcatactctgcatagatccaaacaaaaatgcatttcccggatcaggaacatacaagcttcataaccaacatgggactttattgctataaggtcatgtcatttcggttgaagaacgatggggcaacataacaacgactagtgaatgaaatgtttgcgaatcagattgggcagaacatagacgtttacgtcgatgacatgttggtgaaatcggtaaagagtggaagtcatactacagacctcgctgaatgctacaaaatattaaggaagtacagtatgaagcttaacccgaaagagtgttcctttagagtttcctcaggaaagtatttgggatgcatagtaaatgcgagggacattgaagcaaaccctgagaaaatcaaggctttgatagatatgccatcaccaagcaagccaaaggaagtcgaggccttaacaggaaggatggttgtactttacagattcatttcgaagccaactaataagcgtataccatttttcaatgtatttcaaggcaacaagaaatttgaatggacagaggaatgcaaggaggctttgaagaggattaaaaagcacttggcgacacctccagttttgcaaaactagtaacatgagagagattacttctttatttagctatctcggaagacgcgattaatgtagcaatagtgcgagaagagggaaaaccaccatcaacctgtctactatgtcagtaaaaggttactaagggtagaatcaagatatccccctctggaaaaacttgtcttacgcctaatccacgcatctcgcaagttacggccttacttctaggcacacccaattaaagtgttaactggtcaaccattgagacaagttttatcaaaaccagacgcttctggaagattgataaaatggtcaattgaactgtggcagtttgacataacttatcaccctcgaacattcatcaagggtcaagttttgtcagatttcataatagaaagaataactccataggaaaatccccttatccagcaagacgcagacacttagaggttattcgtggatggtgcatccaacgagcagggctcgggtgcaggggtgatattaattttgttagaaagctttaagtttcaatattctttgagatgtcaatttgacgcctcaaacaacgaggctaagtattaaaatttgatcgctgttttgagaatagtagaagcgttgaaggtcaa

SEQ ID NO: 237109 - DNA, 754 bp, Cannabis indica
gtacctgtcttttacgtagtcatcgccatcaccttcttcatcactgccttcagggttctagtcattggcaggccgtcgaacacgttctcagtgtcctccctgtggttctcggtgtgggccgtgccttcttctctaacattgcccgtctggatctagaggcaagtgagcctacttcctccatagcagtgtccaatggggttttcttgcttgtattctttcgggtatttaccatggtcgaagtgatgcaccaactagcaaactttcctcaactctcaatgaaagtaccaaaatgtttatcgagatttcaaaaacaaattatttagaccttaaggaaaatacaaaacaataaatagacaaactgttggacaaaaagcagctatagagcatgtatgagcattgctaaggtctgacgcaggagacaagatttgatttggtgtcagaagatatgcaaccgtcgggtttagctccgggttaggcattagggagttccaggaaagtttgggtaaggctttcttggaccaactaatttgctaccatcctggagcgtctatgacttcagttctcttcccgcagcagcatcgctgatgagaatttcagagttctttctgcctttgctggcgggaagagcctccgggtactacagctcctttcgtaaccacgataagtaaagggtgtaaaataacaatatataatctgacttgacatccttccgtgattgtcatgtacaattcattcgagaatagggataacaatt

SEQ ID NO: 237110 - DNA, 822 bp, Cannabis indica
tcaacaccaacaatcactcctctcctcgaagtagtgggtggtgacgacatgtggatggaagagtcggctgtagtaaagtttccatgagaaggattctcccggtcaatgggaataacaggagcatcaggtccatcaattgtgcttgcggcagttgagttatgctcgggagggtacaatcccactaacttgagcatctccacagttacaatcgttggggcatatttttcagcttctagcatagcagtcaaggctgccgcatgttgtatcatctcctcggttgggactagtctggaatatgtacctgtatggttgaaagcccggtgggtagtgtccatgggggttgtaagaaagtaggacgaccgatgcttgtcgctgcggtttgtgctacaaataccagaaacatacggctgaccccgttctcggttcataaagtcgaagtattctgaatggttcatagatgggcaagtccggaaggaaaggaggtagtgaatttcgtgagtagaaggccttccccatcccttctaatgatatcttatgaacaaagcagataaggccaggtacccatgaggagcaatttggaccggggaaacatcaaagtagttcgccacatctcaaaagtaatcatggagtggcaaggtcactccagcctcgatgtggtattttgtccaagcacaggaatcctctgggggagagtcggctttttgacctttctttgctgggactaccttcaccccttcaccaagagggtacaaagagaggtaattttgcaccttggatgactccaaactgctatttggatgttcaattgagacgttgggatcc

SEQ ID NO: 237111 - DNA, 1621 bp, Cannabis indica
aacaaacacataactaaaggttgctcccaaaatgaaaatagccaaccattacaatactacatcagtacttaaattctaaaattagctaacagagaaataacataataaaattccacattttaaagtcaatcctaatcggtcaattacaaaatgatattggtagagaccatattcttagaagcatatcagagtcaactttgttcttgagatgtagaggctttttctcttgatttttgtttctttctcggctgatttcttttgactgtctcagatgttaggttacctttcggtggtctgccccttttctttggaactttttgctgtaatagaaatatttagcaaatttaacaaagtatatcaatcacaaatacaaagaacaaaagcacatatataaactagcaacaatatataaatatggagatttttaccttattagctaactcatttttacaagtcagcttagaatgacctgattgcttgcaattgctgcaataattagccaggcctttccttgattgttttgtaggatcgggtggtggttcatcattacttctatttctttttttcttaggtctaccaggcaaggcttgctcgggtggtggaagaatggggtttaggccagtgttaggccatttgtctggactaggcatgggttcaattatcccagagtatgcagcaatatatgcatcctgtttataccactcatcaatggaattatgataatctaatcctgatgctaaaatagcagaaaatgcatgtggacaaaagatgccagctaattgaaaacccctacaagtgcacacttttttcaccaaatcaactacacaagtttctaaccctttataactcacttggaacttaccactaccagcaaaggttgagtgacaataattggcaaccttcttgtgttctcaataatgtcgcggatcctcttaccaataggatataaccatttcttaacatcttccctcttggtggtgaatctgcacataagccaaaaccctattttctccaatagagttacaattggcttgtctcttgcaggcaagattgctgaattaaagctttcacaaagattgttaagaagcatatcacatttaacaccaactctaaaatgtgatttactccattcttttggagcttttttgagcagccaccggtatgccttttcatccacttctttgagctcattcattctttgagtaaactcctcaggtgtagttgcccttgcacaagcccaaagtgtttgtttaagaagcaaaccagaatgttctttttgaaatttgagtgtaaatgccgcacacagaacctaatttagcatcaataaaacttcagccaatgctatctcgaaacccttttgtttgtcactcatcatagtgaagatgcttggattttgaatgttcagatcctccacgtagcttcaaaaaccaggtccaactgactttgttttcattctcaacaattgcataagctaccgaaaattgagagttgtttggatctataccaatggcagccaataagatacctctgcagtagccttttaggaagcaaccatccaaacctaataaaggtctgcaacccttattaaagccatccttacaagcttttaaacatatgtaga

SEQ ID NO: 237112 - DNA, 872 bp, Cannabis indica
ttcacatctttcttcacattctgaactaatcccacatttttatcaatctttgcaagggcactcgaaacaaagtgatcaacaagtgctgaggtgaaagcatcagccatggtcaaaatcttttcgcctgaaagtatagttggagaacaggagaagaaattgatagaaaagtaatatgcaagttatacacaacttcttatcatatatatacatggtgatctatttcaattgtatatttgatttctttaataataatatatgctaatttaataagaacgcgtgaatgtatatattttaattagctaatctttttggacggaaaggcatatacataaggtggctttaatgtaatgaaatggagaaaagaaaccattttttttaattgcgttttaacatattacaatatcattcaatagaataattttttaatggaataactttttttattatttttgtagaaatgatttttctattttgaaaagattaatctagtgcaagataagaaaaattataagaaaaatttaataatttttttatcaatttcttaataggtgttttaaattttactcaattctatttttatttttatttctatttcaattttcatattctcattcccattccatttttatttctactagatgagagttacgtggcgagccacgatattagttttatataagttctagtagtttttgtttaagaatttagaaagtaattgtaaattattttataaacgatatgttttatataactaattgttaagaatgtcataattgtgtatataaacctataatatacacaatgttattcatatgttataatgaggatttcaacccatcccgctatacatctcccacacactcacacaccca

SEQ ID NO: 237113 - DNA, 1227 bp, Cannabis indica
aggatcaatgtccaaagactcctcaagagatataggacataagaaagtacccttatgcatcagcagttgggagcttgatgttacagtgttttgataaggcctggaatatgctacgctgtaggaattgctagtcaccatcaatctaatccaagtttggaacatttgatagctgtaaagaatattcttaactatctttagagaatgagagatctcaagcttgtatattttggtggagagttaaatcctactgcatatactgattctgatttttaattagacaaagatagtcaaaagtcgacatatgggtcagtatttactcttgtagtctggagaagaattaatcaaactagtattacagactcaaccatggaagccgaatgtagagcaacttgcttagcaactaaggaagcagtttggttgaaaaaattctacactaatttagaagtagttctaaaattagaaaaaccactggtgttctactgtggcaacagtggagtagtggccaactccaaggaactaaggagccataagagaggcaagcacattgagagaaagttccatctactaatagatataatagagagaggtgatgtgacggtcgtgaagatcgcatcaaaatataattgacatatccatcacaaagacgctacctgtgaaatcttttatgggtcatatgagtaagggagatgctcactttgcttttagggcaagtgggagattattggagtttatgccctaaaaagtctataaagacacttctgattattaataaagatttgaacattttgatatatgcttgaatgttaaattattaatatttattattgaataatttatattaaatatcgaaaaatttcttatttatatatgaagaggtggcttgagctttacagagaactaagaccacttagttatgaacaaaataattagtaacatattaaagttatagaatctttaatcaatggttgctagtactgttcgttgatacttattctttggtgtaagtaatctcaattcggattacggatgtagtatggcatcaaagtgaaggtgttgtatattatagagactatatatgacaagaaccgacatgaatgaagctatattcatctaacatgttgtttactataaatacctaattcatattataataataatcaatagtagatcgacctaaatcctgagtaatcatgaactcatgttcatgttattagtttctttaattca

SEQ ID NO: 237114 - DNA, 609 bp, Cannabis indica
ttgttctctacttctctcttcatgaatgtgtttataaaatgtcaactggttaaaacatagtgagtctcttatctctgagatttgaaaatattgaaagaatgagtggacaaggaaaggtggtgtgtgtgactggagcttcaggctacatagcttcatggctggttaacctcttattacaacatggttacactgtcaaagcttctgttcgtgacccatgttagctcccaatccaaaatcagatttttgtaattcttattatataaatatatttatttatttaagcccttttcatgtgtagatgatccaaggaaaacagaacacttactagcactagatggagcaaaggaaaggcttcatttgttcaaatcaaatttaatggaagaaggttcttttgattctgctatcagtggatgtgatggggtttttcacacagcttctcctgtgattcattcagccactgatccacaggtacaaaaatattcctgtataaactttgaaacaactaagtttcaatcagtttgtaatgattctcgaaattgaattttatttcaggcagaaataatagagccagcagtgaaaggaacactgaatgttctgagatcatgtgtt

SEQ ID NO: 237115 - DNA, 873 bp, Cannabis indica
cacatagactacaattttatgagagtagaagcatataaaccacaaactatataatctatcattctatctacacatttatacatatatacatatatatatgatatggttatcttctctttttttttccttgaaaaagagaaagaggtcatatgtctcctcctcccaagtttattagggagcctcacttatggtagagggatgacatcaaagaaacaaaattctttttttcgaaacataaagtcaacaaaaattcaacaataatataaacgatatcaaaaaaagaaaaattataaccgtaaaggatacaaaccagaattttagagaatatgaaccctctaacatcttggctgaggtcttcaatatgaggatcttccaacgtgacacctacaactcaaacacaaacatctgagaaatatttcttgtgaattataaaattgtaattttctttaacaaaaaacgatagattgtacactaatataaaagatggcaagtcttcatgttaccatggttttcctccgtcaaatgtgagagtttatgtttctaataaatttgggtggaggttaggcaaagacatttgacctctgtcttttttgaatgtctctttttccaaaaagaaaaaagatgcatctaagattacaaccaaagggccaatcattatgttgcagtggaaaagaaaaagctttgagctccttcattttaaagaccaaatggatgacagaccatcttccccatcttgaaagaccctaaagtttatttccaaccatacccaaaaactggccacaatagctgatgagaaatttctaatgggaaggtgaggacttagctggttacgagcacttaatctcttaaaaaacaaatatacatatatatata

SEQ ID NO: 237116 - DNA, 852 bp, Cannabis indica
gataacaaatcagattgtattgtaatgggttttatttaggagataaaataccaacacttctcaactttctattgtcacttgaatcactcaaatcaggttgatattgagggagttatgctcaaaaaatagaagtggtacaaggcttcaagaaggtcactcggccataacaattcaataggtcaactggaaaaggtaatgaaatgttactctaccaaagatgcctccactttgtagatctccttcttaactttctatagaaacttgaatcgcccaaatcagattaatattgagggagttatgctaaaaacacgaaaggggtggatgacgagtaacacccacttgacaaagaagtattggaccatcctcaagtcacccagcaagcactttttgagaagtcactcggcaaccacatctcaggaagtcactggacatgctctcttgagaagtcactcggcatgcacccttaggaagtcattcggccatgatattgcacacgtcactcagccatgaccttacaaaactttgtggaattttcccacacaagaggagagtgaagcgacgaggatgtggtgacaaggacaaggcaagcacgcgaggagagtgaagtgacaaggatacagtcacgaggacaaggcaagcacacgaggagagtgaagcgacaaggatatggtcacaaagaaaaggcaagcacacgaggagagtatgaccgcgacaaggatacggtcacaaggacaaggcaagcatgaaagatagtacgaccacaccttctggaagctctgaaagttaggaggtacgataagtggatctactggacctgcaaggtctaaaatcccgaccaatggtgcactacag

SEQ ID NO: 237117 - DNA, 1442 bp, Cannabis indica
ggttacaggttcactgaatgggaaattatacacatccctaagaaatgcaacttcttaacaacattgcaaagtgggcgactgtgaacaaagtcctaggagatgtcagtccgaaagatctggattcaagtgtgcttgatgatgttattgcatggaatcgtgggtgctaacctgatgtgtttttgaattttggttggtttcttttagtgttcttgttaatttgtcttttgctttgcttttccgttggtgtgttttagtgtttgttgtagtttttgcccattgttgttgctttggtgtgttatcttggttgaacgcttatactggtgtgcttggtgcttttgttacttgaattgagtagggtgcttttggcaccatcattttatcaaaaaaaaaataacacgaacaagagaatgggctaatccattaaatgaccgcttacaatgagaaagaaaaatattagaaaaagaggacgggacatttctaatattcttaataatagtgttaaatttagtgaaacaaatttctttattcaaagtagcttgcaccaagcgaagataatcagagaataccgtcagacttgtatacccaagacgacgagaaagaatcaacccttgcaacaaagctactacctctgccacatgaggctcatcggctaccattactggcaccgcccctaagtagaaaaccttacctgaccgactcatcaccaaagccccaagaccaatcttcgagtcatcggtattaataccagtgtcaacaaataggtttacatttcccattagtattagatagggcaatcaaccttgaataatttggcattaccgtcttagaagaagaaccctgagcatcttgatagcgccaagggaaacttaaagaccattggctcaccatatcatcagagagtaacttatgatcatgaacaaatgttttcctcttgtgccaaatcctccaacagagaacaaaaaattcttccatctcctatgtagaaaaatatccatatagtcaactaataactcataaaaactagaggtcggcttaagagcatccaaacctttcaacacccacctttgtcttattcttttaagagaagaatataaccatagaagatacaaagtagtctcaatattttgaaagtatattggacatactttgacaacattcaaaccatgatgttacaaaatggtgtaacaaggcaagaaattaagccctacttaccaaatagaatttttttactttgggcggcactggaattaaccacatgaacttccaccaacgagattgacctcaggaagccgacacttgaccccaccctagggatgtaaacgggtcgggtgcgggtgcggggatcactcccccacccccatacccgctttttaaattcaccccatacccgccccaatacccgtttaaattaaagcgggggcggggtagggattactcgacgg

SEQ ID NO: 237118 - DNA, 611 bp, Cannabis indica
ccccgaagtacttgctagcaaagttcacattgccaagatctaaatgagagcaaaagagatctttctctctaagagtagtgttgggagagaaaaggatggcttattttgtgaaattcaccaattgaccagtggctcgatggtacaggttgaggatgtccataatgacaaaatagaccctactattaaccttggtgaagaggagattgtgatcgacaaagagaatgtgggatatcgcatgagcattgatatagataggtatttcagagtaatctttggaggtttctttaagacggatagctgcagagagaccttcaactatcagtaggaaaaggtaaggggatagaggatccccttatctgatgcccctagtgggagtgaagatgttggtaaaagagacatttataatgagtctaaaagacatagaggaaatacaattaacaacactggtgacaaaacgggggcaacccaaaatgggaaagcatagcctcaatgaatttccattcaacatgatcgaaagctttgcccttatcaagttttaaagtagcccagccaattttcccatgttttctggtgcaaatgtatttaaccatctcatcgtctatgaagatgtt

SEQ ID NO: 237119 - DNA, 1888 bp, Cannabis indica
tcatctttggcgaaatagccttctcgttttagtaattttgccttgtcaaaatcaattggtaaaaccgattctaactaacttaaccaatagttagttgaggttgttagtcttttaaaggattaactttctcgcgatgagaaaaatagtttatgcttcttatatatggtattatatttctacacattatcaatgtaggactctctaacaggtctttcagatactcttgacgccttgtttagattccaaataaagactattttgcaaaaattaccaaaagaacaaaatttcccagtgacatgatctattttcactactaattactctttttctaaccgataaataacatgcatagttccaattggacaattttgttcaaatcgtatcaaattttcatcaggttcattcatccgattgtgtacggtgagtatccaagatcgatgcaaggaatagtaggcaaaaggcttcccaagttcaccaaagaacaggttaaaattgtgaagggctcaattgattttgttggtattaaccaatacactacattttatgtagctaattcacataaaccaaaaccaaaggtgttggggtaccaaagggattggaatgtagactttgtttgtaagtttcttcccccttttttttcactcattcatatttatacacactaaataatatcactatttgcttaattattctttaaacattgcagatgaaaagaatggagttcctatagggcctagagtaagtttcctcaatcccataacacattggttttttgataggaaaacatattataaattatggtctcttacttagtgaaattttcaggctaattcctattggctttaccaagtaccatggggtttgtacaaatgtttaacttacataaaagaacattatggaaatccaactgtgatcctatccgaaaatggtaataatattcagatgactttctgctcaccccatgatatcaaatatattctattataattcgaaaaatttgtagtgacttttgctcgggttgaaattctcaggcatggatgatccgggcaatgtgacattggctcgaggattacatgacacaacgaggatcaaattctacgaaagctacttgactcaactgaagaaggcggtcgatgaaggagctaatgtggtcggctactttgcatggtcattgcttgacaatttcgagtggagattaggttacacttcgaggttcgggattgtctatgttgattttcataccctcaagaggtatccaaagatgtctgcttattggttccaaaaacttctcaaaagaaattagtaatcatacttgacactatctgaatttcaattagacttttctcttctaattttcagtttttaagagactagcaaatttgctaaagagacactaatgaataattacttttttatttagttggacaattaatgtttgtgtttttatttagtttaataaattatcttcttaatttggaatgagaatgattttgaacgagttattagagatttttgttatagttggtattaattgattatataataatctagaaagaaagcaaaagaaatttattaactaaatgaaatgagcattatatgaattttgtatttccatggtttagattcaaacatagaacaatatgactaaaaagtaacgctatccaaatgttcaatgtaaacataaaattcatcaaaataaataaataaataaatacaattttagaccttatattttataaaagttactaattgggtcttctgttttgataattaggttcttacaaaaatattagattttgggtaaaagtttataattttactgtcacacgaattgtttttacaaaaatactgtctttttataaaataacttaaaacaacagtaaaacaa

SEQ ID NO: 237120 - DNA, 2262 bp, Cannabis indica
tgaaatcgtggggtttgattacatatcacttagtataaatgcggttattatttgaatatcacacagctgtgatttatccgcttttattggatcaaaatcatcgtgtatttaaacacgttttaaatcatagtattctgggatgtctcgacaggaactcagtaccaatgaccttggtagcgagctggagcttttcccctatctttctgaggttgatgatgtacgcctcgttgtttcttcgcttgaaggcataacacttcattttgacaatcacagttcttaatgacaaaaagagtacttcaacagtcatcattcgaatgtgaacagcttccgactcgtcaagactataagtctcactgaaagacgtccactactacaaagttggtttttcccaacggttaataagggggtcaattatgaaaattaactgttggaaaaataagaggagatttttcttcaacggcttagaaccgaaacaaagaaaccgttgggaaaaataaatgccaacagtggagaaccgtgggcaaaactaaatggatttttaaaaaaggaacaataaatgccaacagtttataactgttgggaatacttagtattccatatttgttttagtatataaatgttttttttttgcttaatagaaaaaatttgtatttaataaaaaaagagtttcagatttaaaaaaaattgtactcttttttacttaataaaataaatatgtatttaattaaataaaatacaagaaaaaattttagatttaaaaaataaaaaaattacttaataaatttataaaattgagaagtttggattttatatattttcaattagaagatagttttataaattagttgtatttaaaaaattattatgaaatttattaaaaaaaattattgtgaaagagaaaaaatattttaatttttttgtcttaatatttaaaatataatttatttttgtttgttaagtatattttttaagaatataaattggaagaaaaaagttaaaaaacatagtataaaaatataaatattttatataaaataaaaattgttaaaatgagatgccttttaaagttttgtttttggggtgtaaataaattttttctgaaaaagtatatatattttaaagaatttttctaaaataattaattgggggtaaaatcaaattaggtataattaataaaataatcagaattttttttttagaaaataaaataatcaaatttaatttaatattttggtaaataaatttaactttgggtataaaagaaaaataagaaaccctaaccaaacccaaaccctatttcatcttcttcttcctttcgcccctcttcttcctctctttcctcttcacccaatccgcctccacagaccaccatcaccatcatccaaagttgcctccacagtcattcggtgtctccacgacctcaagcggtttaatttgacaaaatttggcataaaccttggacccttccttgtagtaagctaaggccccctttgattgcagagggagtcgagtctctaaatctcagatagttctcgaaactagaattttagccacggagcaagaagaagaagaaaaatggcagaaaacaacataggaactgatgctcctcacaacgtgaccatctacatcaacaatctcaacgataaaatcaagctcgacggtactcaattgttattgtttttgaaatttttcttgttgtgggaatttgaattagatttggggaccaaaattttgtgagcattgtttggttacagagttgaagaagtcgcttaaggcagtgttctctcaattcggcaagatattggacatcttgattcgactccggtacaaataaatcaagcggcggtcggggtctcatctaagaatctcaagaaggaaaactcgaggtgttgtggcctccgattcgaacctcaaatcctctgcctcaaacatgaaccgatcaactgcgacgaagaaattcatcgaggtgttgtgctcctgttccagtacgattgagacgaagaactggctcaaggcgtggatgagtgcgacgcccctattccagtgtatttgttctgggttctcttggatcttcgaatttcattttgaaactcaaagtctatgaatatacatttgagtgtaattctgttgggtataatttatttattattcagtgtatttgtttgagttgaatttgttgtttgtgaatcaagaatttgttgttgtgaatcaagaagtctgctaattttttttttcttatttctttaatttttatttatatta

SEQ ID NO: 237121 - DNA, 979 bp, Cannabis indica
ttgtaatttgtgttagatgtgactggtgcaggaccccataggtctgtgtgtattaaatctagtatattttgggcttgatcaaagttggtattaaaaaggtaaggcatgcgatttaccatattggcaagcttcacagaaatgttctttttcattaacaacatattttacattaagagtgcttaacacttgactcaagacacgtctggaagggtggcccaatctcttgtgccacttatcctttagggaatgaaaactgtgttcagcaacatgctgatcacttgatttagacactacaccagtaaacggtttcacagacatagaattagaaaaactagaggaaccagtactcaaacttccttgttggctagcaacttgatacaatccatctctaagagtcccttggagaatcaccttctttgtgttcaggtccttcacaaaacaacatttggcaaagaattcaacaaacacattattttcagatgtcagttgagaaatacttagcaaactcttagtaatatctggaacatgtaggacattattcaaaactaagtggttgttatcaatactgagtaaggagcttttaccaacatgagtaatttacagattaccatttcccgcagtaagagtatcctcacagttgtaatcagttttctgagtcatattgttggtgtcagcagtgatgttgctgctagttcctgggtccatgtaccaagctccatcttcaaccatttcaggtgtggccacaaaagcaaatgccccattgttgttaccagtgtgtgaacctttgtttccagctacagatccagatgcagtggggtcagaactgttggaattattttaccaggatctagatttattaacaagtatgttattaacatcctaaatatgaacttctaaaacgatatgaaataaacacatataaagtatcaggaaccttacagtggttgcagcggaatataacgtctccttccactcagat

SEQ ID NO: 237122 - DNA, 1218 bp, Cannabis indica
atttttttttgtttgattgtcaaattaaaaaaattaaaaactgaaaaacagttgtatagaatatgtttatggaaaatatttttattttttaattaaaaaaaatgttaccatactttaatttttttttttcaaattagttacataagtagctttgacatggtactgacgtaacaactcgctaagtagtatgtcatcattttgtttgacacgtgtgataatgaccaatttacattactataaatagttcatggattatttttaatgcgctaaaaaagattatttttaatgcgctaaaaaattgaaggggcacaacaatacataaattataattttagagtaaaaatcttaaataatgaatcgaaaattaatagaagaataaataaaaaaaattgataagcaaaaagttaggattgaagtatgttaattgttgtattgtgatatgttgagtttgttagtttggatagggagatatgttgggtttgttttgatagcatatatggaatacctatcatacataaagtgatatgtcgacgtagattggccaagtagtgatggtggtgggatgggtgatcacgacgagtgatgagtactagagtcagaggcgtcttgttggaacccagccctagaaaagtcacatacatattaccttaatatcgatcagagccattttattagataattatgaatctcaatcaagcccaacttaatttatgactacaaataccattcttattcgactgcgctcctcctgcctaactatatctacgtgtactattcgtaaatttttaaacatatatattttttaaaaattctacaatacttctttaaaataagtgtatggatgaactcttatttatttttgtattttaaaaaatactttattcaattcttttcttatgatcgtatacatacagtgacttgacccataatttttactttgtgggggcttatctattataaaaaatatttataactatattataatcactcttactaaatttatctaattttgtagaggcttttctactattttggtctataattattaaattaaaaaatttacatttaattttttaaaagacaatatttttattcgtggggctatagctcccacatcaatcttaatgtgttcgtccctgatcgtataccgtttaaatttttttatttaaaaaatatgtttgtaatattttaaaactataaaaatacattttattcaac

SEQ ID NO: 237123 - DNA, 478 bp, Cannabis indica
gcgaaattcactcgacaacaggctcggttatattgttccatgtctttccattcaaagttttctaactaaggttttgcttttttacagccctctcaaaaagaccagtccctactcccgagatggtcgacgggcacaggctcctgctgactcttccctacggccttaggtcgtgcaacttccttctaaacgaggccaatttgagatcggtggacctccttactgacacaaagtatactattataaattttccaagtattcttcttggcagcaggttcccgttcctaaggaggataaggcttgagattgcgtggctcgggcacaataccttcaaaacactgccccttgggaagctggtgaaggagcatcccgaggtaatcaatgtggttggtcacccacagtacttagggttgagcgtaactcattagttacttttcaagatagttgcctaaatttttatatttggaatttccttctcgta

SEQ ID NO: 237124 - DNA, 745 bp, Cannabis indica
atagaggtgtttatataatctctcagtataacatcacattgatttctaaacaacgttgtgatttttctttaaaataaaataactaaaatttcaaaacgtaaataaaaataattaaaaaaaattgatttgaaacttttttagtaagccacatcatgtgtgttttgtgctgttttatatttatatataaaatataaactaaatgtgattaaatcaaaataatcataaaatagataaattaaaaagtaaacattataacatgtcacataaactcttaaattcttttttgatatagatatagataaatattcataattattgtgaataattctatttttaattatttgaaataattacaaattttaaatatttttcaaataaaaaagtaaaatttaaaatactaaaatgaccaaaatataatgaaatttttttatttgttaaaaacaattgatttctttaattttaatttctaagttttgacacccattgaaaaatacaataatatatgtacattcatctaaaagtttacaattaattgggtaagagttatcaattactaatacaaaaattatgcaatattaatttgagtaatttacagcataaatacttaagtttaactctcagttgaaaataaatacctaagtttaatttttggcggtaataatacccaagttatatttcttgcactctgtaggtacctaaatgttaaatattaagccattatgtctaagtgtcattttcttattgg

SEQ ID NO: 237125 - DNA, 1571 bp, Cannabis indica
actaatgtctcctcagttggtgtaccacaacgaactcatggcatgatcactcgatctcaacatggcatctacaaacccaaagcttatcttgccactaagcataagcttcctgaatccctacttcctcgagagccaaaaactataaaagctgctcttaatgatccagcttggaatgcagccatgaataaagaagtcacagcactcaagaccaatggtacttggactcttgtgccttatgagcctcatatgaaccttattgacaataaatgggttcaccgaatcaaactcaattcagatggaagtatagacagactcaaatcccgattggtggccaagggttatcttcaagctcctggcattgactatgccgaaacattcagtcccgttgtcaagccagtcacggttcgaatggtgcttactcttgctgtcacttttcatgggaagtcaaacaattagatgtgtctaatgcatttctaatggagttcttcaagaaactgtatacatgttacaaccaaaaggttttgaagacccaactaagcctactcatgtctgtcacttgcataaggctatctacggtcttaaacaggcaccacgagcgtggaatgacaaactcaaagctacacttcttgactggggattcactgcctctagagcagattcctccctcttcatctatctggacataacttgcttgtgtttttagtttacgttgatgatatccttattaccgggcctaataccactctcattgacaagttaattactgatctaaatcgctcattcgagctaaaggatcttggagccattcactattttctcggtgttgaagttcatcgcacctctgcaggaatgtatttgtctcaaagcaaatacattactgacttacttgtcaaagtccaactcgagggagcaaagccatgttctaatcccacaagcagtgctcacaaactatcacttcatgaagggacaccattcgaagatcactccctgtatcgcagtaccctgggagctttacaatatctaactcttacacggccagatgtggcctttatcattaacaaactgtctcaattcattcatgccccaacgagtgtgcactgggaggcatgcaaacgacttcttcgctacctaaagggcactttacatgatggactgctgcttaaaccagctacaagattgtctcttcaagtatattccgatgctgattgggccagctcaattgatgatcgacggtccacgggcggatatgctgcattttttggaccaaatctcatttcttggtctgccaagaagcaacaagttgttgctcgctcgtccacaaaatcagaatttagggccctagctaatgcagcagccgaggttaagtggattctctcattgctctctgaattgcactttcaacttcaagacataccaatcatatgggtggataaccagggagctgcagcccttgctgctaatccgatatttcatgcaagatgcaaacatatcgaaatagacttacactttgtgcgtgaacaaatactaaagaatgaaatttcagtccgtcatgttcctagcattgatcaggt

SEQ ID NO: 237126 - DNA, 1549 bp, Cannabis indica
tttttaaatattatttatatcatatattatagttatttttaaattgttattttttacattaaaatattaattgtatatgtaattttttaaaaaatatgtaaacatgtgtggattggattagatcaattacatttatatgtcaaacaacatccaatccgcacaagtgcgaattttgaacttttaaatccaatccaatttgcacaagtgcggatatccacactttgcggattagattggattggatcatgcggattggattgggtattttatgaacactctaacgagagcagtctcgtataaaattgacatgtggacctagttctcaagaaaaatatgacatcttaatttaggacactcacagatttagcgtaacttgatctaaactcgtgagatgatgcgaccatgacaggatctagtcgtgtactatgcatcgcatagtcaaagaaataagcaagaccaagaggatttgatactgattgcgtatataacgattatatgtgatgacgaagtaggcctctcctacaactagtaaatatcgattctttacataagggtggtctatgtgactaatgtgttcaataactcgttagggactcgcacgttccacgttgccaacacatgagatgtccatctttgcgatcaaagatgaatgtagacatccaaaaagtaggcccataggccacctcgcgaataccagacacatctaatgtctgtgagcttatgtgaggatatgaataggcaactcgtgctcaacaagtcacatacgttgcttcacttaatacaagaatagatttaactgttcttcatttattctttaaacatttattcttgtttaatactgtcatttattgtaaagtggttctaaaactaatcagttatgtaatcctaaagtatacttgctttctgtataaaggagtgatccaaatcaaataaacgaagctaaaatctttgcaatagtggaataagaagatcgagctctgactgaaccactataattctctcatcgtaacagcagcaactagaagggcgggttatgtttcgattgcccaaagttctaggttctttatcgttcttgatgaatgaccatagagaaaaccttattaagaggagggcagtgatcaataagaagaatttgatcacaaactgcatgaaaagattcattgagtcctttgaggaattggaggacttgatcatggttaaggtgatcatgattttgggtggcagctgcacatgtacagaggatgcgaggtcgaagttggttgattttgtcacgcatagctgttagttttgtgaaataggcacaaacagaatcatcaacttggtgaagataggtaagagtctcattcaatttgaatattcttggaccattaccttggttgaatctattatttaggacagtccacatctcagatgcagtatcaagatacataatagtgctttttatttcaggtgacacagagtggagaatccaagacttcaccatttggttgcatcaaacccaagaactaaagagagaatcatttggaggggttgagggagtgtaccttca

SEQ ID NO: 237127 - DNA, 2066 bp, Cannabis indica
catttggctaaacaaaagcgtttaccattcatatccaacaacaatttttccaagaatatatttgatttaattcacatggatatttggggtccttttcatataattagtgtggaaggttacaaatatttccttactatagttgatgacaaatctcgatttacttggctttacatgctcaagaataaatccgatgtccaacatatcattcccaccttctttaacatggtttgtactcaattttcaacaaatataaaggccatccgatcggataatgccaaggaactaaatttacaatctttttatgcctctaaaggcataataaactaccactcatgtgtggaaagaccacaacaaaattcggttgttgaaaggaagcaccaacatatattaaatgttgctcgtgctcttggttttcaatctaatttacctctcgtttattggccttatctagttcaaacggctacttacctcttaaatagaactccctcaaaattattcaaaggtatgacttcataccaaatactacatggtactaccccaagttatgaccacttaagagttttcgggtgtcttgcctatggctctacccttacctctaaacggcataaatttacaccaagaagtcgagcttccgtgttcattggatatccccaaggcatgaaagcatacatacttcttgacattgaaacaaaacaagtgtacatatcacgggacgttgttttctatgaaacaattttccctctttcttctacaacctcttcttgtgatattgacacactttttcctgatgttgtacttcctacaaacaaaccagtacaacaaaatactcacacctctcagcttctgcacaaaccagcaccattttttggtctcaatcaatcacccaatgcacacaaaccagctggtgcaaatcaacacgctgatgcaaccaaacaaactaatactgctgcaaaaactggtgcacataacctccacacattgcaatctatcccagcagtcacacccgcatctcaaactggtgccaccacacaatctgatgcatatccacgtactgcaccagcaccacaatctggtgcaaatcgtcatattgcatcaaccaatctcgaaccaaatgcaccacttgctgatccagacatcacgagctgcataccaactatatcatctcaaagctccccgatttctggtactaaacacgccaaacaaccagcaactgtgtcaccaaaaatctctgaaaatgcatctggttttaatgcccctttgccggtacaattctcaccaaaaaactcagttcatccctccattacaagagttggccgaactgcacaaaacccaaaaaattgaacagattacatctgtcatgcctcttctacagctcatccaattgagccctttctctcatatatcaaattacatccccaattcagagctgccgttctagcagcctactctgaaattgaaacccaaaattatgctgaagcttctcagttccgccattggcttctagccatggataaagaaacggatgctctagagaagaacaacacttggatcatcaccaagttaccacctggaccaaaaggccagttgggtgcaaatgggtgtataaagtcaaataaaatgaaaatggagctgttgaacgtttcaaagcccgcctagtcgccaaaggctttactcaacgacatgtcatcgattattctcaaacctacgccccgtggctaagttcaacacccttaagattttttggcccttgctgccatgaacaactggaatgtccaccaacttgatattaacaatgcctttcttcatggagatctccatgaagaagtctatatgaaaattccccccggatacaaagcacctcccaacaccgtttgcaaactaaacaaaagcatttatggcctcaaacaagcctcaaggcaatggtttagtaaactaagtcaaaccctcatctcagatggtttcactcaatcactatctgataattctctcttcataaagcgcacatccaacattttcttagcaattctcatatatgtggatgatattattgttgcaagcaacaatga

SEQ ID NO: 237128 - DNA, 1115 bp, Cannabis indica
gtgttagtgtcttggtaagccttagtgattgaaaaaaactatctgttgttattcatttgatgaaacttgtaataccatgtgcttggtctaattgttctttttcttaattttatgcttgatgggaaattgattatgatttgtaaatgttgataattataatttgatgcttgactagggttggaggtttgttgagttaaattggataaaacttgcattgtttgccctttgaggcaaaatccttaatgatatatgttgtgaaagatgatttaggcaatttttggaacatttttacctttcaaacttacccttacatgattttccctagtttacattgttgtgccttgggttgttattcttttttcgagacatattatgagctaaaaatgacttcattattatcttttcttgtccctatctatgccataagcttagcacaagcttggagaatgattgtaatttagaaaacttggggtaggatatgtgaggaataaaagatatttatgagagactttcatgaaataaaattacttgaaactaatcgaaaatatatatagatacatatacattttgcaatttagttttaccaaaaaaaagggttgttgctaggttatcaagaaaggttctctcatttaggcttatgatataggtaagcctaaatgatattttccatattcttttacccaatcctaaacattaaaacatgttaaagtctttttgatttcaaagcatatgttgttgacattagtagagaaggttaaatgatgcaagcttattgataatttgttggtgaacttctttggattgagttgagcatgtatagtgatttcctatttttatttggcatttatgagttatatactttcttctattttgagtgctaaagtttgttgttggagtaattggatcaaaaatttggttttgcaacaattaagtcttgcaagtgacggtagtgtggtgtgattaaaagttaaggcctaatttgtttatctatgttcatttattttcattttagtatcaatctttactcgaggaggagtatgttgggttttatgccctaaataaaactcaatttcaatgtaatccgttttattcaacatcaataaagaaacagaagt

SEQ ID NO: 237129 - DNA, 1400 bp, Cannabis indica
attatacttttcaaaatatataccaaaaattatttagttaggtcttaagttttgtaaaaaaatcttctcataaaatcactaaatattatgatagtatttgataagaataggaatgagaatagcattgacatttcaattctttaagatgtaactaaataaaataatagaataaaaattgctttcttttctttatatttcattacctttaattaaatgccacctaaatataaatataatttaacataatgtatcatccatatactaatacgtgtgaagcacgtggtacttcactagttaaagaaaaaaattggaaactttacacttaagacttaatttttaatctagttgctaaaaatgacttggtcaagtatccataacgtttttatttatttgtgtatgttttaatactttcatctgtacatttccatatctttttttccttccctactcttaaacctactccttttctccctttcttctttctctctttcttatttgtcttcttttctcaaactttaaaaataatttctgatcacgtcattactcggatgagctaaaaaatatatcattatgatctactctttaatgtaaatatttcaagatgtgggaaatatatattttttcgttatttccataaaagaaatcatttagttattaatatagtgattagtgttttacaatttttttaaatcttagttaacattaattttagaattttgttaattgaaatatattacattatatgataattaattagttttcaaaataataaaaatgtaaataaaataattggtatataaaaatagtagcttgttatattacatgataactcattagtttcgaaaaataatttttaaagttacctaaatgtatttttaaatataatctaccataatataacttaaaaataactaattaattaacaagatagatacaaataaattttaaaggtaactaaaaattatatgatataaaaataatttttttaactaattggtttcttatcagcactattagtaaccgaaaagttattctaaaaatgacaaaaaaaaaaataaaatttattaatttaaacaggaaaacgtcatgtgcgtcaaatttggccgacgtgacacgtcagtaatagtagtaaattgttgtaaattaaatgcaaacaatgtgtattattgtaaacttctcaaaataaaattatttttaaaatacatatattttttagtaattttaacaaatactacattttttaaaaaaataacccaacaattttgttgctacctagggcttaactagcctaattaggccttaggtagcaacacaattattgggttattttaaaaaaaatgtggtaattttcaaaaaattattaaaaaaaaatgtggtattcttctagatgccgaaacagt

SEQ ID NO: 237130 - DNA, 530 bp, Cannabis indica
ctatttgccatgaaggttggtgttgattttgtaagggaacctaatgcatttctatggaggcctacttcaggattaacttagtatagaagtaaagtgttggaaatgttattgcttggccagtctgacaaagttataatgaggtaaattgcttaaactgcttgtacttgggaacctaatgttattgcttcttatgtttttgttgctgttccctatctgcataaatttatttaccccttcatagtagtgtcttctattaatactatgtacgcacaataatgttctatgattatacttttgatcactcttatgtttctgttgttgttattttattagatttggtgatttgggggtgtggatttgtgtttaataagctgttgagtttagcttgggttttactatggggattgtctgctgtatgggatatttggttgtagtggtatttgggggcttggttttgtttatttattggttgctttagttgtttagtttttctttttttcttacaagaattcaactggttttaagatact

SEQ ID NO: 237131 - DNA, 1710 bp, Cannabis indica
aaaaaaaaattaaaaatatgtagaaaataaaataatataaaaaataaatttattacatactttgattataataaactagattatatcattatcattatcattataatagatcttaataactcatagtactttgaaatttataatttatcaaacactcaactcagcctttttccatagttctactacaactgttttttttcacagcacagctacagctgctttctctcactacacagttgtgctaaactggtcatttaaatattaatttaattaaatttcttggcaaaaataattggagtttttacaaatatattgaattttaggtaaaagttacaattttactgttatacggattttttttttacaaaattactgtctttttataaaacaaccgtaaaacaataaaatagaacaattaaaacaatagtttttacttaaaaaataaaaaataaaataataaaaaaaaaaatgacatagttagtatcttggacaacacttaatatttatattcttaaaatttatcttaaaagttaaacaacattatatatgtggcaaattatatatagcaagacaactgcaataaacaacacatactctagcaaaattgcttgtattttaaaaatcatgtcttttctattctctgtacccaataaaaattacacttcttttttgtgtttggcaacataatattacaaaagaaaaaaattcttgaaaagatataatattttttaaaatattaaatataatattttttatatatagtaccaaccacaaagttataaaagatattaactctttttctcttgaaatatattgtagatttcaaatatataaatatcgaataatttaattttattaaagttataaattataaagttatcttgtcagttataactaatccaaaaaattatttgtgatcgttctagtataagcaaacgaataatggcaataattgatttcattttcgtcattttgtttttaacagatcatttttgttatttaataatcattttatactatgttaaaaaaataacaataataatcatttcataccatcttgataatgagtactgatattataccttttaaaattgacaatattttaataaaataacagggtgcaatgcaccctaatataaaaatcaagatggttcattattgataatgtatatattttggaataaataggaataatgcctcttaaattattaccactatattattgttccttaatttgtctgttttatgtatttcaggactttgttaagatccgtttatttttcttaacaaaacaattatttgggaagtttagagcttaggtggcataatctgacatagatagttggaaattcaatactcctaaacctgaataataataggtgataagaggagaattcttgatggacagccatggcattttgcccagagtctcactatctttgctgctcctgatgcttcttttccccttactcctgatcaactgcactatgttcctttctgggttcaggtgtatggtattcctttccgttgtaagtctcttgatttggccaaaattattgcttcgggtgtgggtgatctaatccaagtggatcataccacagtgaaggagggaactgggccctatcttcgtcttaggttgttgattgatgttaataagcctatcaggcgaggtattcatgttcgtttttttaagatgggtagggaatttgt

SEQ ID NO: 237132 - DNA, 238 bp, Cannabis indica
ggttggatcggtttttaattgaattttgacactgacatctaataaccgatcaaatccaattagaattcaaattttttaacatccaatctgatctatttgtaattgaatatctaactttttgtagttggattaaattaaatcaatttagttcaattggattgaattagatcttgtccaccccatggaccaaaacccaagctgactccttgctcgatttgaaagcaagtccatccttaga

SEQ ID NO: 237133 - DNA, 514 bp, Cannabis indica
tagtaagcaactaatttaaaaacggtctatggtttcacatattattttctaattaaactttataattatatatattttctcaaaaaattaattgattataaacttaaaaagtatcttttttaagaaaaaagaaagaaaacactaaataatacctgaagatgctctaataagtacttaaattggcaaaaaaaaaaaaaacttgaaaattttccaatatggtcattttctccctctaaacattaggctaccaaactattaacttttagaagcataaacagtacgtttgattttactgtgtaggacacgtgtagggtcatcaataaaaggagaagatataacagatgagttaggagaacgacgacagaaaaataaaaaaccaaaaaaaaaatgtaaaacacgaactattaagaggaaaaacggtcacaaagtgctctttatctgttgcgaaatataagaagaaaatggcctcaatctttttcccatttttttatccacgtttggcccccactttacc

SEQ ID NO: 237134 - DNA, 827 bp, Cannabis indica
catccccgaccccacaaatggggcaggagatctcatcaatattcattctcttagcaagcaagaccctcaggggaagagcattggaaaggatgctccaccaaaggactttatgacgttccaagattttagaatttcacagtttgttccacatagtaggagcaacattcccaaaaggagctcttcccaaagcttagatgaggtaggcagacttagtagagaacacacctttagggtctcttgtccaaacccacctatccttaccctgaccatttggttttccaccctttaaggtactaccaacagtttccttgtcaaaaagttcattcagctttctgctgtcccagttcccatcaggtaaaagtagctttctactgtcccagttcccatcatgcacattataattataatcattttttttataattcatttcagaaaaatatatatttttcataattataatattgatatagatttcagcaaaaaaaaaaatgaaaagtataaattgacactttatttataaaaatactttcataaagtatggacaacttttatactttttatgtaattttaattactaaaatacttcttgcactatcacttacacaatcagacaaatgttgttgggtggttgaccgaaggttgcattagacgaaggtttcaatcaaataaaagttgttgcgtggttgaccaaaggttgcatcagacgaaggttcttgggtgattgactgaaggtagcatcagacgaaggtttcaatcctaggaagcatagatcgtgggttgttgttgaaattgtaatgcaacacgtatatttattgcgagccaactaa

SEQ ID NO: 237135 - DNA, 869 bp, Cannabis indica
aaaaagttctttcttttagtaaaaagagctttttaataattacgtagggcattttcgccaaatttctttcttagaaaggacgcctcctttgattctggcggttgtatggtttcgaagatcattatgaatcgcctattcatattctgcacgattcccagccgttatatttcttaatctttggctttcttgtcactgaacttcatgtataaaaggacggctcaagcttgtcatttttcacaaaccttctggctctttagtgaaatccatttccagaatggattacttccttcctgccaaaatgtctcttctgagttcagaagtttatctttccaaactcataatacctagatgcaccaaccattttccatttattcctacagactttaagcctcaactgaagcctgaaacgatggattccaagtctgtggagcttccggccaatccaaaccaggggaaccccatagccttccgtggccgatcctcacaagtgatcccagagtgtatagatcttatgagcaatctcgaaggtcctcctcaggctgatgaagaattccagaggaagattggcatggttttaggtggatctgggaaggaagttcttgttgtttcgatcagagaatccagcacacccaagaccctaccctgtgccaggagatctttgcgtcagcctctctccagtgttgagaaatttcctaaggttgggaaacagatctgagcttcaagaaatgggatcctttgatgatgaggggaatgaggtctttgcagagattaaggctctctacgtgtagccagtctttttccgagctatatgcagatgaactttctcgagtttatcaacttcccctctcatcctttgtttaggagaatga

SEQ ID NO: 237136 - DNA, 1195 bp, Cannabis indica
  modified_base (734)..(734): a, c, t, g, unknown or other
tcaatgaaatgaattaccaattgttttgtataatagccccatccaaataatatggaaataatacccaaatttcaatgcatttttatcatatcatgaaaatagtaaacatgtgtgtggcatgcaagtattttataacttaaaaaaaaaaaaaaccaaatttcacatactaaaacttgaaccacatgactatggaacagtccattgaccatataggagtctcaaacttgaagtatatatgagtctctctcaaaaacacattttgcttctctcaatacatactcctaaatatattgaattcaaagcattgctttggagaatacattacatgaagtcacaatatgtgtaccttggcacaaaaaaaaacgaaatcttaaataagtatctaataagtaactaattactatcattattaataaagatctttattttcattaatccaagtgaaaggtttcagacctctattaatatattattcattagtcaaataggacatataataccataagaaacacgaagattgttgaaaatgcatagagattagattactattatgattgtcaatcaattaatcaacatgctaactaaattataagggtgtcaagatagcaacatacataaccttgcatatatgattgtgaacttcctaattttcactctaaatttatttctgaaaaaaaaaaataacaatcaaattcctatcacaactcataaggcttaaggtttttttttttttnttttttttacccttttctcccaatactatggtcacccaccttaaccaaactttgtgaagtagaaaattttagtaaatttctagataggtttctagaaataaagaatcaaatgaatacttggagttttcctaaaatattatcatcatagttgctttgtagtttataagaatatgttgagctagtcaagtagaaaaaaattaggtaatattatacctccttgaatattgaaaacttaaacacatgaaaatagtcagtgtaataaagtgaaatctttcttaagtgactaaggataagtcaaaataatagctcactagtagactagcaaaattaataacaatcatctcaagaacaacatagtaacaaaaaaaaataaaaaataacaaaggaacttgttgatcgaacaagacagttaaaggtttcaatataaggagcataatagatatattttgaagtagctactt

SEQ ID NO: 237137 - DNA, 775 bp, Cannabis indica
ttttagaagaagagaatgacaaagtttataaatttttatatttttatgtaaaaatacaattctttttcttttaaaaagttattttatgagaaaattaaagaaaaagttaaaaaatatgaaaaaaaaaattatgtaagggtaattaggtactcttaccaaaggtaactagttactataaaatatcagggtcgattattactgttgctgatatgtacacaagtatacacatagtatatttttatttgtgtacacaattttaggagtgtaatcctataatgtgaaaattgttatatttttgtgtaagttcaaatgttgtgtttgaagagagaactgcagtagtcacaaaattcttttcacataaataaattaattgattcatttcaaacttcaatattatataaaagaaatacaatacttccaagccagaatttaatgagatcacattatcaatttttcaaaaaaatagaaaaaatacataatttggataaagacaagttcatatatgttaaaaaaatgatcaagtgagaaagataaagtgattttcaaccccacaatttgaaaaatatcataaagtgtatgcaaacaaattactcctcttttttatgaaatgaatgttatttgttcacacacactacccaatatatatcctaattaatattatatatctgagataaatattattttgaatagtgtgttttgtaaaaattataaaatagatattttattttattaaatgataaataaattttgtatttttaaaatgatacaaataaga

SEQ ID NO: 237138 - DNA, 1320 bp, Cannabis indica
gagccatctgagaagcaaaaagaaggaatgtaagcgtctatctaaacaggcatcaagaccagcatcaggtaataatatatcgaatataaacatgttcttttatataataaacgtatactcatctcttggcttttcgcagaaatgaagttcctgaagcatgctcctatcctcaaccgaaagcctaaggcaggaactgcgacgacttcccctatccttcggcagaagtggaaaagcaaggttatcgtaactccaatggctcactcctctaagaagcatgtcaaaattgcccaagacaagggtaagaaagtcatgattgatcctgctgtttgggctcgcaactttataaccctccaagacaagttcgtgagcgatgagtttgtgtcgaaggtcgaaggggttcctgccgaggaattgatgtcgcattccgcaaaactggcatcgtagtttatgaccatgttcttgaaggcgtttgtcgctggctccaaggaagttgatcttttgaggaaacagaacactcttcttcaggagaatgtgcggaagttgaagctggatgcgacttccagggagaaagatgtcgagaacctccagaaagccaaagagaatgcggaggagaaggcaaagcaggcagaggataaggccaacctcactgaatcgcgagttgaggaattgacacgcgatcttgagactgaaagggagaatgggaagaaacagtacgaacaggctgtttttgactatatttatacgacgttatccaaattgtcggactttgacttcttcgtccttggggcagaagcaactgagatatccgaggattttcgtgctatgtaacctaatcaaacacaaggatgcggaggaaacctttttcctaaagaagcagagaatgcggacacagaggaagtcgctgatggagctaccagcaaggtcccagacgactccattgctccagcttcttaatatatccaagtttttattattattatcgaactttttaactctttagtagtacatgggtactctcgttttgtacttggaacaaatttcaactttttcatttttcgaacgatatatatcctttcgaggatattttcttttgcctatttacattaagcggtacaggggtactcgaataattataaactgcttttatctaatctatttgtaatgtttttaatattacagcttggtgtaataacttacaaatgttaaacttggaaaaaattaaaactttgagaattcgagaattttaatcataataataataatcaatagtacaaaggtaggcgataccccctatacttaaaatatttataaaaataaatt

SEQ ID NO: 237139 - DNA, 2274 bp, Cannabis indica
tttagctttattttcttgcacaattttctcatttttataaatcaactttttgtgagatttggctaatttatacattccaagtgtcgaaacttgaaattaaagaaagcaagtataattatatttcaaaaagtgacaatgaaaaagaaaattaactttaaaaataacataaataatagactaaaaaatattctaacactactaaagtgcattatgaagacaaaggtgttgataacagttttgaatgtaaaattagatacaattattataaataatggctatgctattatagtacattatgaagacaacaatgttgataacaattttgaatgtagtaataactatagatgagttacagtgataacaataactttgaatgtagtagggactatgtataatttaaatttcataataaatattaattaaaaatgtctaaataatttatacacaagttggtatttaaattattgatccattctatttttgtaatactcatactaaggatagatttgtacctaattttaattatgttcaataaattataaattttataatttaaaatttaaaattttattttatcattttaatctttaaaatattttatttaataatcatacccattaagtatataataaaattaataaaaaattaagataaaaaaatatctaaactactgaaaataaatatttaaaacacccgctcgcgaaacacaaattgttttctaattgaaaaagtaagatacattgataaatttttataaaggtaaatattgtatgtgtttacatcatattatgttttatatgttttttttatatatataattactttgtaaatagtgtatagttacattaaatccctttcaaagaactacaaaaatcctataaagttcttcaaagtctttactttgtaaatagtgtattattatttaaatgcttgtaatacatggctttaggggtacaagccctgcaaaattgataaaaataagggctttttttacatttttcaaggcaaaatgaatattacacaatatacatacttctctggttaaagaatgcctaataaacagaataaccttaagactccattatccctttctgttttggccaccaaacactatagaataaagatgatcacaaaactaaaggttgtggttgcattcatctctaaactaaaggtttcatatatggcttgctgtgctagcaccatttacattttagagccatgatcctacctatcataacaaaacaagctatagcatcaatgggaactcggtattaaggatcgaaagttcgaaaggatggtaaagaaactaaagaacagagaaaaagatgagaaggaagacatactagtcagcaagttgtaaacaccctaggtagttcaaactggcagatcacagttctgcttagcaattcccactgattttgcgttgatgccataagatgacagaacctttctccgaataaaccaaccaaatcaaccaattaaaataagagaagtcacataatttctggctatgcaaacagttgagagaagtcatatgatgacgaggagagtattctcaattattagcagcttattgctattacatatttactgtaaatctttttacaaattttctctgttatgctgctataagcatctggtttagacttttgtataggattatgatcttgtcaacatgtaatctctaaacacagacactgcaatttttttttatctaacctagagccactaaagaaaatattggtaacacatgataaaattggtgataaacaatcaagtcaataaacaacacctacattgcaggtaaccttgttgattgtttttaatcactatttataaatacttttaatatttccaatacatagataagctgtaaacacaaattcattatagtgtataatatagtaacagggacctctacaaattctgaaaatttcgaaaaatttaagttgccaaaattagaattcaaacagtaagttgcacgcgcaaaacaagcaccatgcagcaagttgttttaatcactgttttaatatcttaaatcattcaaaatttcctaaaaattagagggaggtctcctgtaactacattatacaacgtcatgtgaaaagaaaatagagttccagttaatccatgaaccaaaaatactaaacgtacctaaaaaataacaattaaaacaatcactacttaataatgtttgtatatagatatgtacatacatcatcccaagaaaatagtagcgtatgtgtattagataaaagttttacgggtcatata

SEQ ID NO: 237140 - DNA, 2628 bp, Cannabis indica
tcttgttcaaccactgcccaatcaagccaagtggtggtagtgagcacaaaacactccttggcctgcacccgagacaaggcatcagcagcccggttgcccacccccggccgatactgaatgtcaaaatcataccctaacaatttaaccaaccacttctgatgttccggagtcaccaaccgttgttcaagcagaaacttcaaactctgttgatcggtccgaacaatgaaacggcgccctaataaataaggtcgccacttgaggaccgccaatacgatggccatcaattcattctcatagatggatttaagctgggcacggggtttcaaaatctgactgaagtaggcaatagggcgaccttcttgcattaaaacagcccctaacccgtaccccgaagcatccgctcccaccacaaaaggcttgctaaaatcaggtaaaacaaggacaggtaccgtggtcatggctgtcttcaacgcttgaaaagcttcggtggctgctgtagaccagttgaagttgtccttattcagttggtccgttaatggccgagcaatactcccataatctttgacgaacttgcggtaataccccgtaagaccaagaaacccccgtaattccttgagtgtagctggcacgagccaagataacatagcctggatcttggtgtcatccacagctactccttgtccacttacaatatgacccaaatattcaatttgccgctgtccaaacgagcacttcttgaggtttgcgaagaattcatgatcaaggaggagttgtaaaaccatttcaaggtgttgcaagtgggatgtctcatcagggctatacaccaaaatatcgtcaaagaatactaacacgcactcgcggagcagtggcttgaaaatggcattcatctgagattgaaaggtcgctggcgcattggtgagtccaaacggcataaccaaaaactcatagtgtccttcgtgggtacgaaacgcagttttgtggacatcctcgggccgaacccgaatttgatggtaacccgacctcaagtccaattttgagaacacttgagcaccttgaagctaatctaacaactcatcgatcaccggtataggaaacttgtccggtattgtctctcggtttaaggctcggtagtccacgcaaaacctccaacttcaatcttttttcttcactagcaaaactgggctcgagaataggctgttactgtcttgacaaatgctagctgccaacattttcgttaccaaccgctctatctctcctttttgaaagtgtgggtatcgataaggtctcacactcacgggtgctgcatcggggcgcaagttgatggtatggtcgtgttgtcgtggtggtggtagcttcgtgggtacctcaaacaccttgggataccgtgccaacaaggaggaaatatccgcaatgtagtgtatctctattgccaccactgccgtactgcctagttcaatcaacactccttgtttttcagctcgtaaaatcccaagcatagcctttaatgaaactggtatcttatgaagagaaggatctccttgcaacacaattttttttactgcctaccatgaactccattttatgatcttgccaatagtgagtagttttcttcaaagtttccaaccactgtacccccaatattacattcgtgctccctaatggcagaggtagaaaatcttcccttatgtatatactttgcagctctaacggtaccgaacgacacaccccagcccctttaaccgcctgcctgcttcccatttgtacacctcatcttcaatccattaacaaaggtagcttgcaccgccggttcggacatctgccccatggatgctgctaaagcttcaaatcggcgtctatactcttgcaccgaagtcacctgctgctgtagttggaaaaaacgatcatacaccgttccttcatgcgccggccggaacctacgaatcaccatttcttttagttcttcccacgagttaactggctgccgagaattttcccaacgaaaccatcgaagggctgctccttccaaacacaacacggccgcttcgagttgctccgctggtgttaatcattgtagtccgaagtaacgatcggctctgaatgtccattcatctggatcatcaccggagtatacgggcagctcaattttcctcgctgtgaactccgatcggcgaacccaatctccctctcgactatttgaggctaccgctgccggagaagagggccgctcattgatggatctccgccccgaactctgtgttgggccttgggtctcacggagagctagcatttcatccgagattttagcttgaccattcaaacacatccgaacctgctcagccaaaccagtcatagtcctatactttcccaattgactgttcttgatctctcccaggatggatttgatgctgctcatgtctgtcttcaaactggtcatatcgagcttcagacttcccacatccgcctctattccgtcaattcttttctccatcctcgtcgatggcatccaccagtgaccggtgctctgataccaattgatgagtacctgctactgttatctttctcacacagtagcaatttccagcaacaacatttaatagaaacaaatagatgcaagagaagagtggagaa

SEQ ID NO: 237141 - DNA, 857 bp, Cannabis indica
atacacgtgatgttttaactattctgtatatatgttacaaaaaaaataactactattgtgtatatatatggcagtactgttgttcttttttcatgtttaaatctagtaaagcccaatcatcatatatagaatatcatttatatataatccactagtgtgtataaattgaaatagttgtaatagtgggaagagtagtgaataatgaatgattcatctcaaaagtaattaagacatatttggttgatttcattggttattctaaatgtgaaataagtgagtaataataattagcattctcttatgtttcagacttcatttcccaacttaaaagtgttgtatgtttcgaattgtgacaatttgaagtctctgttatcatctgccatggctcggatgtgagaagatggaagaggttcttgagctttgtagtcttccaaactttataaggttttgtgaattaggagattattgcattgaatgtccattgttgcttgaattggaaatcatggattgtcctaaactgaaggaattatttatgggtgttaaaaggacatcatcatcatgtactattaatactactgataataatgttattggtgaagaaatggataggatggtgtctgctcctaataaacaaattctcttcaaacacaataataaggtactatcatttatatatatgatgcttaatatgtattttactttcagtttcataaaaaagataaattcatttttgcacatttaaatcattaattaatactagatgtttaatatgctacttctaatcttcttttgtaggtaatttttcccatgctagaaacattaaagactgattgtagtgaagtaattaaggagatatt

SEQ ID NO: 237142 - DNA, 1565 bp, Cannabis indica
ttttttttaaacacttttttttttcttaatcaatatcttggacttcgatcatgacccggacccaaatccctcacggtcctagtgctgaacccggcctctgacttgaacccaaatccgaccccgaacctagacccgacgtaaataaaatgaaaaaatgaaaatgaaaatgaactttacagaacacacttgtgttttctgtttctaaaattgaaaaacaaaagtggttacagaacgcatttttatttttcaaaagcaaaatttttaaaaacaaaaattttactttcattttgtgattaaaaaattagaaaataaaagtgttaccaaatggcaccttagtaaacacttctcaataagcttaatttcactgcctttcttcatcaaagtccatgcccaacaaattattaaatagaacataaataaatagataacattcgttattgatgtaacattcattaagtattttggtatgtacacttacatatccaacgagattgagaggacaattttcttcataaagaggtctactttttctcccacttacaatttttaagatcaatatgccaaaattgaatacatcggactttattgagaatatgccatcagaggcatattctggcgccatataaccacttcatttgcatcataatatttattagtatacaataaacatatattagaaaaaaaagagcaatttgcggccaaattttcttatattttaatttttatacacttaacttttttattctcttttcgtggtgaaatccccttaagtttatttttctttacaaatttaacacgccaattaaatattattgttaaatatcaaatggatgaccactgtatacacttgtgtatatgtaacagtaaaatctcgaagttgatacagtagtaatccagttgatatttaacggtaatatctaactgacaccttaaatttgcaaagaataataaacttaagggggttttgctaccggaaaaaggtaagggggttaagtgtataaaaattagaacataagagtgtttcgccgcaaattcctcaaaaaaagaaaaaagagtttttgaagatgacttactaggttcctactactctgtgtgtgtttccttctatttggtctccaccaaaagttctagccaagccaaagttcgaaattttgggattcatgtcatcgtcaagtaacacattactagctttgagatctcgatgaacaaatctcaatcttgaatcatgatgaagatagagaagccccttagcaattccgcatataatctggtagcgcttaggccattctaatagtatgcttcgattttcatctgcaaatgttagtgtttttcttttattcgaacaaaattggcaaattttacacagaacattacatgtgttaaaagaatggtgaaagagtgttactaaaaatgaaatagtcaaggcttttgttggacatgtactcataaattaatagtttcatttctctatgagtacaataaccaaatatctttacaagattccgatgttgaaacttagcaattagctcaatttcatttttgaactcattgactccttgtccaga

SEQ ID NO: 237143 - DNA, 1848 bp, Cannabis indica
ctatcctagatacgaaatagtaagtttcaacaaccgtcaggatacttacttgatgtgtgagtgggaaagaacggttgttgtggaaatctatccaaaagttagtgtacccaatcaatcacacgatcgaagccagcttgaacgtcgaaatcctcgtcgggctaagggaggaacattttaaggtttaatggctctgtgtatggaaaacaggttaaacaaagtttcaagaagtactagatcaagtagttgaaacctcttgcattcaccgatggaaacgatcgcaatgtcaaagttttttcggaataaggggctgtggtttgaagtttgaaagcaaaagttttaagaagtctaaagaagtaaaaattaaaaagtgatttgattatattttggccaaatccatgcaatttaaaatgaatagtctagatcctccctccaaaaagcacgatttgatctaacagatgggaagaagaaaatatggcatttaaaaattacttagagcattcatttttcgtcattgcctgcctcaagcccatcgtgtattaaaggagggtcgtgttaataaacctgacatcattgcaacttcctctgaaagatgcgcgccctacacgcgcgtgttatcaacagatgtattgaagacatatcatgtgtgccatgtcagtggcatcattggttcttgatccttcaattgatgacagctacatggatacatccatgttcccagcaatcaccacgtgtcatgagtatgtcttcaagatctgaaagaagactccaagctctcgcaactcaaaaattcccggaagcttaagggtaaatattacccgtgtttctaagtgggtgacatgtggcataaaaagggagatataatctcatgatctcactaattaaatcccctcaagtaaaccaagtcacagagaagtttcttagatccgagaatctggcaagaccgatagatatcatcttactttatgttagtctccgagacacggaagacgtagtaccactcttggacttggattagcccaagctcaaagtctgcctaaatgctatctggacagacattcaaagggtctgtcaccgatgttgactgcccaaaaggttctcagacgtctaccttggatataaacctgaatcacccatcggcgattatgctttttttaacacaagatcaggtcttgtcccctgtgccaggacatggtagtgcgtgcacctcatacacctttttgccaaatagttattcctggcattttcttttcaaggttaaaccttttgctgacacgtgcccaatacgtacagtggtcccttattgtccagctgcttcaatgcacgagcacaaatcctttcaaggggcccaccagtcagctctttctgcatgtattttaccccatttgtgggccttttgcagaaatcctaggcgggtcatgggcatgcctgtgctcgccctacaacctataaatacccttatatttccatacgaaaaggggatcacaacttacatagccaaggctctgctaaaattactctaagatttcttcttcttcaagagaaacacagagtacaaagttaaagtttcttgcataaacactgtaaaaacatcaaatatgtcgtttgaggctaatagactgactcgtggactaaggttcattaacgcctgaactacgtaaaaatctttatcttctttattgttgttatttattatttcttaagatcttaaatatttagtttccaaaaaatctcagtaaacattactgtagaattccatatcccatacgggccaataagatccaacactcttgccacatcatacataggatgcaagtttgggagaaaagaaggtggtcttagcaactaagg

SEQ ID NO: 237144 - DNA, 729 bp, Cannabis indica
atttttatgatgatttattttttaatttttcataaaatatgagatatttaatatacaataaaattattaatctcacaattacatttacttaaaaaaatttcttattattttttttgttttgaaatattttaggaacatttaagataatattataaaacaaataattaaatattgtgcaaattaattatttaaataacaaactcaaataaaaaaaaataaaaaaaaaaactaactaaaatctctctttctcccaccaagaaaatgatgtgtatatatgtgcatcatttataaaagattatatgtgtaacatcatatcaatattagtaattaatttttttttggggatgtgatcaatatatacttagaaaaaaatactctcataatgctaacttcttaatagaattctaagtgaaaacagtgagtgataataactttgaatttagcactacaggaaaaggactttttaccggcgcagttcgtcaaatgcgccggtaaaagttgtcgaggtaaagcaaaaactgaaatcccatttgcatttatgctttatttttgccggtgcaacaatgaataatgcgccggtaaaagtgatgaaatgaagcgccaacaggcgcgaaaagtttgtcgcctttcatttcatttattgtggcgcttatatacttttaccggcgcatatatgcgccggtaaaagtcccaaaaaaaaaagagagaaacttcccgcgtggatttcct

SEQ ID NO: 237145 - DNA, 1399 bp, Cannabis indica
acaagtttcaggattatggattccatggatagtaatctcttcagtatgttttagaaaatgaatgttctaatttctcattcacaactcttatgaatcttgaaaaataaaaaaaaaaactttacaaataaataaagtgaagagagtatagtgagcggggtatcttattgggagatgtgtacgaagtttggaacacatactgagttagtggcgacaaatgtgtcgtacgtgttttaatttaaatggtggcctgctttttaatttttcattggctacccttcttgaatcttgactatgctgctattggatacaaatattacacctatacttatcaaaaaaaaattattagtggtgcctaatatttttaaacatgtagcgatattttttaaaaattattatattaaagataaatactaaaaggtaccagtagtgcaaaacaccctcctacgtgtcaatatcactattgatataatttagtatcggatcccatatagtttaatataataatttttagggagtatcgctagcaaatcgtaaggcgacacgtcttaagggtgttaaaaactatgggtgcctaatagcaatgctctatattaaaatatgtgagacaagatatttaattagactaatagcgatatcgacacataaaatggtactaagatatcttttagcatttctcttatcaaaatacacacattatcttaaaaatttattttttttttattttctcttttatttacataaaatttataatcttttttttaaaaaaaaaaaaaaaaactaaaaaaaacttaactctaaaatttacctaccatgatttcacattatattgaatttataattttttaggtaaaaaataattttttttttttgaaaaaatattatatgatgattatttatattttcatataaaattaatcttaaaaatatatggcaagaccagccgttggagatgctttacagccttacacggccatttgtaattgtataatatttgattttgaaattcacacgtgattaagctttatatattttaactcacacttgcacttaatataattttaatcatattttttattgcagtttaatgtatgttgagtacaaagctgaattaaattataaataaaaaaaaaaaaaaaaaaaaaaaaaaaaaaaaaaaaactagaaaaaggtggctaccaaattcatcaacggtggttatctacagtggccagtttggccaccagcttccacagtgtaagtaagcacaattgttaggtagcttatattattgtataaaagtagtctaattatcattctcttctaattctattttattttggaactctttaatttcatttctttctattttgcatggcttatacatatgattaatgagtcatgctgctctaattataattca

SEQ ID NO: 237146 - DNA, 1080 bp, Cannabis indica
ctccttaaatgaaaataaatatcctttacataatctggatctcatacttaaaatatttagaaacataataccaaacattcaatacaaaagttgtcgcctagcgaccattcaaaatacaacatgttgtcccaaagatcgtatgctccaagtctaaccgccccaacatgtacaatcttcatccgcttccactcactgttgttcaacatagctttgcccttacctacacatacatacaataattgtgagtcgacaaactcagtaaaaaaagtataatcataacatagatataaaccggattacaattaggcacccatacatcaaaccataacccttccccgcgtcttacacagtactgagtcaagaacgttcatacaacaatactattgaccataatatcaacctatactcggtactctagtcgtaccgatgtgataatgtcaaatagtacttaagccaacatacattcatcgctatccagtatagctctatgtatactgatattgctattctaatgtaatctaacaggtaatcataaacatgtatgctaaatatgtattcacatatacatattattatactaatcttacttcaatttcaaattcaggtgtgtcggtcaacttgagtagaattgctgctcgacgatttataggcccctaagttattcgtaaaaactagtgagtgacacgctaaatcacttttcagggacttaaaatcaaaactaaaagtttccctatcgatggataatatgacaataccctaaatattgtaaaaataggaaaatctagagtgccctaaattgccccaactggtagaccggtttcccaactggaaagccagttttgtggggtctgcttgggaatggaccaaaattttgattcctacaggtccatacagaatcggtcgactggttcagtgcagaaatcccaaaaactttttaagcaaaccaaatcgatcccaaatgaattcaaaccttccagaccacctatttaaaccacaacaagttaattaaagcagtaaaacctaataacacccatcgaaacacaaatcaccattgaacagcaaagtttgagctctaaaact

SEQ ID NO: 237147 - DNA, 2112 bp, Cannabis indica
ctatcttcccggttaacttttggatgtctgttatggttcggggttgtcctgtcgcctgaaaggcttcgatttgatccgggttcacttctacccctcgtcgagttactagatggcctaagaacttcccagatccgacagcaaaggcgcacttggctgggttgagtttcatcgagtgggcgaggaggatttgaaaacattctcgcagatggtcaacatggtcggcgccatctttggattttactaacatgtcgtcaatgtaggcttctatagtcagtcctaactgttgggcaaacattttgttcaccattcgctggtacgttgccccgacgtttttgagtccgaaaggcatcactttgtaacagtatgtccccctctcaccaatgaatgatgttttatctcgatcaggagggtgcatcattatttgattatatcctgagaaggcgtccatgaagctcattagttcgtgtcccgcggtggcgtcgattatcatgtcgatgtgtggcagtgggaaactgtcctttggacaagctttgtttaaatcagtaaaatctatacacactctccacttttgggaactaccacgaggttggcgagccaagttggatattgtacctcctcaatggtgtcgttttctagcgatttttgcgacttcatcatttactgccttgtttcgatcttcccccatttttcttctcttctgcttaaccgggatgtaattcgggtttacattcaatctgtgagtaattacggccggatctatcccaggcatgtccgagtgttcccacgcaaatacttggaaatattcttttaataatcctacgatttgattcttccggtctccggtaagtcccatgccgatataggttgtttttgttgggtccgtcgggtgtatgggtacttcctgcaactcctctaccgcgggtgactgttctttcgccggggtcgaggagttaactaattgctataacttgtttttactcctcaaggatgaggtgtaacactcgcgggcccctaattggtcccctcgaatctctcttacctcacccttacaggggaacttgattacttgatggtaggatgacgcaaccgccttcattgcatggatccatggtctgccaaggatggcgttgtaggccgacgggcagtccacaattagaaactttactgatttgttgactccgttcgcgtagacgggtagttggacgaaacttcgagcgacagcgctttcccccaagaaccctactagtgtgacctaagtgtcctgggcttttaaatcctcgatttccatttctttcaaaactccggcaaataaaatgttggctgagcttccagtgtcgacgagcatgcttttcattcgaacatgggctacgtccagaagagcgtcatcgtgggggtgttgcaatttggaggcttccccttggttgaatgataagtgtacgtcgaggccatcgctgtcgattaccgccatcgcccttacagactggacccgacgggcgtgtgccattgaagctcgtactgaattcctgcttaggtctgaccctcccaagatcacactcacggttttcttaatgtacggtggaggagattgatcttggcctttgccacttccccgctggatgtggagcgtggcatccgaagcgaggcagtcctggaagaatccttctttcaccagacggttgcactcgtaagttgcgtgaccatgttctccatgaaaggcgcaataccgccctttgtccctcttaccggggtcagtggtcattctcgggggccacttcgtttccttcaatccccgcagtcgtcttatcaactcagttaaagtaatggtcatccatggtagctcctcttctccccgttgagcgtgtggctgccccggctcgcccatactcaccataactgcccctcgggtgtttctttcgttggctgagcggttgtcagtcctattatgaggccgtgcagctggtgtccggttttttggttcgaagaggaaagtatctcccaacgacgaggtttcgcgcgacacctcctcactgtgtcgtttttcttctacttccaaggccatgtatcctcttgccatggttagggcccttgtgagggacaggccaggttccacta

SEQ ID NO: 237148 - DNA, 1297 bp, Cannabis indica
aatgcaccttacgaaatggaaaaagtcacttgggccttccatatcctccaaaattagagaaatacaatacaaccttaagcaggtgcaaaattgtgcttatcctactgattctcagcttcaacgtggacgtcaattggaactcaagcttgataatcttctttacaaggaggaagaatattggaagcaacgatctcgtgtacaatggcttagactgggagataaaaatacgagatattttcaccattttgcttcctcaagacgagcaaaaaacaaaatcacatcccttttatgccctgacggatctctagtcactgacactgaagctcttgtgaggacgattgaacattattttgaacaactttttaccagccaaaatcctgagtaagagatcattaaccgtgtcctttctggattcactaatcacctctctgaacccgaatttaattctctcagtgtctcgtatactgactctaaaatcaagagagcaactttccaactttccagtgacaaagcccctggatctgatggctacagcggttccttcttccaaaaaaattggcatattgttgggaatgatgttctagaggctgccaaaggatttttaaatggggatgcaaacattgaggccattaaccacacggttattgtgcttattcccaaacactctcaccctcaactagtgactgattatcgccccattagcctctattcgactctatacaaaatcatttctagagtccttgtcaaccgtttaaagcctatccttagtcgcattatctcccctgctcaaagtgcatttcttcctgatcgattaagtcggacaacattatcatcgggcaagaatttttcatgctttatcccatcggacaactgggcgaaatggttggatggccatcaaattggatatggctaaagcctttgatcgcgttgaatggagcttcattaaccagatcatgaccgaattcaacttccctactcgattcatcaatcttgtgatggcctgcatttcaacggtttctttctcattttctattaatcagcaggttctgggcagtgtcactccatctagaggcatttgtcaaggtgatcctctttccccctatctctttcttctctgctcggaaggcctttcctccctcatctcccagaagactctaaccaataaccctcacaacaatggacttggtctcaagattgctcatactgccccaattatatcccatcttttctttgcggacgacagtctcctcttcagtccagcctcgtctagctctgccaacattatcaaggaattatt

SEQ ID NO: 237149 - DNA, 1913 bp, Cannabis indica
ttttttatgatcgtatacattgtagttatttaaaccgtagacgattctcatgcttcaattttatgcgtttcggatctgaaatgtcattttccaaatcttaaatttcaaagttttactttccctattttaaatttcattttcctccttttaaaatataatccccccaaaaaatcatatctcatttttaaaaataattagggtgcgtttggaaagccacaatgtaattggatttgtgtgtaattggaagtaattacacaatttggcatgtttgtctgaccatataattacaatgtaattgtgtaattggaagtaattgaggggtttcaattacactctccaattctcatgaccccctatgagaattgaatgtaattacactgtaattatcaccttatatccaaacacaccttgcattttataatatatgtaattattaaactgaataattaccactctaataattaccttacttagtaattacacaattacttccaaacgcacccttagtaaattttatttcatttcccggttctctttcttttgcaaccatgaaccacgctgtccttctcctctactctctcactttatccctttcctctgctctctcatgataacataaaggtaaacacaacattctattatttattatttaaatttctattaaccacgatttagtttgttgatattgatctgtgtgtgtgttcgaaataaatctgaaacttgcaatattaaagatcgtcaaatgaaaagcaatccaaaacttgtaaaaaaaaaaatttaacgagaatgaagacaaacacaacaacagtgaaaaaggatgaaacttataaggattttcgagcggatgtaatatatgcgaaaaatttaaaggtgattaacgacgataatttttttttagacaatctactatagcgacagtttaaaactattagctatactataagctatggttttttaaacgtaacctataatatcgactataactgacagttttagaccgttacaaattcttttacgacgacatttttcttctgtcacttattttacttaatattcacaacgcttgtacaagtaacagttttatagaccctcaaaaatttcttacccgacagtataaaaatgtcgggaattcagaatttttttagtagtggagtgagataaatttgcttgacaccctcaaacccgaaaattgttagtcacaaatcaaagtcctttcctttcttgatatcaatgtacaaactcaccctaacacgtacaaggagacttagttaaaaaacaacaaaatatgcaaattaaaaagataattaagaagaaaaaaaacatatattagtcccataataataatattaatcatcatcatcatcatcatcatcatcatcatcatcattggtgggtttccaagtcactattttttgttcccccaacacattgttgaacaagttgtttaagtcctttcttagtatgagatttcttcttctccttcattttcctagccttattagttcctcctccatctgcaaacacaactaaataattacacaaataattaatattattcatatatataatatttaattagcactactaatcttgtattaattaattaattaattagaatatatataccttaaggactcgatcttctacacggtgaagcctctcaatgagatttcctttaacctcagcttccaacaccacatgattgatcggacggcagtgcttctctaagcttcttggagaaacatcatcgatggatgacacgtgtccttcacttgttaaggtcccacttgattgagtggattcatatgagctttttgatggtgatgaacatgatttgttacttcctttattaatttcctccaactctctcaactgtaattaacaacatatacacacacatcactatacatata

SEQ ID NO: 237150 - DNA, 1178 bp, Cannabis indica
gatgttcgagaagatgaacaatagaacaatcaagcacctcgtcgaggagtacctcgaagacctcagggatttacgaaacacgggaatgaaaacaatgacatgccagaatcttctcgtaggaacgagaacataaggcagcccaaaactagggaacaggagatccctcgtaataacgagagaaatcctgggttacaacctaggacaagtggattacttccgagacacccccatcatccttctcgaactgatagggaggaggcatatacataccccagcgagggcgtgtatctaaccttacacgaaggagaaggcatgtgcaaggcaaggcaagttctagctcaggacattcaagatcctgagaacacagtcgatcagaaaggcatacgcgaggaggagatagacctcgccgtaataatgatcaagagagtaggagtaatacgaggagctgtcaatctgagagttactcggatacaaggtctttgagcaaccatgaacgaacacagctagatctccgtgaacatttgaatcaaagacaacctgatttacacgagtaaggattttaaaattcttgagcgaactacagaattataattgacttggattaccaatcaattgaaactaaatttagtgaggaaatcagattctataccttttttatattgtcttcttttatttttatgagaaatttacacctagtaactaaaaacttttcttatatataaatttagtgtgacacacttttttttttcttttttatgtttattttttgtttcatttatacggtctcaaaagtaaataaaacaattaaacaaaagtaagaaatgaaaggacgtgtaggtggtatcactgtcatgtgaaagtgattgagaagaacattttaagaaaagaattaatgagaaagtataagagtaattatgaaaaattaaaagataacatgatttatgtttaattaagaaaatgttatattttatttaactttgactaataaaataattatttatttttcactactttttaatttcttaaaaatatatttcttttaagtgatgtacaatttttatttttagagttattatcaaaaattttatttgttgttatttagttattcaataaaaaaatgagtacattttttattttttgcacgtacaatatacttttgagttagtgagcaattgttt

SEQ ID NO: 237151 - DNA, 1069 bp, Cannabis indica
tgtccaaaacaaacattgggaattaaatgtggcttttatgtacttaggtacattaatgacattgtgaaagctctaaattcattcgttcttatagaagaaaaggtaattaagttataattagttaatttatgtatatcggtaaataggatactatacttataaataagtgatacataaaactaattacactttaattttacagtttggaatgaaggacacatacgatgtggagacgatgttgctaccactccaacatcaatggttattgaaattgacacgatacttgtactagttagctttagacttttaattttaggcaatacttattttgtgtacggtttttattagaaaggacttagtatattttgtaatgtatactttaactttgttataatataattagattaatgtcttttgtacttaattttgttatataattaaaataatttttaattcaaagaaaatgtttatttttataattagtttacaattgtttgaaaaaataataatatataattaatcattaaataaaaaattaatatatatttaaaatatttaaaaaaataaccaaagacgttcagcatatgtaaaaaccgaagagaaaagttactcttttatcttcggtttttatataataaccgaagacgtaggccccacttacgtcttcagtatttttaaacatatgtcatcgcctcaaatgacttcggtagcgaattttaataaaaaccgaagacaaattggcctaaaagctgaagacaaatcccctttttctagttgtgctaatacattaaatatttttcttcataattaggttattatttagtatttttgaagtagatcaaagcaaatttatactgaaaattagttgatctgaataaattggtgtaaattgaaaaaattatgatacatttaaggtcatttactgattattatcataatagttacttatgcgttatttactgattattatcatagaatagttatttatgcgttattttcatgtattaaaattaggggtgggcatccgatccaatccaaccttttttttctcatccgatccaatctaatt

SEQ ID NO: 237152 - DNA, 604 bp, Cannabis indica
ttctcagagaactatagtacaagagtcttttttttccttctctacagaatggaaatgtttatggaaggtggatcaacctcgaaacctccaatgttggagggggctaactacccatactggaagactaagatgcgtgcattcttgagagctattgatgaaagagtctggatgtccatagaggaaggatggtttagacctacaatgatggagaatgaaatggttattccgaaacccatgagccagtggatctctgacgaaatggaaagggctaactttaactcaaaggccttacatgcactgtttaatgctgtctccacaaaccagctaaaggtcattgctaactgagaaattacaaaggaagcatgggagaagctgaaaataaaaaatgagggaacaaatgctgtaaagaagtcaaggctgcgtgctttggctaaggcacttgagaatctgaccatggaggaagatgagacagtgcctgaaatttatgcaaagttgtgcgatatctccaatgagtcctatgccttgggaaaaacctactcaaattcaaaactggttcgaaaagtacttggagttctcccaataagattcatgtctaaagtgacct

SEQ ID NO: 237153 - DNA, 854 bp, Cannabis indica
ccaacgccaaggttgacattccaactgtggtatcagttttctggtccgtctaagtgcaaatggctcaaacattgtattgacctcgctattggccaaaaacactcagtcttgaaagcaagaagaaatcattgacattgaatagtataatcaatactaagcaaaactaagaaacgatatgttataaaggttctaccctattattttggtaatagcttactcccctttctgttgtatttaacttatgactagagaagcaaatatggttttgttatccacattttcacctgaatagtgttaggctgtttttaatattaactttagtatatttttaatttagttgtactcgtgtttggagcaattttacgcttattatcttttatttttgcatatttaaaatagaagattagaaaaatatcaagggaaaaagatgaaaaaaaaagaagataaaagacgcataaaatatcactgtaaaaaaattgagatcctacctagaaaaaaaaagattgtacgcgttgaacatgtgggcatggaacacacgggccgcagcccaagaatgggcatgttgcggccatcatattggaaatcagtaccccacgtgtgaaaaatgcacacgggtcgcggccaccccaattccaaagcagaaaaagattttttctctacgtgggcttagtgtggcttcctaattcaaagctgaataggattttcagcatgtgctttattctatctttttagtccctcattgatatataaggagtgaacttcaattgatttcgggaaccaattacccttacacccttagaatgatggctcttatacatgagtatgtcactctggctgcttcatggactgatgac

SEQ ID NO: 237154 - DNA, 1016 bp, Cannabis indica
acaactactacagttaccaggtggttgacaattttcttttacagggcatttcttttttattgtacttggtgtgagattacgatcgatacaaacatttctctttaccaaagtcacaaacaagggagtagattcatctgccttcttcacaagcatagacaaaaataaccttacacgcttatcatttctaattttaggacgatacattaagtcgttcatgtacttgtaattcacttctaatttcaagtaatattgtactttgtcaatagtgagttcttcgtataaaagatcaatcaaacatgagtagcttacgttcatatcaatctcaaatgtcaaatttctggctcgatcataaacccaatctctactctcaagctctcaaataccattatacataacgagcgcaaaaacagttgaacctgtcacaaacattaacaaaatactactaaaaatttaaaagaaaaatctaacagaagagtgatacaaaatccttaaatgacttaaatttgtcaagcatcgagccccatcgagcacatcacccatgacctaaagtcctagctgataatcaggctaacatcggatacaacatcgaaacaatcaaaccagataatcggatccatatgatatcgaaaaacaatcgtctatcgggtcatatcatgccatcatctctaacttagaatccaacactatatcagactaccatcgggccgactattgggtcaatcgggccatcatccctatccttggaacccagcactatatcgaactatcatcaggccctatcgaactagatgagaaaaaatgcaaaaaaaaaaaaaatgcaatatttagacaacaattattttaacacacaaacagtaaaataacagaaacaactcacagatcaagtatcaaaacaacattctaaactaaatataacaaccaccacaagattaaacaaagaaaaattattgcccattaaattcgtgtatgatgcttcgtccaaagatgagtgatataatgtaatataacttatagtg

SEQ ID NO: 237155 - DNA, 1492 bp, Cannabis indica
cgttacaaaagaactcacatgaccgaaggccaaatggaagacccaataggagcctgcgtcactcgaccatctcaggagttggaactggtctttttgagacagttgtcgaaaacaaaggcaaaattaaagtcagtaaaccaagagtaaaagacatggaatagtttaaccaagtcttaagtaaaattactcacgtattatgcaaaaggtggttgtaccgattggggaaagaccagtcgtctagaagaattcgtgtatgggtccagccctgatatgtttgaggctccaagcgcctatcccggtcgagccacttgtactggcctcgccactagttcccttaggtacttcgcaagtaagtcgtacttgtggataacaactgaactcgccagcaactaccaatctaacccgaaagtctcgctcatactcaatactgcaagtcctcagggtattatctacataatcttcgatggctcgcacctttgactctattagctcagccttgaaggtgacattagggtcctagggagtctttgatttacatggcttggaagacataatttcaaagtccaggtcacttggttcaaaagcaatcttacattgggtaaaaacaaaggcttggccaaaggaatagaagacaaactgggaggttcaggccaagcaatgtctcgcaagaaacagcgtctgccttctaaaatttcttgcaagaagcgcttgtggcgactagcaatatcttcttggtggtttttcactaagtgttccctacttttaaaatcatttatctctaatttggatttgggttctaaaattctgggtttgtataggatggcaagttcagtcggacactctctttctaaatattctagacgataaacttctgaaccagattgggacattgctgcaaggagaaagcaatcccaattcctggatgaaatttatcaaaccagtagttagttaattggagaaactcgaaaacctacgttctgcctaaaccctaacatttacccagatacaattcaaccctaaaattgctaatatcaaatgaggcaacaaaggtgctaactaataaattagtgatcaaacctagaaatgtagaattaaaagcatgtaagaaatcaaagagagaagtcgcttactgtttaaagcttggttttggggcgatgaacggtcctacaatcgatgggacagcaaacgacatgaagacccctctgaatgcttgaagttgaaagttaaatcagaagaaatttgcaggaaaaatgccaacgacaaagatggcatgcaaggtttcaggctaatgtgggtatgggtttttttttactgaaaagctcgaaaaatctctagaatttttgaaatagagtttttgaaatggcaaggtattgaaaagatggtctttttcgtttatactcttggattaatctccgtcaaattaagaaacacttgatccaagtggcaaaatttaaaaaggaagtaggaaagaatggtattaaatgttgatgtg

SEQ ID NO: 237156 - DNA, 552 bp, Cannabis indica
atttcataataactgactccataggccccttacagagtaggatatttcatactctctttagcgtcacctgaaacagtgttagtcataaattttctcaaaaccgacgccatatgcccaaacaaagtgcctctaaagcttttttgtagtagtgtggatccattagcgaagtcaagccttccagatgttggacagcggactcatctagacaaggtacaccttcggcacagtgtgtctccggatggcattgaacaaatctttcggatgtgtaattaatgggcatccagatatctagctctatatcacatcaatttattactaaatcccttaatatcagggctttattaccaagatcatctccaagattcgtgttttccgaataaggaaataaaataattatcaatcaagcattaatgtgtctttattatccacaaaagtaggattcagtttgacacctatcaacatgatgtggtttccacatcagtagaagatcaaagtctcacagactgggcctctctttctctctctcacaataaagatcgttggagcacctct

SEQ ID NO: 237157 - DNA, 824 bp, Cannabis indica
gtcttaatgaagttgttgttgtcagatgaagatagcagcgatgagaagatatgtgtcattcctatagtgggaatgggtgggatcgggaaaactaccctcgctcaaactcttttcaacgatgaacaagtcatgaagaagtttgaatctagagcttgggtgtatgtttcagataaatttgattccacggctatgacaaaaactctccttcaagaattagcgccgagtgatgctagtagtgacatgaatttgaatttacttcaagttaatttgtcaaataagttaatgggaaagaagtttttgattgtcttagacgatgtttgggaggatgattatgttcagtggacggaagtgatgaagcctttcaacagtgggacaagaggaagcaaaataatagtaacaacaagaaatgaaaaagttgcagatatcattcgaactattgatacacaccgacttagagaattatcagaagatgagtgttgggcactatttgtgaagcacacttccagtggcaactctggaaagtttactgagaacccaaacttagaaatgatcggtagagaaatttccaagaaatgtaatggtttacctttagctgctaaagttctaggaggcaccttgagatcaacgttggatgtatggagatgggaacaaatagcaaggaataatatttgggagttgacacatgaaaggagtgagggccttccgctgctttagaagtgagctactactatcttcctctacacttgaaagggtgttttgctttttgttcaatattcccaaaaggctatcaatttcaaagagaagagttggtcttattatggatg

SEQ ID NO: 237158 - DNA, 739 bp, Cannabis indica
gttaatacatgaattgatagtttgtatatccttgtatcacttaatactacacagtcaccgagttacgaataaactctattaattcaacatttaatgagttattctattttatatttaaaaaatataactatcattatatatgttgattcatattccttaaattggcacgtttcattttctgaaatacaaccgaatttcaggtataacagaaaatttacaggacaaaattacttattattctaaatatatataactgtggtgaatccacaattcacctcattcaagaacacacaacaaagaacacaataacacaaaccagaaactgaaattgcagtccaaaaccagcaataaaattcgaactaatatgaacagtaaacaatcaacaatagaaactatgaacagataaatggcacctttcttttacgaggttcgaacatagatcaatgcaatctatgcctacattctcgggaaacaatcaacatacttctttattgattaatcagagatgattacaagtgatttgatctcaacagaaaggatcaattacagaaggagtctagctcctgatcctcccaatcactcagtctcaattctctctctctctgatcttgtgtctctctctatgtgtgtccttaaaattgtattgatttagtgtttatatagttgcagtacatgaagagaactttccctcctaaaccaactaacaaaactaacatttgaacttgtccaatccgagagt

SEQ ID NO: 237159 - DNA, 1803 bp, Cannabis indica
  modified_base (1087)..(1087): a, c, t, g, unknown or other
gctcgtggacttcgtccttgaatgacttgtagatttactgcttcccgtactttctcggtcatcagcgcgacgagcactctctcttcctcgagttgatcgactatgggtccttgagcgccccgaaatcacacttgcttcttcatgccctgttcttccctttgagcgtggtttgtcgtatttcccgcactggggtttgtacgagccctctctctatgggttcaggaagaacgttggtgattcctcaccagtgacctacattccctgggttatgttccaaggtcttcctcatttccacgaggaatttcccgttcattagtttctggcggccttccattctcatttctatgagagggttccagctgatcatttggtttttcagggggaacctcattctccccaggttgttctttcggggcattttcctgtcacctggtttgtgagccacgaggtctgcctcgtggtcttctcactcttggggcaggttgattttgagtgttattcccatgtgttgccctagctacggctgcattatgctctaattcagcgttcttccagtttgcctcctccaggcggcgcctaagacgacgattttccatttcataagtaccctcacccatgggctgagcacctccatgactgggccctttatctctcattctgggattttgaccattcccatgctgagtcctcctcgaacgtttcgttcgtatactgggaccaacctcgggttgggtcctcctggaacgagtgctctgagtgttggggccaccctcaggttgggttctcctggaatgagtggtccgtttagaatgtgagttggtaggccttctggagcccatgggctcctttccaggacggtgatgagtttcttcatgtggtgcattaacgttctctaggttgtcaaccatgaaggagattgttttttatatgtaaggagggtttttttactgagcttttacatgaaggctctcaatgaaaagcaccaaactgttaacgctgagtttcgttaaccatatatgaaccttaaaaagtgataaacttgcacagaaaaataaaaacagtaaagaaaaaagtatgaaacacaaanatattttttacgtggttttgtagttaaaattcaacatagtccacgagtcaatcttattagatttctggtagtgtttctagggccttttctcttatgcatttttcgtccccttttcagtctaacttgcttcttataattacatagtcaagccagttaattacagagttgactgtaatctttacaacaattatcccctgaaatcgtggagtttgattacatatcacgtaatataaatgcggttaatatttgaataacacacagctgtgattagtccgattttactgggtcaaaataatcgtgtattaaacacgttataaatcataatattctggggtgtctcgataggaactcagtgccaatgacctagatagtaagctggagcttttcccatatctttccgaggttgataatgtaaatcttgtcacttctacagttcttgatgacgaggtgaacttcaacatccaatatcatttgaatgttagcttttatctaagagaattgacttgactgaactgtgaatctcattgaaagatacctggagttgactagtgaaggtaccgtgagcatgccttcctatggcgagatggatacctcgctattagttgtatatgtttatacgattatcttaccgtgtattatacattaagtgtctcattagtcgttatatttcgtccacgtaatgaggttagttcatcgtcttgtacacctgaaattac

SEQ ID NO: 237160 - DNA, 608 bp, Cannabis indica
ttatttttatgtatttttatgtaaatgtaggtgtaattttgggtatatatgtatctaaatatgtatatatatatatatctaactctaatttttatcattttttattttaaatctatttatatatgtgtaaatatgtgtatatatgtatataaatatgtgtatttattatgtatatataaatatatgtgtgtgaatatttatatatgtatatctatgtatatacgtgtatgtataaaaatatgtatgtgtatatatatatatttattatgtatatctgtaaatatatatatatgagtgtgtgaatatatgtatatacatgtatatgttatgtaagtgtatatgtgtgagaatatatgtatatgtatagtatgtgtatatgttaatattttaatttgattttatattttgttaaattagtctttgtgtttaccgtcctgaattactactaccctctagaatatgttttgcgttgttcttgtacttcaagggttagtatttttttttccatatcagaaattttatagtttataatattaattaatatgtttatgcatgttataatgaaattttaaaaacttaaatattcatccatactgaagtaggttttg

SEQ ID NO: 237161 - DNA, 1452 bp, Cannabis indica
tttcccttgtttttagcttatttggacaactaaccacaagaaaaaactatgccgaggtatgttcaatctactccacacaatcgctgcccactgctttctttcaccttcagttttaaataaattgtaggcctttgatatttggaagcatggccctgtcattagctgctggaagtcagccgagttcttcaacttctccttggctgccactatctttttccagtaccaattggcctaaagtggagcttgatagctccaccaattctcttcttttaaatacacattgtacactcatttaatccacatattgtcttctttgttcactatcgcccaaatgtattttgtcattgctgccaaattccattcttccacctttctaaacccaattcctcctgctgtctttgattggcaaacctattcccaagctaccaaaccagccccttgtgatgtactttgacccttccatagaaaagccctacagatggcctctatcttctttattattttcttaggcaaaatcatgatttggctccaatatgagtgaatagctaatagaactgaattgattaaaacaactctaccaacatatgagaggttccttgagctccaaactcttattctagcagtcatcttttccaccaatatttcaaactccttgcttgagatcctcttagcacaaataggcatgctaaggtacttgaatggagcttcttgcttacaaaagcctaaaatgtccaccactcgttgaatttccctttcttccatgccacagcaatagacagcttttttagaagggctaggctccaacccagaggagcaagagaacaatttcaaagctttcaataggcagtagatgcttatgaaatctccatggcaaaataagatcacatcatctgcaaaacagaggtggttaagtttaagatctttacatcgctcaaagtatttgaactcctccttttcccctgcttttcccaatattcgagataagtattccatgccaagtacaaaaagcataggcgaaataggatctccttgccttaatcccctgctagcctcaaagtagccatgcatagtcccattaaacatcagggagtatctaggagtccgtacacatttcatgatcaactttataaacttgtagggaaacctaaaggcatgcaagatttcctccaagtattcccaatccagtgtatcataagctttctaaatgtcaagtttgatcacacatcctggtttggtagctttcctcccaaaatgtctgactaaatcctggcagagcattatgttatgagcaatgaacctcccagtaacaaagcccccttgattctgagcaataagatcatgcaatatctttttgagtcttgtacaaatcatctttgttgctactttgtaaatgacattgcagcaagcaataggtctataatcactcaccgtgtttggacacttcatcttggg

SEQ ID NO: 237162 - DNA, 1188 bp, Cannabis indica
ttggtttgcacttcgaagtagtggatgtgagagagtggatcttccttcatagtgtattggtgtcaagaaggattcttgaactttgcaggaatgggaagggctttgatttgttcggagagtggtgagcactgttctctgttgtactcaaatttagacaacttaggttatgtgatcccctacactaaagcagctaagatgtcaaattctacctgattgaccccgtgaatggtggtttgcaccccagatggagcttttgcaacccggatagggtcttctctagaagttcctacgtccatcgttcttcttttgatcaagaggtcacgcaggtttgtttgtcttccaggtcggtcatgcactctagttgacctgggtcttgtagttgtctcctgaccacgtggtcgtgaaggcaacttcagtgaggcctccaaaatgaattcaaaatcgtctcgggaagatccattgtgagagtgttcattcggagcattgtagtggctactcccctcaaaatagtcttcagtaggatcacaggtgcaaagacaattgaattggtactcaagttcaattcttctccatgtacttgagggaaatactcgtaccgttggccatttgggccacgggcaaagtaacggtacaactcccctctttcatctcaaaagtacttccgagtatgaagcagctcattggtccatactcaccggattttgtagccactagtttcgaagtagcttttcctacttcttctttcaggttgagtagtaggtccctttccccttgttaggtcttgaggcacggtctcttgataacattgaggaggacttggtggaggagtcctgttggttctctcattatggcaaggtcattcaacatccatggagaacccattggttggtgctctcgagcttgagtcctttcaagctcttgattaaaagtacttttcctctaagcggtatccactcatggtgtttgcctagtgcttgctcggttagcatgtgtagttgtgatgttctgagcattcagggtttttccttggacactagttcacacatgaccaactagttgaaagggtatctctcttactaactccgaaatatacctttgggaatcagtttcgtgattaaagcgataagcctctctaatccgttgagacaggttagctatccgttgttcttgcttaatgcattggctttc

SEQ ID NO: 237163 - DNA, 881 bp, Cannabis indica
accttatgtagtatgttgtccattacaaccttgtagggaagctctttctttgataattttcctaatctttttcaataaataggtgtcttctaattcttgtttcaatgactctcagtaataaaaattgggtttagtagctaagcccatatgatgaattgtattgtataccaggttactttataaatcataatagacatactaagttacttcttttcttaaatcaagacatcaattttttttatgaataaggatcattgcattgctcaatcaccaattacatacaccaattacaactcatacaattgatttcttacatattcctcatgctacttctattttgtatatctttccataaaccattagctatctatatctttagccttttaagtcattacatggtaaattctatattataaatcttccgtaattttctgtacagtatgccgaatacacaactgcttttgattccaaagagcatcatttcgaaccctccaaaagtgatatgccagggctgcaagtgcagcatgaagtatgctcgttcgagttgtagacatcttcgatttataagtccatttagcaagttgcaacaggttgcttgtctttgattttcgttccagccattctttaattccttgtatacacatgctgctgtaaggacaattaaaaaagagacgttctaaggtttcaaatccattgctgaataataaacaagttttatccactattggattaaacttttgtatttgctcttttgttttaagtttctgcagcaatatcagccatataatcacctcctgcttttgtatagttggtctgttccaaactattttactccaattcacatccacatgcttggtaaacaataaatcaatactagtttt

SEQ ID NO: 237164 - DNA, 1049 bp, Cannabis indica
gtaggtacctgactattaaatattaagtcattatccacctgtcattttttattgctatatttaaattaatttttttaaaaaaaaataaaaatttgatgactttgaccaatcaagaatcgtcacgtagcaatttacttaacactttacagcgagatacctacaaaagtttcagaattataacttagatattattaccgcaaaaaattaaacgtaagtatttatttgcaactattaaacttaagtatctatgccacaaattactctatttccaaacattactaaatataatgataaattaatcatatataaataatataggataatgctttagtaaaggtattaaaaatgactttatgtagagtcatttttttaaatatgtgtcattattttatttcatgtgtccattaaatattatttccttattttttttactgaataattatttgttaaaaacactattattccctttaaacaaaaaataaaaaataaaaactatcattcacttctctcttcttctcctctctctttttctctaaaagttcttaaaagttgtttatcaaagaacctaaactataataaaaactaagaggttgtttggcttcataacttaaaagttgtttttttttttttaaataaaaaacaaaatttaaaaacaaaaaggggtggttggcaaaagtttttaaaaacaaattttaaaattgagttttaaaaaataaaaacagaaaatatcaaaatattattttttaattttctaaaaacaattttttgtgtctaacatattaaattttatatttttgctcacatattcggatcatagacccggaaccataccgaacccggacccgaatactgtgcaagaaatggtaaatctatctgtaatgagccatgagtacaagggctttgcggtggattgtacatgttcaggccatactagaccaaatgggttgagtttaccagtagatatattttgtattctcaaattttgccgcttaggccggcgtgtaaaataacttgttatatttcgcgaaaagttttatgggatcccaaaa

SEQ ID NO: 237165 - DNA, 589 bp, Cannabis indica
atgtgactaatcttgttccagtactcattcccacgagagtacttttccttcaccagaggacaagaccatatctccaaagaggtgagggaggttggaaacccttcttctgacaatgtctccaactcagggcaccaaccgatttcaagtgtttccaaggaggtgagttgtgtaagcccatttttgtgcagccctctaagttttgaaaatccccagatttgaagatgggtaatagtggtaggcagtagcccttccttaggggaatgattccatatcttcttcattaccaataataccaagagtggtaagatggggtaatgtttgccaattccatttcatcctcaaaagttgatcatacgatatatcaagtctagaaactaacaggcagaccaccttcagggaaactcttcatcaacggacaacctctgattgtcaaggacttcaaagctgagagggaactcatcatctctgtcaaccacttcaatttagggcaattagaaatctccaactcactcagcttgggagcaataagtccaccactcgggaaagatataaaactaccacaattacaaatagataaagatgttagttc

SEQ ID NO: 237166 - DNA, 1209 bp, Cannabis indica
tcacagttctgatatatggtggaactaaaatcttttccttgactgcctcttggaccaaacctcttcaccacgttgttctggctttgaaatttggtgatctgagtaagtgaaaacatcataaatccattagaagcactgttgtcataatttcttctccttggtttctgaggtacagtgatactttccacttcttcattcagttcttcttctccattccagtacatatgttctctgctataatgactcctggacaaattgtttggcttcctgaatgatggagcttcataaatatcgttgtcaatatcttcttctagcaacaaaatagcatggactttccaagccgctgcagctaatgtctggttttgtggttgcaacagcagcagcagcagcagcattcaggtctttgggataacatctacggtttcttgacaaagatgtaaaatcccatatctgagttgtaaaatggtttggtctattatcagaattcataaatcaactagaagttttcctatgttgctttatttgctggtgaacatgattagatctttgcttatttgatgagtcttgaccatagtaactaaggcattgattatcttctatggtttgattttcatgaaacaccagtctcctccttgttcttcttttactagagacactgctacttctctcaaaatctcttaagcttgaattaacctttttgttccccaattgatcagagtctttaagagaactctccttgaatttgaacagcctttggtcctgagaatcttcatcttttggagttgaggactgaaactcttcaatgtcatccatataaactaacatttcatcatcaacttttggcaagctttctgaagaagatgctgtaacacttcttctctcctttttcgtctccgaaagatttcctttcccttgttgagaatctcctccaccagaagtatcttctttctctgcctgagactctgaaatggctggcaacacctgttctgaagtaacagcagaagcatatttactgagatcttgccaaggctttgaatgaattggtaaatcaacaaattccactttttcaagcattgaactattcaattctgatctttcctcagatatgccatgataagaagttggaacatctgccatcaatgcttggtcttcactactttttatcttcatctattgatttaaggagcaaaagacatgaaattttagttt

SEQ ID NO: 237167 - DNA, 2537 bp, Cannabis indica
catcaataatttatttgccgaggtgcttacaaaaattctaacttgcttgaaatatttgaaggagaatttgtcaaagaagagaaacttaaaggaatatgaaattttagcacttactgaggagtgaaacatcattttatataagaaactactttccaagcttaaatctcttcgtagtttcgctattctttgctcagtttgagacactgttatgaccaaggcttggtgtgatttagaggagagtgtgactttaatgctcctatttatttttcagaagctaaaactaggagaagcttgctccacaactgtctccttaaaaatgatggatcgctctgttaagaatccttgtggaatgattgaagatgtcttggtaaatttatcttccctgttgatttctttattctagacatggaggaaaatgttgaggattattttaccatgatctagatttactactatatatgttgtttaacatcctaaacatgattttctaaaacattgaaatttaaacacatataaagttcaagaaaccttacattggttgcagcggagccaccaacaacagcttgatgggtttgaaaggaagggcgcttaacccctgcagtcgaggccaaacccttgcctcgcacagaaggatctgattggcctgtaagagcaccagcttccagctccatagtattgctactaagagctagacctccacagcttggggcaggggtattgatttgagtgggaaaggcttccgtcatggactcagtgcaagcaaggtttgttctatgagcaaccgaaatagaatcagtggagtacgagctgaaagtagaagggtttgaggaagaaccaatacctgacctactaaaaggtggaatcatcccaccagcattggggttaagaggtgtagggatcatgacagcaaaagattggtgggaaggggtaaaatggaaactagaagtaacctgttagtaaggaacgaaggaaatctaacggttggccccagagaacccttagcaggaatattaaggtcaacaggaggactatcaagcaaagttattgcaggtcggtgtgggtattggaaaggcacactcttgtcaaagattatctccttacccctcaataaaatggttaaaggacagagaggtttagagagagtttcatcgcatttctacaagaaagcatggcaatacctcttagtgtgatcaagtcaaccacaatagaagcaaaaatcaggaagccgttaatatttaaaatcgagccacttgataaactccatccccattttgataaagtgaatattcataccccttctaataagcagatttacatctaagaggatcctaagcctcaaataaagtcgtgatccctccctaattgtatccctgtcaacttcaatgagatccccaattttagaggcaataaacctagctaactcatgggatttgcacataaaaggaatgtcgtacacttgtaaccagaaagggacataatgaagattatcaggggtgatagggaaagagctttcaggagcaacaaagatagtaatgctttgagcaaagtgccaaggttggccttctagacggctacccttatccccttcacacccaaatgtaaccataaacaaaccatcagcattttcagagacacagacagaaaacctacactgcgatgatcggatacctgagagggttttcatgagggaaggcctattaaagggtttgacagtgtgaagtttgagaagcaaactaataagggctggagaatcatttgagggattagcatcataggtaaatatagtattttcatcagtagaaaggacaagggagcttgagacactactcagaaattcttccatattaatgaaagacagaacaaacagcaaagaaaacaaaggaaaagaacaagtaagagatgagaaaatagtgatataccttaatattgctttatagaggtagaaccaataaccccataggatgactctcgaagatcccttaatcataaccctaaacttagccggagtagccccaatgatgaaaaaaatttgatgagcttcaagagatccttcttccgcctccatcttacgacttccaaggggaaaagagaaggtgaagggatggtttttattgcaaagatttgaagaagtggaagagaaatgacatgttgggttaattagaagaaggaatcgaaatgcaataaatgcacggagtaagacaaaggagattggaaagagaaggagtataatactcagagcaattaatgctctcatttattaaaggaaagcttcgattagacataaaatcaaagagaaaaccaccacagaaacaatctgggtggaccaaaacccctattatagggaccaaactcacaccaagagaagagcaggtttgcatacttactagagggttccaaagagaaaaaagctagttattaaattaagatattgtgatatcactacgtgaagaaagagatgggtttttacctaagaaggtgatattggggacatatacatttttttagagtattggtatttgatatatatcgacattaag

SEQ ID NO: 237168 - DNA, 4034 bp, Cannabis indica
taacataaaacaagaagagcgaagcacgtgcattgtgcacgtactagaatcacctagtatagaaaaaatgtaaacaatatatcatatgaaaaaataatcgtgttgtttgaagattttagagttatgaatatttaagttttgaaaaaaaaaatatggtttcaaagatttcaaagtgatgtgatatcctactttaaaaaaaaaaaagacatagaaaaattgactaataataatatatgattttagaaaaaacgtgtaatgatagatttgaagtttataccttttttttaaaaaaaaataaaataacaaaattaaagaaaattttattattattattattattataaagttgtgaaatattatgaaaataactatgtgtggtgaagtattatgaaaactatatgttattattattattattattattattattattataataaagtaatgaaatatttattgaatttttttttgtaaagttcaaacgcagaaaataacactgttctttattgaaagaaaaactacatatctcagattgaggaaaatcatcctatccttgttgtgaataatttaaaaaatagtattgaagaagttttagaattaactataaatggttgttcgaattcaaaaatatgtgttcatgagattaaaaatgggtaaattccatacaaaaaatggttgttcagattcaaaaatgtgttcatgtgggattagagggtaaattctcatatgaacccaatgagattcttgcacttagtgatgaaaagatgataagaacgaactcattatctatgagtgtggcagttcatgcacgtgccatttttcttatcgcaacaaagttagtcagcatagcataaattataaactataagtaactgagaaaaaggaatggggcttgacatctttaaacaacaatagctttcatatgtgaatatgttgtctaattttcatatgctttcatatgtgaatatgttggctaactctaaaccgtaaattttcatatgaacccaatgggattcttgcatttagtgatgatgaagatgataagaaagaacccttatttattcaaaaaatagtattgaagaagtttcaaaaccaactatttaaaacaaaagatggttgttcagattcaaaaatgtgttcatgtgggattaaaaatgaggataaattcccatatgaacccaatgagattcttgatgatgaagatgataagaaagaaccattatctatgagtgtggcaattcatgcaagtgaccttcttcttgccacaacaaagtcagtcattatagcataaattataggctagaagttttcaaaactgaaaaaagggatggggttgacatctttaaacaacaatattcccaaaggagctttcgtatgcaaatatgttggctaactcttccatgcaagtcaacttgagaggactcttcgggggtgttgcgatgactactttgtcccaatcgagcgttcattcactatagatgcggcaatctttgagaacgtggcacaattcatcaacaatcgatgccacaaaccaaatctacatttagtaatggttgtatacaaacatgaggataaatcgattccacctcatgtaatgttttttgcaaccaaacatatcatgttccatcaagagctaacatacaagtacagagatggtcgcaataatggtcatgatgcgaaacagaagcatatttgctattgtaaatctagagagtgcaaggacaaatcatatcaaccaaagtcaatccaaattgattagacatttttttctatttgaattgaatgagaaaaagtaaccaattgttatgcttgaattaactttttcttttttgatcacaaatgctacattattttctatactcattgaatgtggatataatagtgaaggttaatacaatcaatctgtatctttgcgaaacttgaagagctatgataaattgtatcaaaacaacaatataattctaataaagaacaggaaaatgcaatttctgtcgagccaattggcaccatccatatctatatattacaaaataatcatggaagaaaatgaggcactgaaacagaataatataaagaaataacctttattctatggacatccactgtcgcacaagatcattgatccaaaagagtgttttgttcttatcttccttgtggatttactagttgagaaaatacagcacttgtggcagtatcttctgcatcattgtcagtcaccgagatcaatcatactcacactgttatcaaatggctctatgggggtcaattggatgactgagatgtggtttgtgttgttatcatcaggctccatgagtgcaaatgaagtctcctccagttgaagagcatattcaagattccataacaccacccatagacggcttgtcaacaccgtactcagctgtctcgccaaacttgttaagagaagccatgtttaccttcccagccaaatttgggttcatgatatgatctagcattcctttctttgccatgccattgcccattctgctatcccggggaagaactgggtttagagcaggtctagtggagagaacctccattagtaccaccccaaatgaatacacatctaatttctctgtaagttgctaccttctgaagtattcaggatcaaggtaaccaaagctacccttcacagctgtacttacacgggtctgatcaagggaaggacctgtttttgacaggccaaaataagcaactttggcaacaaaattctcatccaagaggatgtttcttgtcttcatatctcagtgaatgatgctttgagcaaccccagtgtgaagataatggagcccccttttagctccaatacaaatttcgagaggtctgtttgtcatgtattcgtatacaagaatcatttccgacctttcatcacaatatccaataagagatacaaggtgatgatggcaaagcttggatagcatttcaatctcaaatctgaactcagcaagactgttcagatatgggcttccctctttaaactgctaagtgttaccttgtaagccctaccaaaaccaccaaccccaagtagtagtgtctcatcaaacttgttggcaacatctaggatctattggaacataaaagtacgaccgagattggatgaagccaacgagatgcagctagccgtcccacttttttgcgaagttgtggacatttttgtcatggtctgagagttaccatacaagggcagaagaagccatggatgtccttgattaggagtagtctttggcttgcgtgaggccaagcagcaataacaaagaccgattaatgccacagaagccaaacacccccaaagtagatattagacttggcccgattggaagatctagaatatatttcctttgagagaccacaatttcttgtttatttcctgccacttccatacccaaaaaatatttcataggttgaatatccttcactttgaattcctgggctagcacacttttaagattttcttgctctctaatgtcattgcatgttattatcatgttattatcatgtcatcaacataaacaatgaggatagtcaccttaccctctagtgagtatctaagaaacaaagtgtgatccgattgagcttgttagtatccatgccctttttataacctgattaaatctttcaaactatgcccacggagactgctttaaaccatagagagactttttcatgtgagacacattctcttttccatacctatcatcaaatctaggaggaattcacataaaagttcttcccccaaatatccaatagtgtaatgcccccgcttcaagcctcctttggacattctcccacgaactcatagctcatatacacaggtacgttactctagttgcttcttagactaacgaccgaccctgcaaacaatacgagtattttcagcatgctttgtcctcaatcgcacgcttaatgggaaaattttcaaggaggtcatccatccaaagatttctccaagtcaagcacgattgaatttggagttctcaagtgatgggctaccaaaaacaagatacaccttgttgata

SEQ ID NO: 237169 - DNA, 875 bp, Cannabis indica
aatttattcataaatttcgagaactacttattacataggcccatgatctccacactatcttggataatattgccttgtagactcaattaattggtttattaatatcaattagaattctaaagaagattatatcttatttataaattttactaagaaatggcaaatttgagaagaaaagtaaagagagtttatttgttagttaagatattttgtgggtgtaattaataaatatattttttaattgtaaatttccctaaataaatggaaaaaatccaaacccttaggcccatgaggatttcagccgaaggagaggattttaggatcattatcctttccccaaagcccattatattctaaccctaaacttagagagtataaaaagagcctaaagactttgattcagtgaacagtttttttggccaaaaatctagaaaaactaaatcagaaaaagctttctttttcctttataattttcgagttctctttctctctccctttcactctcaaatttcaagttttgtagtattgagtaattgtccacacaattcaagacaatacttagatatgtgtggaagagtgtgtagaagaaactgttcattatattaaggaaagttatctagattcttattactatgtgacagaaaggaacaagggttagagtactaaatagaatgagtcacattatattttgctgccattaatgtaaatgaacctaaaatttgaggtgtttatttattattttaggaacttcatattttaggatattagattatatattgtataatcaacatacatgactagtaaattaagatacttgtaaatcaagtttcaacaactggccttagagtcatcgtagcaatttactttcatgttat

SEQ ID NO: 237170 - DNA, 1236 bp, Cannabis indica
gatgagaagttgggcggtgatggaagtgtaggagtgacgaaggtggatgggaatgttaatcacggccctatgatcatggaggggatcgtgggtcaatcttctaatggccataatcgtggaaaagatatggggtgtaatgataatgaggcaattgggggattggatattaatagtcaaagtgatgagttggctcatgatgtattagttattactgatactaaaaggaaaagaattgatattgagttgaatggtcttggtggtccacgtgttggccaattgggcttaactaataattcttttaccacttcagaattcggcccaagtggggaattagttggtgttgtggatgaagttgttaacaaagacactagtaatgctaatggtgttaatgggccaaaaaacttgaacaagatgggtgctggtttccaagcccaccaaggattatgagctttataagttggaattgccatgggcttgggaaaccatgggctttgcaattcttaaaggatattgttatccaaaagagacccaattttgtctttttgtgtgaaactattagcaaaaaagataaattagaaagagtgagattgttgctgggttttgatggtgtcattgttgttgaacctcaaggtaaaagtgggggattggcttttctgtggaaaaatgaagacgaagctcgcctcttggggctttctcagtcccatatcgatatggaaatcaccatggaaggaaaggaaaaatggcattttagcagtatttatggtgaaccaaaccgtggccaacgtagacgtacttaggatcaaatgagaagcttggctttggattcggttttgccgtggtgcattatgggtgacatgaataatgttctttctcaggaagacaagagaggtggcaataattatccggattggttactacggggatttcaacaagcagttaatgattgtgaacttcaggatctcgagctcattgggcatccttttacttgggagaaagggcgtggtactgatcaatggattgaggttagattggatcgtgctctttgtactaaaaattggttagaactttttcctcttgataaactgtataatttagagctttccacttccgatcattgtcccatttttcttgatctagtggataacattcctcttgttatgaaaaagaaattttgctttgagaattgttggctaagggaacctcttgtcatcaagtaattaaagagtgctggaattt

SEQ ID NO: 237171 - DNA, 595 bp, Cannabis indica
agcttatttttgtaacttccttgggattaattttgacaatgatagcttcagaattaagactaaagtgtgacacacgacttgatagatcatcaaattagcttcaaaatgaaatttgaactgcatcaatcagattaaaattgagtgagttatgactattttactgaaggtagttcatgacccaacgcccaggttgacatcccataggttgacatataacatcaacctagatgttgggtaagtgtaaaaacatccaaggaatgtcctttaagatgcctaagtgatattttgacatcacttagtctatttatgtattttggcgaagctggtcaccggttttaagagatgttactgttttgcaaaaatgagagactcgaaacttttatttatgggtgagctagaaatgagaaatgcaaagttttgaattgttttatcagacttcatggattattttcattgtgaaaaaatagacagacggttgaaacgacattagattttgataagtagaacccagcgcaccaggtcttttatcaacctgggcattgggaacatactctcgagctctagggattttgtttttaatacttccaaggcttct

SEQ ID NO: 237172 - DNA, 736 bp, Cannabis indica
gcctcactcactaaacgaacagctgctctacccaactttaacactactgtaatagggtaactaagccaacgtgaataactttcaatttatcacttcaatttcatatcatcacacacatttgacacaatcatagaatgtagtgttttacagttgaaaaagttaagcatctgtactcaatttcaagtttctttgaaacgggaatgaaagagactacctgcgtgaaagcgagaaacagtgggatgctcaagtacaaagtcgcagaggtccacactcccaaatatataagctcctttcttgtatctgaatcaaaaatcaaaattcagctatgcaccattaatgaacaacagaaaagtccaattcttccacgaatgaaaagaaaaggacttacacatggacttgatttgtcatagaaccttcctttaagtataaattgtggtcgggaggttcactccaagagggaatcgtgtacggaatgacatgttgatgggactcattgcaactctgcttgccaccgagttcaccagcttttgcaactaatgctactgtacatttagttcaaactaagtctatgagctattttacaaaagttttaaatgctactgtacatttagttcaaactattgttattgtatttcttacacaagtttcatcatattctgctctcataaaactcttttctaaggataatatagtataccatgcattagaatccagagagcaagggttatattagcag

SEQ ID NO: 237173 - DNA, 1671 bp, Cannabis indica
tcggtataaatagtataaactagcacatacttatcgtgattcttttgtttcttcttgtccttggacgaccccttagagtcgtctttcctctttgagccggaggcccctgagttatcaactctagttgagagagtgcttcttgaaacattgctgggtttgcttcccgagccagtttttaacaagtttatctcttttcgagcttcctcctttcaaacaaacacctgagccctctcattgaactcattgatattcttcactggaagaccctataagtcatcccataattcgcccccaatggtggatagatcggtagtgatccttgtctgaagggccgtaagttgtgtactaccatccaaatatcatgaatactcatttttcccagggatttaaaaactctctcaatgaaagcaccaaactgttaacgcagatttttgttaactagatttgagcctatatggtgataaacttgtgcagaaaaattaaaacagtaaagaaaaagtaagaacatgaaggttttttacgttttgtagttaaaaatttgcgtagtccacgagtcaatcttattagatttctaatacagttctagggccttttctcttatgaatttttagtcctctttttagagtaacatgcctctatttataattacatagttaggcagctaattaattacatagttgactgatatcttcacaacaattaccccctgaaattgtggggtttgattacataccacgtaaaataaatgcggttaatatttgaaaatcacacagctgtgataggtccgcttttaccgggtcaaggtaaccgtgtattaaacatgctgtaaatcataacgtttggggatgcctcgatgggaacacgctatcaataaccttgatagcgagctagagattttcccacatcttctccgaggttaataatgttagccttgtcacttctgtgagcttggcgacaaggtgaacttcaacagccaacgtcatttgaatgtcaacttctgtccgagagaactgactcattgatactatgaatctcatttatagatgtctgaagttgattataccagaagtgtgcttaatttcctatagcgagatggacgtctcactatccgtcacttaggttcttctagttgttgtacttagttagtataatgtgtattatacgctaagtgtcttaacaatcatcatatctcgccttcgtctcttcatgcgtaatgaggttgatgcctcgccttacacatccaatggcatgtgacttcgattctcgttaacgtatgagacaacaatttatatatctttatctcgcgtaagatgttatagtcagcaagttataaatatactctattatttcctcattaatgagttattccattttcaaatgtaattaccgttacactcattgattcatattcttcccaatttgacaggtgtcttcctttgaaatgatccaaatttcgagtataataatttccccttaaaaagttctttttaataaaaagtgctttttaaattatcacagagggtacatttgtcattatcccttcttcaagatcacgcatgtccttgattttgatggcttcttagtttcgagggtcattattagcattaataacctgccctttccacttcttcactcccagctgttagatctcccatctcttgatcttcctgt

SEQ ID NO: 237174 - DNA, 1149 bp, Cannabis indica
agggggtcaaacctctataaattgccgtgccaattttattattttcttttacactttacacgtggtgattattagtaataaataaggctccgttgtgaattgaccaaatccaaggtcaacttagtggttcagtcagatcacagtctgcttagtccactgttgcaagggttttctatcttatttatttcatgttggataactcatttatatacaaagaaagtgttctttgattacacagagattgacttaattatcaattcgtttttacattgaacatcaaataaatgaagaacaatttcggcccaattcactaactacagcaatgtatgcaatctttgtagtgcgagttgtctgttcatattcccacataaggtcgtaggctcaagatgtgtacaagaataatcgagtctaacatgcatgcataagatatctacatcctgttcgagtcacatatacggatatcttgtaaaaggtcgataacttaggacatgcgagtccttatccggttatcgagcacgtttggtcatccggaccagctcactgagtaagaattgatctttactaactcgcaggaagatctttatagttctcgcatatatcccggtatatgcgagtcttaaatccgatcttcaatcctgcatcatgcgaggcataataatgtgactagactctgtcagggtcacatcatcccgttgagtctggttcaggcgaggtttacactcaagagatctcctttgtgacatctcagccctcctcgaggagagtgagtctacatgtcacatatatgggagcctggtctcaagtttctaggtgaaaaattcacactataacattttcaaaattttaaatacctacatttaaaaaaaaatttaaatgcatatcgatttttttctaaaaaaaataattattaaaataaaataaaatatattttgaaaattattctaattcaagttgatatgaaattaaaaaatttctaaattaaatataattttctatttaataaaatgtataaaaatagaaacaaatgattaagtatcttgaataaaattaaattaattattaattctagttgaatatctaagaaaaatattctaattaaagttggtctaaaatttttaaaattaattttcaacgttaatatatttttct

SEQ ID NO: 237175 - DNA, 684 bp, Cannabis indica
caattagagattccataaacaaagatgaatcagaaagagaaaacaagaaacggaggaataatgcgaaaatactctgatcagaggaataaatagaaggtgaaaaccagcagtggggtgtgatagagtggggaaagtggaacgaatgtgggggaagagaagggaagttatcggagatcatggcagaaatgggcgaggacgacggaagagcaggggggaaaaacggttgaaaactgctaactgcaacagagcaaaaaaaccccactcgggcacaaatatctttatataataataataacttcttacttaattagttatttgctgctttttatttgggttggcagatcttaattggttttattatatattataaaaccatgctgttaagaatccttatatgattataaatttaaatgtttataagtttttgagcttataacaggttatttaatttaatttattagaagattgcaaattttaatttttttagtcaaattttaaatattaacaaatattttttttcccgaacagttgaattatttaacaaatattttatattgtctcttaggtttttcttcttaaattcttagccggttgtctttttctctgactagacgagtggttctccttaggcttaggcgtggcttggctcggatatgtgattttgttaatgtaattaatttttct

SEQ ID NO: 237176 - DNA, 632 bp, Cannabis indica
ggacagagacctggacccgaacccaaaccgggacctgaactaaaacaaagacttaggacccaaacctgaacctggacctaggaaccggacttggatggggggacctagaccagggacttaggccccaaaaccaagacccaaatctaaatccagtactcgaaccccaaccaggacctgacctggacccaggaatccgaagtcggacctagacccgaacccaaaacatgccccggacaaaaaacaggttaggaatatggacacaaacccatacaatgattaaacccgaacctggacccgaaccaaaaatcaaactcgaacccgggacacgaactcagacccagacccagaataagacccaaacctagatctgcacccggacccgcactcgcacgaagagtgggatcgaaacccaagacttagacgcggaacaaaacccatcagatcaagatcaaaactttgggactcggacaaaaacttggacccagaccaaggaccctaacccacacccggagctcgatccgaacctagaacaagatttggacccgaacccaaactcggaccaagactcaaaccccaatccaaactcgaacaccaactcaaactcgaactcggaatcgcaattggaactggaa

SEQ ID NO: 237177 - DNA, 708 bp, Cannabis indica
cgcaaaaattgtacttgaaagaggtagtagaagggaaagtgtgtgtgctggtgcaatctcccgtacagtgccccaaaatgatgaatatttcaatcacctttaccgaggatgatgccaaaaatgtgcgattaccccataacaatcctttagtgattgatgcataaatttccaacaacgagtttccacggttcttatggttaatgggagctctgtgaacatccaattcaaattggcattccaagcgatatggcttaccgagacagacttaacccttcccccattcaattgcaaggcttcaatggagataccctcattttgatggggaaggtctagttacctatcaccctcaaaggagaaaataatgcaagccctttcaagcactcaacttttatggtaacagactgtccaaccgcatataatgcaatactagggcagccaactctagtgggttttggggcaatgacttctattaggcatttatacatgatgttcccgtgtgataatggatgtattggcacaaacaaaggtgatatgaagagtgcgagtaattgctacaacctctaaacacgagccatgtacatgatcccggaagagacacttacgtctcccagaacgacaaatctaatggacattaaggctgtctgggaggattttcaagacaaagtggatcccatggtttggaatgaaagaaacctagaaccaatggag

SEQ ID NO: 237178 - DNA, 1800 bp, Cannabis indica
aaaatacccttagtacccttttatggcattttagtgtgagagggcaaaaaggtcattttgcccatatgtgatttgtctttagtgatggttacttaagttaataagctgatttatttcctatgttttaagctgagattattatggtaaaactaggttttaattcatttattcaaaaattgaaatttggaaaaaatcgagagagaggctttttctctcaaactctctctttctctctttcggcctagagcagctagggtgtgggggtttttttgtgattttcaagctggttttagcaaggaattagtgatctcaatttcttggtaagcttcttgtaacttcctttttgatttcttgagttgtaaggaagagaatagttttgcatgcttgaagtttgtttgatgtggttgctgttgttggttgttgttgtattcagaggtttaattatgttttattatgttgatttatgcttgatttagaggttgttatgttgtttaagccagctttggagttttgaactcaagcttggctcattaatggcaagttttgattctgtgtttgggtgaatgttttattgccttgaaaatgttctctagggtgtatagaacaggtctggaaagtttgaattggattggggttgatttggtcgagttatgaaatttttagtcattcctgcactgaacgggaatttcggtttagagaggcatgtaggaaccgaaattccggttggcttccaagaatttttcccagaatcgggatttcggttggggaaccagtctaccagttggggaaattttgggaacccgagtttttcccatttttgtgttatttagggtattgccatgttattcatcgatagggaaacatttagtttcaagtttaagtccccgggaagtgatttagcgtatcgcttgtctgtgttgtgagtgatgtgatttagagcctgtaattcgccgagcaaattgttccactcaggttgatcggcacacctgaattcagaatcgaggtaagattagtataacagtatgcatatgtatttacatgtttagcgtgaatgttagtaagcctgttagattacattagatatgtatgttggctttcgtgctagttgacagtatcacatctgtacgactagagtttgactagcgtaccgagcataggttgatacagtatcacatcggtacggctagattatgactagcgtaccaagtataggctgatattatggtcaaaagtaccgtcgtacgaacgttctagactcagcaccgtatgggacacggggattagggttatggtcaggggtatgggcgtctgatcataatccgggatatatgtatgttatatgatttatgcttttcttactgagtctgtcgactcacaatgctatgtttatgtgtaggtaagggcaaggctaaagttgaggaaccgtgaggacgagcagatgaagattgtacatgtcggggtggttaggcctagagtgtacgatcctcgggacatcagggcttttgttgttagtcgttgggcgacaaatattttgtaaattaatagcaaacttttgtaaagtattttgtaaacgggatcccgaaatattttgtatgtaatactacaagtttttaattaaataacaagattttaactaatcacgatttttattaaccttgaagattagcaacgagttgcacagtatgtttaaaatcacgttaacacgcctatgctagttagggtgttacaatttggtatcagagccgcaaagttatcttccgaagatcttcacgacatgtacaatcatcatcagcagttagc

SEQ ID NO: 237179 - DNA, 2538 bp, Cannabis indica
atttcataatttgcactgcaaacggacactattaaggatgaaggttatagacctacctcgaagtttctactggtgctaaccttttgaggaaagtctagacatctttaagttttttactaacctattgagggctcctacgctattctggaaataattttaaaaaagaagcttaaacagaattttgatatattcgctgttatattggaaatgatagtttccactgtatatttatctgctttggctgttgaattatttatctaactgcaatgatttgacatgatatacagaagttgttgagctattgaaaatagtctagatccagtttctcttgtgcagggaaataaatagaatgtttcttaattccaatttatacttggtatctgtctttccaaagttgtcacttgtagaccatatcatcatattaggaaacttgacgtagtagtgtatctagtgtattatttggtatatcatatacatataggtatagaattattatgtactaattattaccttgtagatctgtaggtatcgccttattgaagatgaatttaattctccattattgtcagaattacagaagtatataacagatgaagattacaggtgaattttacttgttaagcttttgtcacgtaatgttctgtcacagtgccttgtactccaatgatagattttaaactataggattattgagatgatagtgattttgttgtttttgagttgtctttggtaggaattgaattatagatatttaaatgttttacaagatggtagcttggtaggagtaatatggctaaacttctttattatgatcttctgtaccagccgtgctgattttgtttgatattttgacgagcttatttctaacgtgtacctcagtttaccctcaatccaaatgggagaaaggaaaaagaattataacaaaagaatgcagccgaacaattatcttgcttgtaactgtctgtttcctgtttatacctctggcagtgttgcagtaggattctacattctgcttagagctgttgataggtttgctgccaattataacagttttcctggacagtttgatgggtaatggtcaacgcctgtgaactctttttctccttacaaattaatgttatagctcatgacatatgctttgcatgctcaaagtggtaattttcctgcagtgccatggatgaggacatatctcgattgaagactactgctgttggcttacttggtgacttgggtgtcaatggatcaaccttaactgaggaccttattagtgagatatgtcgatatggtgctgcagagctacatgttgttgctgctttcgttggaggaatcgcatcacaagaagtgattaaggttttgttttctagatctcacacttagatttgcatgttcctgagaagggtttttgggttttctcacaatctctcattttgttttgtgggtggggtgctgttcctcaaatacatcattgtaattaatgttttttttccttcactgtcgagacagctcataacaagacagtttgtacccatgtgtggaacttttattttcaatggcatcgatcacaaatctcaactgttgctactttagtggaaacaagctagagcctagaactggtcagttcttaccgtttaatctttgacataataacaatgaagtgctgggaccaatgctgatgttggtgctgtcttttgattttcgcccacagatatcttcaggagacttgagcttttcaaaggcttggattggtggaagttcacagcttttttgccatcttatttgggggctaagtaaagctttcttacctcatgctgttgttgcaggaataagacaataacttgataaattttatcaagatattgaattcttttgtgacttctttattgtgaaagttagggggagagagttctgaggtaggttggacggcttcttaggaacttatttttttttttttataaaaaagtaacatttagaaagtttggtacaccagagaatcaatcaaaaaaagaagaagattttgtgtatcaattttgatggcaggtgttgaatatttttgaacggatttcaacgacatgaaagaggggtagaagtaatcttgttttgaattattactactgcttattttgactcaaaactataccaaaatgacgtttctaattgttcatgatccattgtggtaaacttttggttatcttttattatttaaatatccgttaattgttgagacttgcagataaattatctgttccaatttaacatttttctcttcatttaatttaatctaattaataattaaatttagaaaattattatatctaattagatttcaaaattttattcaattcaattatgactttgatcggttctttaattggatatttaattataaatttaattttttatattaacatcaaatattaaaataaatacataaaaattaaatatcatcttttagttaactctaaaaatataattgttgtgtaatttaattaaaatttgaaataagtaaaataacagtattatcaagtaatacaatagaac

SEQ ID NO: 237180 - DNA, 2098 bp, Cannabis indica
ctgatattatagaaacaaaatacaaaaatagaaataaaacttacacagcgttactatatattactctaatttgaagacttatcgtaaactggtcatatgaaataaaaacaacgtacatcgtcatatcttataatccccttttcatggaaactactaaagatttatcctagtttggccaaaccagatgaccaacattgagttgtcccctcaagaattaaagattttagctgttataaaacttttgtacgaaaaatatttgtagagaattgctatttgtcacattaagatgttcaatacactaacataactaacataacgtcctataatcggtattaatatgctacttttttggtgcttgagagaagatttctcgcatttgtatgatataaactttagtaagatatatatatggtcacctggagaagtagtagaattgggaagagggcaaagaatttggggaatcccaggtgttgaaaaccattgaataggccattgaaatggtgcatcatcatggttcccaaacacagtagcaaatggtattcccctctctcttgttggggaaattgcttgatcccaatacaagcttgcattacttattcctatgttgtttgctgttataacatctcccaagtaaattacaaaatctgcatttacataatcaaacataaataaataaatttactttactatatatcacattcaatctcaaaacagaactggttcgatcaaggaatcaataaccaaaacagaaatgaaattaaagagcacaaacacatacgcggctcaagtgacgaaaccagcctcaagggcccttgcaatctctttattcaaaacttgtttcaaatctgtacaacaatggagtcttgctccatgaatcaactctcaatagtggacaaaatcctctcttaactctaaacctagtccaactgtcataacaggaaaaacttaaaagctgttatttctgttatgtgtcccaaagtagccctttgagtccaaacagcattttaccagttccaacaataagaaactaatcatttacaaggaagagtaactggtatttaaatgagaaaaatacatctttagtcaaagtgaggcgcctctttgtttaagttttagttacaattttatttagagaattgctaaaaacactttcttcggcgtcatatttttattggtataattaagtatcgggtctcatataacttaagaaaataactatctttagtcaaagtacgacaagtctttgtttaagtttcagttacaatttttattgagatctcatttgactattgcttttgacttaatctttggaagctctagtgaaaatgttactaaaattggtttatgttaaaagaacttttagagctgaaaacttaaactaactacttatcaaaacagcagcataagtgtttttggagtttcgataaactaggaaacaacttttaaaaactagatccttatataattgctataaagtataagagcatccctaagggtagtattatctaaaaatataatattttatttatttatctgcaacattatttttaactcttactttttagaatacgtataacactctttaaaaatattataattatgatcctactcgttattatttaacacatattctaatttttagttatttttaacttcaatattttatttaagaaaatagatagcacaaacaaaattctagttggtgctaatatgttattttgaaaatatttcattgaagctcataaatcatcataaccaaaagacataaaagaaaagaagtttgataaaatgacctggggtttcatagtcaagcacattagacatgactctaattgagttctcatcttgtttagggccccaatcgctccacgcgttctcaccaaaatgaagatctgcaaacaaagcaatcttaaacgctgcactccgccgccctaactcttcccatttctcctctttcatccggagactcaccgtccatcctgaccgttgatactggtgactctcgatcttgttagttccgtcatctatttcaacggtgcagattaactgaatgttaagacagagacacgtgtaatgtaataaaattattactattgat

SEQ ID NO: 237181 - DNA, 604 bp, Cannabis indica
aaataaaaattaaccacatacaacataaacaataaatctccataacaaaatacttatgaatagatacttataaggtaagcaatacctgaaaaactaactttccagcttgtcaaccatatttatgactagtagttaatatatacatttggaagcaaattctgaatatatcagtccatgtaatgtaatcaaaacattatgcatataccaacaagacacagatttagggaactcaaacaaaaatcagagaaacatatactgagaacgtgaagattgagtcatgagattcagaatgggaattctacgcaacaaatttcaaaccctaaacgatggtgaacaaacaatataaaatcttagattagatttagaaaaaccattaccctaaaagcaaaataaatgttcaaaaaaataaaaaataatgttaaacttaaagaataccaacagagctgctacactggaggttgggtggttgattggtggtgctgctatgctgcttcctctcccgccgctcgttgttacgtcggaggtactgacctgagcaaagatgatgacgatgatggccgccgcacgcgaggatgatagttggatacgagagagagagagagag

SEQ ID NO: 237182 - DNA, 958 bp, Cannabis indica
attttgggtacaatacatataaaaagaggtatgtttcaaataaatataaaattagaggtaaatttaattaattgataaataaaaaaggtatctttcaacttactccaagtattttagggtattgcccaaggagtagcaacaatatgggcttgtccagtgtggacccaaagcccaaataattagtaagtggagaagagaaataacatgagataattgtgacaccctaaccacaacctggaaacggtgcctataactttatttttattttgaaaaaaccccattggttgaaataaagaagtggagccacttttcattttaataatagatctcacatattatcatttatgttggcaaacaatactcttataaatttcttgtagtacgtacatattagctagacgccaaacgaatatataactttctatatataaacagtatgtacatagttttgcaatgaagaatctcactctcttatatcctataaatacctataaatataaatatagctaaggaagctgattggtatgatgatgagtatgagttggacccttctatcctttcaaaagtaaaagaaaaatgatttatatatatagctagacccgtgagttagtagagagagagagctcgtatctcaacttagctatatattcaaacacatggctagctttattttgaagaatctaaactctgagtgagtaggctatacctattacagatatatatatatatatagatagatatttatatgtttctttcacctttcaggtcatcatgatgagtactcatcatgcatgcatgtataatcccctaaatatgttaataacgtaatattatatattagagttatcaggtgtgcttgtggtggtgactggtcacaccataataaagaggacccttatataaataataatattgaaaattatgtcttcgttttcttttttttttttcaagaaaaaaa

SEQ ID NO: 237183 - DNA, 839 bp, Cannabis indica
aatcaatgtataaacggattgacaatgaatgcaatccttgtgtaaatgatcggacacttgctttgtatataaaggagtgatccaccatgaaatgggccacctacagaatccttgcaacagtggactaagcagaccgtgatctgactgaaccactacgttccctcgtgttctttgtatttctagtttttgtttagtatctgtgttcctagttcgagtactcgccattctaggttgaatagtcgcacttattaatcatattattattatcattattattattattatttgttttggtgttgtaaaattctttcaacaacaataggcaactttcccttttatttttgtttttttattttgtctttgttttaatttaaaaaattctttattttagtttcccttttatttggttgtaagttggctatatcaagtcttgtaaacactttggaaattagattattttaaataaaattttgagaggttttcttcttgagctcttgaaagaactatctgaacttatcaaggagtattccttgtggcattcaactaacttatcaaatagatttccaccatcgtttgtggcatcttccttcgtacgaaggttcatgcttaactaatcattgagtcgtagttccacatcccaaattcgtgagttcttggaggctgccatatttggtatcgggtttcatcacaattgttggtgttattcatatcatttggtatcagagcataagatcatcgtgtttggcctatctttcttttgtgtttttctattcaattcatgctctataatcttgtttaacttgtgatctatatttctgtcaattcgtgtttcatatcct

SEQ ID NO: 237184 - DNA, 1162 bp, Cannabis indica
tcggatccgctaccacaaaagttgtggatactgcaacaccttccgtctccacatggaggattgccgaatggaggaccacattggtgatcgggtctttcatctgcataaaccaatccaaggcataatatattagccaaacatagtgtgatgatgaggctgctcaacgacttcatatctttcttctcgttttgtaagatatgacaagtagcaaagtttgagtagttttgttgtgtgtgtgctttttgaaagagggtttcatggctatttatgggtgaggtagctcaattaattaagctgtctattataatttacacttacataaatattaggtagagaaatgctaggctgcaataatatcggctcttacgtaatcactcatatatttaaatatttatattaatttaattatgttttaatatgtgaaatatactactatataatatttttgaactcatttaattaatattttaataaaaatgttaaaaggtactagtggtgtctagcaccatcctatgtgtcctatataatttaatataagaatttttagagagtatcgctagtcaatcacaatgtaacgtgtcaagtactagacactactggtacctaatagcaatgctcatattttaataatgtggaatctagctttgaactataatatttatttaatttaattatttttgaaatggatatttaatttaaatttaactttaaatatttccacattgatattatctaaattgcattaatgatatattgatatgacacatcctcaccgtaatgacttatatatggtaatgttatactattaaagagcatttcttttgagtatgtttaacacttataggtggcgtctttttattagttatttatattttttaaaaattagtaaaataaattatataagttgatgcttaatagtattgaaattatatttaaaagtgtactaggcactcttaatatttattttataataaagtattattattgtcttataattggttagagatattttataaaaattattatattatattatgtgaaatttgatattgtttttcttatgaaatgtgaatatttaattattctaataataatataagggaaaaaaacagaaaaatacaaaaaaggaaaaaaattacaaaaatactttgagtcggcccat

SEQ ID NO: 237185 - DNA, 2052 bp, Cannabis indica
ataatattttacctaagcggtgtcagctccactttatcatagcttgacctccacatcaaccccggcagggagatcaagttgcatcaaagaatctattgtttgtgcagttgggtaaagaatatcaatgaggcgctggtgagtacgaatttcgaaatggaatcttgcatccttgtgaacgtgaggggattttagaacacagtaaatccgctttttggttggtaagggcactggtccaacagttttcgcatttgaatttcttgcagcatccattatctgcttacaagagtcctctatcaatggcacccaatatgacctcagtttaatcctgattttttgcttcggcgcaacctgtgaaacagacactttagcttacaatccatattttagtttcaaaaacatgcatacatgatgttttaatgttctaaataaccaccttgcttttgttccttattggcttgttcagccattccaaattttcttagatagaaaatcattgatgctaatgtagccacattggcaacaaaactatatcgaagctaccatcatcttgtttgattcaaaacacacaaatcaattgtaatacttaaacctataagtctaacacacagttttttaagtatcccggttcgaaagctacactacatcgaatgtgtataatataatacatagtacaaaactcttatcaaatgaatcaataatgacatagctaacaaatcaagagttgagaagactcctagtaattcatttcaagttaggaacatatttcatatcaacttctgtggttattctctttcaattaacagtaaacaaagaaagaaaaataccttgtcagcatcagcaccaatgctgattgaggaagtactaggaatctcagaacctccaacctgaaaaaaaaaaccaccaataaataatcagaaatcaacatatccaaacaatcacaaattcacaacacttagcttcagagattataactcaagaaatgcacccaatcttgctctttttcataaaccaattcaactcatatatctgttttagcttcagtttataattcaaaaagtgtactcaattttcagaatagattaataaaaccaacccatatatctatcacagaatcattttagcctaaaatatactcattttcacattaatattagaaacatgtacaatttgcatggacaagtaccaaaaccaaaattgaaccaaattactaaaaacccataaaccctaatcagccaacattcaacaaaagaacaaactttcctacattttctcactatccaaacagaacacaacccaattcactgaaaaaaccacaaaacagaataggaaagaaacacaatatacaaacctcaagggtctcggcaccagactcatctaatgtttctggagggggttccaacacttcaggagcagcataaaccctagttgaggactgtgaaggttttacagttctgagcttagcggaggagttagcaaagtgtaaagaaaaaggagaaagctttggtttaaatgaagaagaagaggaagtagagagagaaagagaagggattaaggttgcagatactgaagaaaccgccattgaaatcttggtttcaagctttttagctctgaaatcgaagagagactattctcttctcttcttcctctgctatgatgagctctgtagaattatccatatatttttttatttatttattttatttttctacaaaaataaaaattgtattgggctggaccatggtttgagaagataggcccattgggcctctttttaatgggccaaaaaaagagaaatagtgaagtttttaagaggaaattaaacaaggaaagtatttaaaatcacacttttatttatatttttacggatttttttcttttatattttttttacgaaattatgattttttagagaaaaataatattattttaatattgtcacaacactatactatatttttgtaacatattagaataatctaaaaataatgtaagaaaaaaattagtaaaaatatatatatataataaaaaaaaatagaattctgtacaaaaaat

SEQ ID NO: 237186 - DNA, 1615 bp, Cannabis indica
caactgtaatgtcaactatcaagagactgaagtatacaattaaatctaccaactaattgtgagagaaaagagagagagagaatatcctttcaaattaaaaaaaaaaaaagagagaataacaaatgtgacactattattaatatattatagcaattttttttattggtttttcttgattgacttaatcatattatttaaaattattatcttccctagctatagaattgaatcttataagaaacaggttttaagaaagtagacaagacaactgatcagaagaagtagttatatgttgtagatgccagttaaaatttcggttagattatatgaacttgggatggctttaacaatttagttttattagagcttagagaacagagccagctaagatactaccctaataatattgcttcacaattaaataaggtcccaaaaacattagccacaaatcccaaattatatatgtgtatataaattaatgagtttatattatatataaattataacataatacacatcttattgaattattgtttacactcatctaggtgacattgttaggtagatgccaagcagcaaaaatgttggtgggttacaattagcatatttattatcaattgtaaaaaaatagtgattaattttataatatttaatatgagaatttgttccaagtttttcaccttcttaattactatttataaatgttaatttgaaaagcgaatatgctaatatgatcaactcattttctttagattttgcaataacaaaggtgttgcatttatttgatattatattaaaaagttttcttttacaaaatagattagttgatagcgatttaataaatattaaaaaagaaaagaaaattactttgtactaatccattcctcttatatatatatccttcaacttctcaaataagttagagtactaccgccaaattatatgtctgatttcacttttcaattataataataattgtctgaattagattcttcttaaattttagataatagattttaattagaaattctcaaatcttaatctttcatatatatacgtacatctacgtcaaattgtaaaagagagtagtttttcacgtaaaaaagagagaagtagagaaaaacaatactcaactcgaggagtgctaccgttaacttcctgttacaaccttttagttaatttttacacccgaaaacatatgtcggaatatttttttcaaattttttttctccgggtattcgttatgcttacaacatcatctttgtaaatttttgaaaaatttcgaataatttacagtgccgaaaatatttgaaagtttttgaacacgcgtggtaaattgaaatatcagaaactctgtttttagtactgtaaactattcggaatttttttaaaaatttaaagagatgataatgtaactataacgaataccgccatgaaaaaaaatttgaaaaaaaatatttcagtatgtgatttcagatataaaagttaactaaaaaattataataagaggttggaattagcacactctactcaacaaagtttaaaacaatttttttccacttcatatatatatatatgtatatatatttatataacaaatggaaataatataaag

SEQ ID NO: 237187 - DNA, 834 bp, Cannabis indica
gattttattaaactctaggggtattatttgacctatatgtgaattatgttatttttgcaatttttgctcggcgacaacggaaaatacgatggatggctagtttgatcacatggataagtctagaatcttatttcttagtgggatatatatatatattggagtaaataaaatatcggggttatgatttttgaccatttttcccctaggtgggaaataagctagaaattaacatttagggtattttagtcttttgcttaggttagtggtttggtggctgccctttttggtgacacctagcttgtcaattcagtaaggaaattaatttttccttaatcctttatgcattagacaaaaaaaaaaagaagaaaagtaagaaaaccaaaggaagttcattctctcttccttctctttccctcttcgaaccagctaggaaccaaggaattgctgctggtttgtggtgtttgcaacaaggattcaaggttttgcaagtgagggcatcctttcagcacgagactctccgttcaggtcgaccaattcattttaatctggaaaggaggtaagaattgtatataatgtgtgatatggatatgcgaatgtatgtatatatttagtatatatgcatgcttatatgttgtgattcatacactaccaatacctgtacgattgcggtacagagtgcattggtaaagtgtatgatgtctgaaagtacatcgtggtgttaccagcacttgtacggaaaggtacaaggtgtctgtggtacaacacttaatagtacttgagatgcggtcgataccttacctacactagtacgaaggtatactgagtgcatgtggt

SEQ ID NO: 237188 - DNA, 1090 bp, Cannabis indica
ttttttgtgtaagtattgctttttcttaattaataaaattataagtttctaagaggatctccattgcagtacgtaccaaaatatatgtagcttattttacaaaaagtttactgcaatatagtgttaaaattaagctgttaaatttagcacatactttatcataaaatatatcatgatgtatatatatattttgagccgtattaattactcaattttttatttaattacttaagtatagacatattatgtcaaattaagaaaagattaattatattgctaatacatatttaatgagcataattcattaacttttgcatcaagttttactgtattattagaacatgcaaaagtttgagtcaaccatattatttattgattttttggaccaattaattttatataatctttatatcttccatattagaaatgatgaaaattttatttctgaaggtataggctgtcacttttttatattgtatcatagtaataacttttaataaaatagggcactttataatatgtatattattaatttgagatatttttaaaataataggcggcgtaattttagaaagacatgcaaggatagtgtataacgaatgggcattttcaactattataacattttttaaaaagattttgcttttgaaataaagttattattattgcctatagttattatcatcgattatagttatcactattggggctattagcctttattatataagtagtgtttatatacacatgtggtagaccaacatttaagtcaagggagtgtatcccctaaactttttatttattatgccgcttacagtataaatttcgttaataatattccttaaaatataattttcacaataatataattatttttattatattttatttaattttattataaaacaagtaaaatgattaataacaatcaataaataaatgtaaattaaatatctttcactatcttttattttaatgattagaaaactaaaaataaaataaaaaatcttttattctattataaaaagaatgaatgatgtttaatttgtatttatttatcaattatcatttactattttattcatttaat

SEQ ID NO: 237189 - DNA, 1196 bp, Cannabis indica
aatgaaaaaatccaaaagcactgtacatttgatcaaaatatgattgtttacattgtgaatagaaacgcaagcaaacacaattgtattaagttcgaatgaaaatagtacaaggcatttaagataagaaaaaaccaagttgggttacaaacttatctttacaaaaatgccactaagggcaaatcattaagtcatcttcctaaacaagggatgagatgagaagtcgataaactcgagaaagaccgactacacatagcttggagaaagactggctacatgtagctcgagaaagaccatctacacatagagagccttgatctctgcataaaccccattctcctcttcatcagaagattccatttcctgaagcagagacctctttcccagcctcaggaaactcctctataccagaaagaggctgacgcgaaggtcctctaatgcaggcctcgggttggcgagattctctgatagaaaccatgctaacttctctcttgggcccatctgaaaccatgccaaccttcttcggggattcctcgtcaaccaggggaggatctctaagatcgctcacaagatctatgtctattcttgtaatgacgaagagaaaaggtcaatggggcaacaaaaagcatacaaatttaatgatatgtataaaccgactcaaatcgccattcacaagggatgatactcaccttcaaagatcacttgtgaggatcccccatggcgagttacggggttcccctggtttggatcggtcggaagctcctcagccttggaatccatcgtttccagttccaattgagacttaaagttcttgggaacgaatggaagatggttggtgcatcctggtattatgagtttgggagagtgaacttctgaacttagaagggacattccagcaagagagagatgatccattttgaaaatggatttctcccaaaaagctagaggtttgtgaaatatgacaagcttaagccgcgctgttatacacaaagtccagtgacaagaaagccaaagatttggaaatctaacggttgggagaatggcagaatatgaagaggtgattcataatgaccctctaaactgtgcaaccgttaaaatcaaaggatgcatcttttccaagaagggattctgacgaaaatgccctgtgtaattattaaaaagctctttttactaaaaaaataactttttaaggggcaatt

SEQ ID NO: 237190 - DNA, 699 bp, Cannabis indica
cgcctaagatagttagggtgttacactttatctcttctcagtttccaggccttggacttgattcttcttgtcttcttgattcataatactaaaagatggtgagttggaaacaacttgaagggatccaaacacccatttcggagttcttagagtgaacatgggcgcaaggctagggacccctcctaagacaactgttatgacttgagaatactcaactttaggatgttttcattcttgtcatgtgtaaaaaatttatgtccacgtcactagggtaaatttttgagtaaacatttccccccaaatcaactttgcacttgtgtgaggttgacttgatgacgtgaactaagcctgtttctctcgaaactaccaggtgggcatcaattttagcaatcttagcaatttttttctcttctttaatgacttattgtgggactaggaatttcaaaatccattcctttttgaattggtgaatttgaaatttaaagataacaaggaatgaagagataagagaaaatatagaggagatcaattgctataaatagatactcctccattcactttccccactccttcacatacccaaaaagaaaaaattgagaacctaaaaactttgcttttatcaattcttcaagtcttcttcaaattcaggtaaatttctcaaatttttaatttttttttcttctcctcttgtaaagctta

SEQ ID NO: 237191 - DNA, 1250 bp, Cannabis indica
cgaaatttcacttttcaaatacttagagtacagtctcttcatgcccttttccacctactacatttttttttttttatttcattagcccaacatacatgtatttaacatttgccttatcaataaaatcataacacatttattatgtactacttagtttaagaattgttattctactatactttatttaataacgaaacatacttcataataataacttacacatacacttcaaatacacaagttttgcaagtgcatgctcatgatattataaaagttttcattctcttatgaacatccttacatgccattaagagtaaaatcatttattctcttatgaacatccttacatgtcacttgagaaaacattataccatacaagaatatcaaacaacaaagagtggggtgaaagaccttatgcaaccttctctttaatcattcccattctttcgttgaatgttattacatacaaaaatcttactattttacttaattttacactgtaaagctatagtgtcattctttcagtttcgcagttgtgactcactcatcaatagatacttattccacgacacttgaaaaaacatggaagctctttaaaaggtcttctatatataaatatttaatgatctctttcgaccacctttttgtctaacattcacttcttgatatctattatccatgtattcattgcacctgtcacgccttcccattttcttaggtaaccgttgttagtttcttttgtaatctctttcttgtatcactctcttgtattttctttgccaatctctcgcatggtgcttggtcttctattactcctttcaatcaaattgacttgattatgaggttagctagtttcccacgctaacttttgtctactttggtattgcatcgatatagtggtgaagtttaaatctgtaatgctgacatatatgttcaatgattgcttcctttattatactaaccctctaggtatcacctcacttctctcatatttaaaatacaacatatttttttttttcatccatatttatgcatgtatattgcattcctctccaattcgcaaaaacctatcccatcttcttaattatacctctaaaactttcaaatctcttaaaaatacatcccaatactgattatctacttaagactataccatatatgtattaaaacacagaaagcgcactaatatccctttaaaataagttaaaccttaccatgggttatcgtagctcaactattactttctattg

SEQ ID NO: 237192 - DNA, 604 bp, Cannabis indica
taaaaccaaggtcactgatgacataaaaatggtggccctaatatcaagacttgcaactggatctttactatggggatgccttcaacataaaagagcagatacgttgactgagttcctgataagagctcaaggatttataaaactagaagaagcttatgctcccaacaccttccaccaatgtattaactacaacaacctcgcacatgacaaatctgtccttttaccctccaccaactgcttttactactcccacggtatatggaccaagtactttcgtgcaaccaattgcacaggctagtttttctaggttcggagctgtacaaactggatacagtgccgctcttggacaaacaaactaaaaagcaaaagttctagagtccaatataacccactcacggagtaaaaggagttcgaagggtccaaaccaaagtgattctatgaagaaggggaagagctaagaatcaagatacaacgagtatacaagtctcatagatacttgagaaaatgtgtacggggaaacttgtaacatggttcattacaagaagcctccaccgatgtataaaggcaaaaaacaaagaagagatccaagcaagaggtgcgaata

SEQ ID NO: 237193 - DNA, 1338 bp, Cannabis indica
aataacaatcaattaaaataataattagcaatctaattgagatatctctatgttaaaattacattcaatagaattagaaaaataagtcaaataatcagttgtttaatttctaaatcgtttgacaaaaaaactaaaaataaaataaaataaaaagattgtagcatcataattaactttaagaatacttatattcagttttaccgtttagaatacacaacatattagaaactattgcatcaggttcatttaaccttatagcttgaatactcaagtaagtgtactactaacaaccctttagagatcttgttattctcatccactaaaagtgatttgatggcgagccatcaaagaacaaaaaaaaactaacaacgaaacaaaacaaaataaaaccatatcacaaagacaagactaaaatatttaaaaccatgtcatagagataagactaattgcagtagcaaaagtcgaatcgcaaaagcaaacacaacccccaccaagcctcacctatgcacagggaaggtaggcgggcttggccggagaaaaaagataatctcctgtaattataaatttaggaacgagaaactctaatttttcacttcatggctttaattgtataattctttttaaaaaataacaaaaacataattattttttaattaaaaaaataataaaagtgaattgattttttttttcaaaatttattattttgattgaaaatttttatatacatcttaaatttaataaaactcaataatttattatttttattaaatatttggatatttaaactatttttaggcataaatttaaaatttttgtatttaacttaataatttaaatctaaaattagtaaaaaaaacttattaattttatattattaaataacaagagaactaagcttcaacctaattttcgtaatcttttgatattttaattttttttctactgattgaacgatataatttgtaatataacattttgatatgtgtattataaacaaagtaacaattactttgaaattataaacatagttttctattttcaaaatatttttaaaaaattgtgattttgtgacaatattaaagatagtagaattaacagaaaaattgtaggtgttttataataaaataaaatgaaaaaaataacagtttttacttttaataaactgggcttgtaactaataacatagttttttaacgtaaaaaattgtttagactattatcttaagcaaaaagaaacaaacacaaaaataatttaagtgttatttatgaacgttggaatgtcttctctacaaaggtgaatgtaagatgatgattgtgaaatgactcgcacaatattatc

SEQ ID NO: 237194 - DNA, 1403 bp, Cannabis indica
ttttaataattttttaaaaataccatttatctttatagtaagggccccaaaaatttatttttgcctatgacccatttcaactcagagtcggccttgcatatactcctatcaatgttgagcacataaaaaaattaatcttattgacgtttttcgataggtggcacatgacctctcacagaggcctaaggaacatcagacccatcatctaactcaagaacactaacgtggcaatttttcctaaatgtgaaggtgaattcggacaacatgtctagatcatgtctgacactctgattcctagatacgagagttacacactttgaaagattaatgagacttataagagtcttgaactggacgagaatgccatcaggaggtcatccagaattgggagttggaaaggtgtccaagacagtctatggtatcgtgagttgcttacctctcacacgatcccaagaaatcttgggacttgtcccctatactaacctttggaaaggcacacaatactacgaaatgaccctttagctttagtttttcaggcattaagcttcagttttgacaaaattcacatttgaaggcattccaagtgaagcgaaagggggcgaaaagaaacgaagacaaagggctcctatggccttagttagttggctaataatcaagccatattatattttttttatttactttccattactgtttacagaaatttttgaaaaagtaattatttaatgttagagctagctaaaaagaatacgattaagagagtaacatatgaaaaaggcactcaaaatttttaagtggttggaatgttaatgagcttcagtccacgatcagtaatattatgaaattggctagaaaagcctaagttattacaatgaatatgagcaccctatattctcttcttgagtaggtaagtcaaaaatttacagccctttgcatgaaggatttagtgtatatttatagaataatagaggttgtacttagttactctttctctctaatggggattttacagattatacatagatttgggcttatctaacgaagcgcagcccatgaggcaatacgtgtatgctgatgtggagatttgatcacggtgatagctgttcatattgtgtcctttgatcgtgggtaattaatgttatttaattacttgatcttcaatttattctgtttacttcgcttttagccaacgacaatgagtcttttttataagcgataaacgatatgtcgtaatgaatatataataaagcaataataagacacaagaattttatagaggttcagccccgagcagttcggtaatagcctaatcctcgttatttgtattgctcaagacaaggagaagattccttttctatagctcttacaacagtatctctgaaatatataaattcttagataat

SEQ ID NO: 237195 - DNA, 362 bp, Cannabis indica
ttcatgtggaccgtccaagttctggtgcttttggcattcccattgccactttctatcgtgattgttgcacggcataccaaccaaccaccacctagggaaaggatgatggcccgcacaaaacaaaccatgcgaaagattgctgcgactgaccctcacgtggcacgacatgccacaatgtcgaatgttgaacaggcccggtccgctgctgaggaggatgactatgaggggatgttaaagtccaggaaatagaagatcagggcgaagtccgtcttgatagtccttctaaggctgaggaggaaggggttgctcggcctttgtgcttcggaggctacaatgaggccggggaaccaatgtttgaggtt

SEQ ID NO: 237196 - DNA, 1860 bp, Cannabis indica
taccagatggaagaacacctattgggtgcaagtggatgtataagatgaaactgaatgcacatggtacaatcaacaaattcaaagctaaattggttgcaaaaggcttccaccagcaaccaggatttgatttcactaagacttttagtcctgtggttaaacctgtgacaacaagaattgttttgtccttagctctggccaaaggatggtgcatacaacaattggacaccaataacgctttcttgaatggtgatcttcaagatgaagtctatatgactcaacctcctggttttgagttgcctgatgcccctcacttagtttgcaagcttaataaggccatctatggccttaaacaagctcctagggcctggttcgataagcttcatcaatgtcttctggcttttggatttgtttcctccaagtcagatcacagtcttttcattcaacattcttctcactctatgattttgctgctagtctatgtcgatgatatcatcatcactggtagtgatgcttcacaagttgatgccataatttcagcattagacagcaagttttcactcaagaatcttgggaaattacattactttctttggattgaagttgagcacacagaaacagggcttcacttgtctcaaggaaagtacataaagaatctcctttgtagagctcaaatgcaggatgccaaacctgctcctacacctatgaccagtggtttaaaattgtctgcgtttcaaggggatcctgtagaaaatcctcagcattacaggtctatcgttggcgccctacaatacttaactatcactagacctgaaatatcttacagtgtaaacaaggtatgtcaattcatgtccaatctgcttcacacacattggaatgctattaagagcatcctgagatatctcagtggaactatctcacatggcctatctctacagagacttactgagcttgacatcactgccttctgtgatgtagattgggctagtgatcctgatgatcgaaggtccacatctgagtttttgattttctttggctccaatcttgttgcttggcagtgcaagaagcaacatactgtatctagatcaagcacaaaggctgagtataggagtttagctcaagttgtttctgagatcacttggatgcattctctgtttacagaaatacatgtccagcttcctcgatctcctgtcatctggtgtgacaatttgagcacaattctcctaactgcaaatcttgttcttcacgctacgactaagcatattgagctggacttgtacttcgttcgtgaaaagatttctcaaaaactagtacgggttcagcatgttcctgcagcagaccaaattgcagacggtttcactaaagctatttctgcacctcggtttgttttattcaaaaccaaacttggcattggcccttgcaccaattccaagtttaagggagagtgtcaagacagttaattgtgtcagttagttgttatggctgtttgttcaattctgttacagtttctgcttagtttgttttgcttagtcttagctcagtgagttttgtatataaattgtactcctcaactcaagtggtaatgagaataacaatcttttcttcatactcattctgtgttctttcctctcttctccttcctctcttttcttctctttcttctatttcttgttctttgtttatttgtgtcaatggtgagaaaagcttccaacactaacaacttgtatcatttataatgatatatacatccttagagcttgatccctatattcgattgtacaccatctcccattaaaattattgtaagaccatagactctcgatcaaactgcattattaaaattaggcatggcaaattgaagct

SEQ ID NO: 237197 - DNA, 1946 bp, Cannabis indica
aagaagaaagatttgccacaaagacaacaaagatttcaagcatctcacggaggacccatagggagttatgtagagtctactccttttcatggatagcccaggaccaaccagtctcagtcttcctcctataatttcgcaccccaattgggccagcagtctcagtatcaacatcagtttaggccataaggtttagggttcaacatggggtactcacaaggtttctaaactcctgctcctagtgggagtcaaagagagtacaatcaaggtagaggtctggtgcaagtatgagtcatcctagtcacaggaaaaggaaaagcaaaagaaaagtcatccgctcaagcctatgctcttggggttgatgatgtacaaggcagtccagactagggagttgttgatggtatggttcttatctcacactcttgggctcatgtgttatttgatactagtgcatcgcattcctttatatcattgatgtttgctagtatgttgggttcgaattggaaaacttttagtcatgcgttacatttaagtgtacctatgggaggacacggtgaggtatcaccatatgtaggtcagtttgtattgtgtttgagggacacaagttgtctgaaaacttattagtgtttcctatgggacaatttgatgtaattcttggtatggattggttatctaaataccaagctattgtggattgttcacgtaaaagagtgactcttttaacccctagtggtgatttcattgtttaccgagccaacatgagtgcagtgatcctatcttaagggcatgcttaggtggaaagagaaacttagagtgttatgtgaatctatttgcgatcgaggatgagtctagggatttagaccagttcccatggatatcagtgattagtagtttttcggatgtgtttctagaggatttaccagggttactacctgatagggagatcgagttttgcattgatttgattcttagagctcaaccagtttctataatgccttgccgcatggcacctgcagagttagctgaactgaaaaaacaattaggggagttaatagataagggttacatcagacatactacttctccatggggagctccagttaggggtgttcataaaatagccgatccaatccaatccaatccgcaaagtgcggatatccgcacttgtgcggattggattggattgaaaaattcaaaatccgcacttgtgcggattggatgttgattgtcatgtaaaagtaaccgatccaatccaatccacacatatttataacaaaattaaaaataatatatacaaataggattttaatgtaaagaaaatagtaatttaaaagtctaatacatataatacatttatattgtaaaacttaatagataaaatgtatattctattcttatatattctacatacaatttaaaataaaattaaatattttttatgtatacaatttttttcttcctttgaatttgttatttgttattttatttatttaatgtgttgttggagacataaaataactatagtttgttttattttgttgctagttatgtgaaaaaaaaatatttttttcataaatattaaataatttaatattaaaaagtaaccaatccaaagtaaccgatccaatccgcacttttgcagattggattggatcggatttgagctattgtgcggattggattggatccaaaaaatgaaatccgcacttagtgcggattggatgttgtttgaccaaaaaagtacggcttggatcggatgaacaaccctagctccaatcttgtttgccaagaaagttgatgaaagtttgcaactttgtgtcgactgtagaaatttgaatcagatgataattaaaaacaaaaatcctctaccaaggattgatgatatagttgattaacttggtggttcaaagttcttttcaaagattgacttgaggtcaggctaccatcaa

SEQ ID NO: 237198 - DNA, 1436 bp, Cannabis indica
ttttttatttgggcctctaaaataagtggaccctaggcgcgggcgtagccagcctatgtctccgaccaatcctggtcttttcattccttctctgtcttcctcttatttgagtgaatttcaatcaaaatatgacatttgaatcagatgggagaaaaatgggttgatagccatcaatctaaggaacaaattgaggcaaaaaatttaatcaaacaggaggctgctatgagaagagagaaagctttggcttatgcattttctcttcaggtaccagacacttttactttagaacttaatagaatatttttattaaacctttggtgccatctttgattcctatatgtaattcttaagtagcaattatgtaattcttaagaaatgcaaacttcttcttttaatgaattttattgtataaaagttgaaagagtgctttagtatataaactagtataagctcacattgtcttgttttacttctagtattaattaaatgttcttgctttctcaccttatgactgtgtttttaactaagaaacaatttatatctctgtttattatatcttgccacatttccttatattataaaattataatataacttatgtctgtattgcactttttatagaaaacatcaaagaagtcatcaaaatcaacaaatcatacattcattgaacccaataacttccattggggttggagttggttagaacggtggatggcaactcgtccatgggagagaacaaacacattagataattatcatgaacttgtttccatcaaaagctcaaccactacaaccaaagcatatcatcaacccaatctttgccatgataccacatcagcaccattgtctaaggcatcaacaatgtcatcattaactagaaaaactcccaaacgaaatgaaatgttcaacacccaattagagaggcatcgaaggcatagcattgcagggtctttggtgatagacaatgaagtttttgtggattcccttactgctccaagttacatggcacctacacagtcagcaaaggcaaaatctcgggtgccaaatactatgggctttgacaaaattggcacattggataagggatcagtgtcatctgccaaaaggagtttgtcttttgctggctttccaactttaacaaggaggcactctagtccacccaagatggattccacaactattaagcatagggaggagaacatgatgagtacacgaggtagaagataattgtggacaagaaaaaatccatcaacatagttcaagaaaattgtattgatttatttatatatataattttttttagaaaaaaagagtaattatgtgtgtgatgatgagggaggggaaatgttttatcatgttgtgtagtcatccatgtcaatatagatatctttgcttgatcttattattattattattattatttagatttttttacc

SEQ ID NO: 237199 - DNA, 597 bp, Cannabis indica
attgccaattacatatcttacaataaattctctctaaaatttcgagcagctatttcggcagcctatctaattgaaccaaaatcctatgctcaagcctacaaacaacagatatggaataaggcaatggacactgaaattgataccttagaagctaatgaaacctcgattgtagttcctcttcctccatgacaacatgttatcagcaataaatgggtgtatcgaatcaaatacaaccctatcacccctaggggtatacataaatttttgtaaatcgtccaaaaccgaacaatctgcccaaaccaaaccgagataacccgacgaaaagtacaaactgaaaaacccaacaaaaatataacttgcccaatctttatattgggtgggttgaaaataataccagtccgctcaatcaacccgaactaacccgactaacctgattaagagggttttatatatatatatatattaattatacatatttatatgattattaaaaaaattataaagttgaaattaatatatttttttatggtagttgaatttttttttatatgaattattatacatattatattttttatagtagttgatttgaacttt

SEQ ID NO: 237200 - DNA, 767 bp, Cannabis indica
ttctagtagttgtgatagatcctagcaacctcgaaatagttggacttgaggacatcaaggtggtaaaagagtttttgaacatatttcctgaggaattacttgggttaccaccacaaagagagatagactttgtaattgatataacagaaggagtagagccagtttctaaggtaccatatcagatggctccaataaaattaaggaatttaagttacaactttaggggatgcttgatctggggtttatacgacccagtatatcaccatggggagctccagtgctgtttgttaaaaagaaagatggatcactttgtatgtgtataaattatcgggaactgaataagttgacaattaagaacaagtatcctctacctaggatcaataatttgttcaatcaacttcatggaaagatagtcttttccaagattgatcttcgctcaggctatcgtcagtttagaatccaagagaaagacattctaaagactgcattttttacaaggtatggccactatgaatttctggctatatcctttgatctaaccaatgctctgacagcttttatggatctgatgaatagagtgttcaaggattttcacgatatatgtgttatagtatttattgacgacatccttgtgtactctcaattagaagtagagcatgaacaacatctatggatggttttacagcgactatgagaacacgagctttattctaaatcaagaaatgtgagtttttggttaccaacagtgtccttctatgtcatattat

SEQ ID NO: 237201 - DNA, 3621 bp, Cannabis indica
ctcttgttgagttcatctatgaattgcttcacgcgtttgctatcattgccagtaacaatgatatcatcaacgtatattagaaccaagatgatgactgtatctgttttgtagaaaaagagtgaagtatcagcctttgagtttttaaatttccagcttgagagtgtgtttttgagtttctcgaaccatgctcgaggtgcctgtcgaagcccatataaagatttgttcagtttgcacacatagtcttcttttcctttttcaacaaagccttcaggttgtgccatgtaaacatcttccaccaaggtgccattcaagaatgcattattaatgtctaattgccttatgtcccagccctttgttactgcaattgtgagtacaatacgaactgttgaggcctttataacagggctgaaggtctctccaaaatcgatgcctggcctttgatgaaatcctttcgcaacaaggcgagctttgaacctttgaaacgagccatcagcatttaacttctcacgatacacccatttgtttccaatgagattttgatcatcacttcgagggactagtatccatgttttattcttctttaatgcaataacttcgctgttcatagcgctgttccagccaggatgggcgagagcttcagtgacagtaagtggttcagcagtgtgtggatgccaagtagctgttccagcaaaggcccgaggcttaaatataccggccttggcacgagtgatcatgggatgaccggtcggggcagttggagcaggtgaaaaaccagcagaggtttgagaggtaccaggtgaactcggttcaggtaagtcaaaaataataggactgctgctgggaagatggttatggcttcccctctcactacctgaaggataaatgggtgaggaatgaactgaggtaggagaagaggagaatacctggttgtgtggtgattgctgcaaggaggaatcgacatcaaaggcgcttgaagatggctgctgtgaaggcgatgctgcaggtttttgtgaagatttttgtgaagagagaggcacagtaggagtaggtaaatatgaccatgaagagctttgaacaatgacaggtttctcatgttgataattgtttagaaaaccaagctgaaatggaaactcaagttcattaaaaacaacattcttagagatataaatcctacccgtgggactcaagcacttataacctttgtgggattcactatagccaaggttaacacattttatggagtgaaattggaatttgtgggtttgatatggtctaaggcaagggaaacaagcaactccaaaggtttttaaaaaactataatttggttgtttggaataaagcacttcaaaaggagctttattctcaagtacaccagtagggagccgattgattaagtacacggaggtgctaaatgcgtcccaccaatacttgagaggcatgtgtgcttgagctagaagagtaagacccatctcgactatgtgtcgatgtttcctttccgctctcccattttgtgaggatgtgtgtggacatgagtgatgaaaatctatgccattttgaacagcaagatcttgaaacacttgatactcacccccccaatcagttctaagccccttaatttttctctcaaattgtgtttcagcaaacactttgaattgcaaaaaagcattgtaggcctcatctttagtttttaaaggataaatccatgtgaacctagttgcatcatctaagaaatgaatataaaatctatatccacttgttgattgaaccggggaaggcccccaaaggtccgtgtgtataagatcaagaacattattggctttgctactagatagtttggaagggagagagtgagacttgccatattgacatgcatcacaaaagtgacttaattcattcttgggaagttttacattgcaagagttcaagacttggcttagaactttggaggatggatggcctaatctcctatgccaaacctcacttttggaaatggaaatacgatcagttttgcactgatttacattgtttttagaagtaaaagctacagcagaaaaaggtaaaacactgtcagtcttgacttgattttgagaggcagtagtcgagttgctctgtggttgtgtgaggtgatataagccatctttaagcatcccttgaagtagaaccctccttgttgctttgtccttcaccaaaaaacaattagagtgaaattcaatgaggacattattgtctgctgtaagtctagatacacttaacaagtttttggctatttgaggaacaagaagcatatcatttagtaataaggatttatcagctttagtgggtaacaaaccagtaccaaaatgagatatatcaagtttgtctccattaccaatggtgactttttccttaccaacaaactcttgtttctggttcattgttgaaggatcggatgtgatatggttacttgctccgctgtccatgaaccaagcatcactgtttatcacttctggtgttgcaataagggctgtgtgattgggtttgttttgagagttggtgtttggatctgatcccatgtaaccttcatcataccggttgtagcaaaccgcagctgagtgaccatatttgccacacacttgacaagttggtctaggtccatttgaccttcctcttcctctagttctgcctcctctgtttccagatctgccaccattgttctgctgaacttgattagaacctcttccacggcctccattgtttggcctgtgagcaaagttggcatgtgggtctgccattgctggaagtagtttgttgcttgagttgagaccttgcagcctctctaacttgctgtcgaaacttagcaagatttcttgaagttcttgccatgttgtgtgtggtctggactcgatctgaacaacaatggacaagtatcctgcatcaaggcctgaaagacagttagcaacaagttgagagataggataaggttctccagctagagccaaagagtcagcccagcttttcttttgcctgagatactccaccatgggagtgcttcctttcctggttgtttggatgagtgtgcgtgtgtcatccattttggatttggagtgcgcaccatataggtgttcaagagcacgccataagcctgctgcagtagatgaacccatgacttctgtggctatagtttcagacatcgaactatacagccaccccatcaacaattggtcatttatgatccaatgttcgtaggctgggttgatgatttttgcatcttcagaatcgatgctttccatgacagtatctgcatcaataaactcagagggacatacgttagtaccatttaaaaaaccatctaatcgatggcctctaactatggtggaaaccatagttttccacaggctgtagttgtgtcgatcaagcttcagtgagaaaggttggttaagggtactaaagtggtgagtgactggattttggagctgagaatttgtactggcaccagtcaaggttgatgctgcagcagcggctgtattttgggcagtggcttgggctccatctgctccagagttttggggtgtgttttgaccttcggctgacatggtgtcgatgaatggctctgataccaagaaaagaattataaaaggaaat

SEQ ID NO: 237202 - DNA, 959 bp, Cannabis indica
cttgtgtttttgaagctttagttctggttgagtatgtgattttgagatatagggctgttaaggttaggttgtcttatgattcaatttctaagcttaaattgagttgattttaagttcttgctgctgtatttgatgattattgtggtggatgatcaagtttgagcttgaaactcaatttgggtcatcaatggcatattttgtttcatagtgtttttctgggttttattgcttggaatatattgtgtaagatcattttaggtattctggaaagtttggtgacatttggacaagttttgagcaagtttggagttgtttgagaaaacctggtgcaagccggttaaccggtttgccaggacctgtaaaactggttaaccagtttcggcagattccctgaacaactcgttttctcgattcacgtccacttcagtgccttagttgggtgtttccctgcctcctaggatattgtagtccctactaataataacagaaccttaagttgtaggttcgggtttcccagattaaggttttggcatgtgatttactcggttttaatatgtgattagggcatccatctagcacgagactttccgttcaggtcagccaactcacttgaattcagaaaagaggtaagaacagcgtataatatgtgatatatatatatatatatgaatgtatttatgtgttaaatgtatatgcatgcttgttattattgttacactaccaacacttgtacacaaatggtacaaagtgcattggtatagtgcatattgtttaaggagtacattacggtgttaccagctcaagtacagggatgtgtggtatatcacttagtggtactcagggtacaaaacaaaccctaccaacacttgtataaggttggtacgtagtgtatgtggtacagtggctgtaccttagtatggaacgttcctactcatctgttaagccttgtaaataggtgt

SEQ ID NO: 237203 - DNA, 991 bp, Cannabis indica
aatattatagttgttgtttcaattgatatcaatatcaaacattgtacactcaatgagaggatattaaaatatctaaatgggcaatgtgtgtatgttatttagtggtaactcatctgataaggtagacagattagaaaaatagtaatatgagttaaatttgctgatattcccaagtggaacataggatatgagtagttaatgggagtatccatctaattgatttggagaacggaatcttttgatatgaagtgatctagtgttagtataagtgggacaatttatgagtatagtctgaaaccctaagtgaagtaaaggtgaccattttttaggtggatctattcactaccaaagcgcatgagtcaagctgtgacaattagagtcccgtgatttgcaaaggaaagcctaggggttgtacaatccacattgcatggggaaaggttatatgtagtgattttgagattatttaggcacgggactacatagggttgaggacttgaatgaattgtttgggactgcatatattaacaagaagtatcctgttttagtagcccaccatgaagggactacacagttaagtgtccttgacttggggtgatttcatttaggaagtttccccatgaagcgttcgaaccagaacaaagcacactggaaacacttggattggtccctaggacaagtcgttagtctagaaagcagttagagtgatgcacttgtgtataagggcccaatggaggcttgaagcagggacgttactatggtaacgtataaaagaatgccagggagagtagtgatatcactaaggtaaggaagattacctggattacatatggtgatacgataatgatggaaaatacttttatatttgaccgggtggtcaatctggtgtataaggagactattgaaattctgggaaaagatcactttattaagaaattatagaatggcattgttgtcctcaaaagtgagtgttttaatatttatactcgcaagt

SEQ ID NO: 237204 - DNA, 2177 bp, Cannabis indica
ttacacattacaatacaagggctcaatctgaatgaaaatgacagtgtccgcagtaatagattttgcaacataaaataagtcattgaacaatggaagaatagggttaactatcaaaagcttatggaggagaaagaggaacataattacagattttggtctaacgattataattgataccagattatgatatgtgtttacaaattttcaaaaactcaatataattaaataagaactaagaaaaatgaatcaaatataagaaatagaaatgaagatttttatgtgagtattaacaaaccttagttcacaagtcaattgtattgggttaagagctctagctctttactatagtgtttaagttatgaatttccaacccttagcatgaaggaataatgtagtatttataggttaggattcgagtatggtcatacccgagacctgttaggatttgcgtgtaacatggcccactaataaggtaatagtaattacatataatacattgacttaggacccatggattgggagaacctgtggcccgtggggatgtgatcttttgtatagcggagaccacttggggttgataggtggcatgagtgtacagcctctgcatattgtagttgttagagtagtagccgttggacaaatagtatgttcctcatggaggtgtgcgcactcttatggcctgacaaaaaggacaaagccctgacgacgtcggatttgttgttagaggatcgtcacgtcagccttggctttcaaggtgtctcttgaaaaacccctccgacagtatcccaatggttaatctaaaaggcttctgttatttcttctcttttatacgtgatgtcttcttagaaccggagtggtccagatcatgatgtaagcgatctatagtctagatggacttaagacccatctttctatgtgaatctagcctgttaccttagcaggacccatattcgggcttaggttgactatttttgacccggacatgccacatctcattcctccaaaaacacaaataataatatgtttagaagttaaattttggtgataaaaaaaatgtaataaagaatgtagaaaaaaaactgtagaagataataaaaaatatatattgtatttgatatgtatagaaaattgtaaaaaaaaaacttaatttaataaaagttttcatagtgaacagactatacaatttgaaagtttagtatacaattaagattaattgtggcacaaccattaatactttcattttacttgcaactaaacttcaaaaactcaaattttaacggtaaaatctccaaaactaaaaaaccgtaagtaatttacagtttccatccattttaggtgttaagtaccatattacattgtccatgtgtacatttacgtggacacagtgttcataaagcataattttattagtccacataataaattatttaaaaaattaattcaaaattaaaaaaattataaataaaaaaaaaaaaatttttacaaaaaaaaaaaaattgaaaataattaaacttaaaaataaatttaatttgaagggtataaattgaaaatgataaaaactttaattggaaatcctaattccctttctctttcttcctcacttaacaccgaccctctctcttctctctatgtttgtgcagcagccactggaaggacaggactgccgtgctcggatcacccacgccccgagaggaccacgcatcaccgtcctcatgcccagaaaacccccaagggcacacaactcgggatcatgggctaatgcctccaagtgacaatgaagccattcgtggcttccaccttttctatggatggtcggagacaccctttgatgttgggccaagcttgacgcaacgaggaagaaagagttcgagagcgagagagggatcaaggaacacgagttcctggggtttcgtggctcgtggaggtcatccatggttatcgtttaggccttcgttggacgagggtggctccaccgagaaaaccaagaaagacggagaaaaagagagtttgagcgaaatagaataaaaatgtaaataatgatatgaaatagaataaaattaaatttaaaacacataaaaaataataatgaaaaaattattaattttttttcaccttttccttttatttcaaaatagattattcattccaccaaaataataaaaataaaaatattattc

SEQ ID NO: 237205 - DNA, 937 bp, Cannabis indica
aattatttatctaacattatacataacctcaaaatagaataaaaataagaataaacaaaataaaagaaattttattgtcaccaaaaaaatctcatactccactaaactcataaatattcaaaatgataaatcatctccattagcaaacaaaataaactaagtacaaaaaaaattaattacccttcaagaaaagcggacattacaatgattctataatctaacaccctaaatatgaatttcctaatacgatgaaataaatacataagagattaagaaatccttacatcgacggaattagaataataatctctccttccattacgatctctagccattgaatcctttttgtagtagagcattgtcaagatctgaacttagatcttctctccttcaatttggttggattcttcacaatcttccacactataattgagtatttgtgtaatgatcgttttgttatttttgagaattagtaggtagttagggtctaatttcagaagtagacttttaattattatttttataatttttgagatatatttgaattctaggtgtgccatttatgttatatatgaatttgatattgttcacacttttatgcgcagtaacagtggaacacaacgtatggcctatagagtcactttagtatgatttagtatttttagaatagcaagacgatctagttagatatttggaatgtcggtattagtcgtgattatagttttagactattttaccccaaagtcattttaccattcaattatgtaagtgggggtattttagtcattttgactttgaggcttaggtgacacttcctcttgttggcagatggccactatagaagaaaaagataacattaggattgtctttagttgggaaattgagaaaagaaaaaacaatagaaaattagggtttgtctctctccttctctcttgtt

SEQ ID NO: 237206 - DNA, 2915 bp, Cannabis indica
ctaatagaccaataaggcacactcaaaaacagtcttatcttcaagactatcactgttttctttctactaacagtgttcactctcaagtttccaagtcttcaacttctcatcctctttctgagattcttgattacaacaggctgtcaccaaaatttcgagcaactgtgctagcaatctcaatccactatgagccagaatttttccatcaagctagaggcgtacttgtttgggacaatgccatggacaatgagcttgaagctttgagtctaatggcacatggattcttgttagccttcctgttgatcaccatgccataggatgcaaatggatttacaagattaaatacaatgttgatggatctattgaaaggttcaaggaaagactggttgccaagggtttcaatcaacaagagcattgactgcaacgaaacttttgctcctgttaccaaacttgtttctgtgaagctcatcctcgctcttgctgcaattcaaggcttgtttttacatcaattggatgttaataatgcttttctccatagagatctgcatgaggaagtgtttatgactctaactcaagtaagattgttcatccgatccaattcgcacttttttggtcaacaacatccaatccgcactaagtgcgaattttatattttgaatcgattcctatccgcatagcagtttaaatccaattcaatccttaatagtgccgataggattagttattttggtatcggttactttctcttaatgataaattatttaatatttcattaaaatggaaaaaaattaaaaaaaaaataattgttttttaatatccaacaatcatctctttttcatcaccattttacatacaaaatcaaaaacaatatacatatatgtcagtatatatatactcatctcagaatgaaaaaataaataaaataatcattacaatatatatttaaatttacactagaatatatatgtatccattactaaaataaataagctagtatatatatatctaaatttatgtgtatgtgtcatggtgaataagtataatttttctcgtgtcttccattataaaaacaaataaaatgcaccaactcaatatattactagaaaagattttagcaggttaagaaattaaaagtttgtatttttgtttaatattattagaaaattaatatatattatatattataattttttaaaaatatacataattaagtgttgattggaatggttactttttgaggtcaaacaacatctaatccgcacaagtgcagattttagattttccaatccaatccaattcgtgcaagtgcggatatccacatttggcagattgaattggattagatcgtgcggattagattgaatcgaatactttgtgaacaatcctaatctcaagggtatagtcctaagggggatttatctcctaatgttgtttgcaagctgcagaaatccatatatggtttaaagcaagtttctaggcaatggtttgagaagttttctacacacttgcagaaagattccaacactcagctagatattaactattaatgatcaacgaatgtgatctacatgggactatcaactagatgcccaagttttccataggtttctcgcgatcacattcgttgaatcatgtaaattgtagtatttttgtttttatatgtaattttgatctgttttttcatttgtattcaatttgtttgtggctaattatatcaacacaaatagaaggttggtttggtgcttttaaatatcatatcgtatcaaaattacttatactgagattgttttacctgtcaactacttctaatctattacaaacaagtaagactactgtgactagaaggaagtccagagcaaaagcataccttttattacgtcaggattataagatttcttgaacctatcaaccaaagaagcataaaaaggctctgctttctggggtgccattgcaacatgaaaatctggtttgttgcccttcaagaatccgtacaatgtaaattgactcactgccacaaaaaaaaaaaaaaacaattacaatcacctcatcttctaataattctctttacctagtagaatttcatatttctcagtagaatttttttaagaacagtttacctagtagaatttcatatttcctctgcattacctgcaaagataaataaactagatgaaaatttaaacttgaaataatctaaaaatgtcagagacagaaagagagttgaaaattacgtttaggtcccatcctctgccagtatcctcatttgggaacaatctcatgttcaagaccttccggcatctaccaaggattattattgactttctgtatttttaataataaaattcgaaaaaaaaaaaagagagaatagattagattagtaaaagaagagtacatgtattcggcatcggactcggaatcggagtcatggatgccgacgaggacgagcaggcccggcccaatctgcgaaacagtgcacccttccacctgaaatgaaattggtgacattggtgagggtggttgtgcgataaacacgaatgatgtgaaagagtagtagtgcagtgagtgagtgagtgagtggctgtagctgacctcgacgctggcagaggccactcgctggaccacggctcgcattgccctgactggcgcctgtgggtggcttcgcttgattcgtgttgtagccaaagaaggaagtagaacggaaacagcgtacataatggtctgtatgtgtacaatgtatatgctaagtatgacccttacttttggttggagctaataagaggaatcaaatgagtttttatttcattatatgtattttaaagtattggaaaagggaaattttactatttgactctaataaaataccccatatcaaaatttataccctccattaatttgtacaaaacaattccactatt

SEQ ID NO: 237207 - DNA, 1217 bp, Cannabis indica
agggtattaccacgctatttatctttaggaaaacttttaactttatacttgagttcccgaaaaggttttagaaaagttgtttacctatcttttgtgattgtgatatagggccttcgttcagcaagtgaatttccattcaggtttaccaacacacttgaatcaggaaacgagataagaattagtataaaatgtgtatatgtatagctggatgtatattatatgcatgttgtattatgtgatatatatatatactacaaacactagtacggctgcagtactaagtgtattggtaaaatatatgatgttaaaggggtttgacacaacgttaccaacactagtatgtgacgagtacgaagtgcatgtggtacaacactcagttgtactcaaggtgtgattcagccctaccaatactagtacaggactagtacttagtacatgtggtacatagattgtacttttgttaaaaacgttcttaatcattggttaagccttgtagttaggtgtctgtgcgactaaatgcaagttagtaatatgtttatatgttttatgcttttcatactgagtcagtcgattcataaatattgttcacatgtgtaggtcaaggaaaggtgaaggctgagcacccgtgagtccagtacttgaggatgattgtacttatcaggatggttaggcctggagtgttcggtctcgagacaacatgggtatacatcttgtagtcgcgatgcgaataacttttgtaaaaaaaatatttttgctgtaacttttgatcaggatcttgattattatgtaaaattatgtatttatgaaagtttaattctaaaagttttaatttggcatatttttcaagaaattctttgcttagcaaaggtgtgcacaataattagaagaatcattgtagcgtgcataagcaagtagggcattaccacgagctgagttggttgttgtggtgtgaccctttattttttacagaataatttatttaataaaataataatttttattttattattttctttatttgaaaaaagtttaattaaaagtgaatacttagctagtcatatccattttgtgggatacgttcaacaacaactcctccatgattcataaaacgttattcttcatgttttattttttcagtccatttatctatataatgcgattgaagtgatagaagaatacaattttttcagtccatttatctatataatgcgattgaa

SEQ ID NO: 237208 - DNA, 871 bp, Cannabis indica
ggtatacaatgtaatttcctccctgtagttagtgttgaagtcgagtttattgaaaatatattatctttacacaatctattatacatgtcaataaataatattaatacaaaattaaaatgaatataaaattatgagtttaaatataacattaaaattcttaaaaaaaaaaagtccgctcagatcagattcgattcaaataagtcaagttggatttgatccgattcgagtatttgattttagtgggacgagacgggacaaggcaaatccttatatgatctagatcaggttggatcatagccggatcagatccgatccggcccatttacactctcatgtggtgtgcatgtaattgatattttatctaaatagacatatttgcaattgaattataatttagattacaacgctagttatacatataaattaaaaaaaaaaaaaacgagaagagaaagaaaggaaataggaataattgatcaaaaacaaactattgaagagagaatgatcctatacttttgactcaaaatgtattatccctaatatatttatatataaacattaaaatttccatgtaaattaaaactgaaaccagatttttattccatgaaagaagagaacttttagtctactttccaggctgtttcagtggtgagaaagaggcaataagaaaatcacaatataaaaaatagtacaccacttatctctctatgtgtggggttctttcactctctaacattcaataattcattgtcccaattgtcaatttaaacttttcctcttaataaatgtccaaaaagagcaacaacaaaaaaagccaatatcccccccaccttttttttttttttacttttttactactttacttaattttaaa

SEQ ID NO: 237209 - DNA, 848 bp, Cannabis indica
atatgtttgcttttgggcttagatgcatataagaagctcatttaatttagatatttaaatggactaggttgctaaaaataaactattaccttgatagttttatttaggcccaattagtattggacttattcaattaataatgattatttaatgaatggttaaatacctctctattgggccatgtgtgagaactaagggccgatagtagtgggtacaacatactaattctagccctccctcacatgaaccaccccaattacaaaagctcatttgccttatttaactaattaaataagactaattatattattttaaccaaattaaaatttattagcaacataattaatttcaaaattaataaaattaattttttattagattattttaaaattaatttagactaataacttagtttaattaaataaattctagatagtaatagtaattaatttacattttgtaatatttaatttagtagaaaaatatatttaagttgaaattaatattaattaattttggactaattgaaattagaatctttttctttttcttgaatattaactagaattaataattaagttgattttattcaagatacttaattatttatttctatttcaagtgattaaattaaataataaaatatatttaagttaaaaaataattttagaccaacttaaattagaatattttggatgttaaactaaaattaataattaagttaattttattcaagatacttaattatttgtatctattttaatatatttataagaaaattatattcaagttgcatttttttttttatttcagatcaacttaaactagaattgttaacgcagattttc

SEQ ID NO: 237210 - DNA, 850 bp, Cannabis indica
tcgaagtagatgtagttccattaacaacgcgacatgaagagtgaattataaattctgtgtgtttcactttaatatttacttaagttattatttatctcatcaatctagcgaatcagtattgatcattttttagctagtgtcaacgattatttttgtgtatttatgaaaatattccaattttaaacttacatattttcatacatgcatattctttctagtgatatactaggaaataagaatatgctaatattgagatggtataatagttaatttggtgtgtcatactatataagtaaaagaacaagtacacttttcaaacactataaagttttaaaatatatattagataagttgtttaatataatataactttacatgtttgtaagtagtatttagtttttttttttgaacgggaaaaagttgcttccatttattaaaggtccttcaaaagtaagaacaataaattagtaggaacagactccttattactaatcgtgcaatcagctttagaataagagcccctagttaagaagtgggccactttattcgcaaatcactttactttggtgccgtttggtaacacttttgttttctaattttttaattacaaaataaaagtaaaatttttgtttttaaaaattttgcctttgaaaaacaaaaatgcgttctgtaaccacttttatttttttcaatttgaaaaacagaaaacaaaagtgtgttctctaaagttcattttcattttttaattttatttacgtcgggtctaggtccggggtcgtattcgggttcaagtgagaggtcggattcagcttcaggaccgtgggggggatttgggtctgagtcatgatcg

SEQ ID NO: 237211 - DNA, 1725 bp, Cannabis indica
ggtcgtgtcaaatgaaggtcaagcagctcagtttcccccaaatgctcggggccgaggtagagatcccaggggcagggcacgtggtcgaggggatgctaacctgccacaggctgccaaagctacttaggaagcccaaaatttccagtggcacctgcccctgctctccaggccgaaccagtggttgcagtgaatcaaatggaacgtctgtatgaaaggttccgcaagcaagcacctctagttttgcaaagagttccggatgtaatgaaagccaagtagtgggtaacagtgattacaaaaattttgaatttcatgggtgtcaccagaaatgatagagtggtctgtgccacttttcagtttcaagaagatgcgttagtatggtgggacatggtgtccatgatacatgatgttactacgatgacctgggaaaagtttcgggaacttttcaatgcgaagtattataatgaggcagtcagaagtcccaagagaaaagaattcacccacctgactcagaaagaaaatatgagtgttaaaaagtatacgacacagttttatcgtttatcaaggttggccttgggaattgtgacaaccgatttcagtataaaggaaaaatacctggatgggttgaatgcgaagattcgacatgatttaatgattactactgatgacaaaaccacctatgttgaaatggtggaaaaggcactgcgagctgagggcgcagttggatgcatgacagagtctgctggactctagtggttggcggggctcccacccctcctccatcaggctttaaggggaggtactggttcggccatggacgagaaaaggaaagcatccactacaaccggtggctcaggttagaacaagaggttctgggggaaccagggacgaggcggttgctatggtagttctgagacccgatacacttacccagagtgtcccagttgtaaaaggcaccatctgggggagtgtagaggacaagggtgctttcagtgtggcatgtcagggcattacaagagggattgccctcaactcagaactgaagcaccgaaggctccagtgaaacctactccagcgagggtgttcgccataagtcaggctgatgcacaagccagccctttagtggtgacaagttagctctcggtcaacaactctttttactctgtactgtttgactctggggctagacattcttatgtggcggccagaatctttagcaaattggatagaccgcacgatagttacgaatcagggtttggaaccttattacctggcggagagttagttatctccaaaaggtggattagctctatgtcgatcagaattgatgatagggagttaagtgttgacctaatagaaatgagcttagcagattttgataccatactgggaataaatttcctatccaaatattcagccagtattaactataagaggaagatggtagtcttccaaccagaaggtgaagaaccgtttgtttttgtcagttcagttcagggatctcggatcccagggatttcggccttataagctaaagaattgttgtgtgatggatgtctagggtttctggccgtggtagtagacaccactcaacctaaccctattcgtcctgaagacattaaggtggtacaggaatatttagatgttttcctgaagaacttccgcgtttaccacctcagcaggaaattcattttgttaattgatttaggcacctggagtggaaccggt

SEQ ID NO: 237212 - DNA, 856 bp, Cannabis indica
aaggagttgattgtgatgagaggtttagccccgtggttaaacctgctatcataagagcagttctcagtattattgtctctaaatcttggtctatccattaaatggatgccaaaaatatttttttacatggtcatcttaatgaaacagtttatatgcatcaatccatgaatttttgagactaaaatcatccaaatcatgtttgcctcttaaaaaaatctttatatagtttgaaacaggctctttgcgcatggtatcaaaggtttgttgattttattgctaccattggattctctcatagtaagtccaatcactctttatttatttacaaaaatggtactaacactgcttatattctgttgtatgtagatgacattatacttacggcttcatctgatcaccttcctaagcattttatgactctgttcggttttgggtttgctatgaaggacttaggtcctctgagtttcttttcgagtattgttgttactcgtcatacccatggtctatttttatatcaaaaacaatatgttgcaaaaattattgaaagtgtcgacatgtctaactacagttcatgtcctacttctgttgacactaagtccaaacttagtgccactagcaatgctcattttgatgatccaactaaatatcgtagtcttccagaaactcttcaatattttactttcactgggcctgatatatcttatgcatgtctaactacagctcatgtcctatttctgttgacactatgtccaaacttagtgccactagcaatgctccttttgataatccaactaaatatcgtagtcttccaggagctcttcaatattttacttcactgggcctgatatatcttatg

SEQ ID NO: 237213 - DNA, 526 bp, Cannabis indica
aaacatcaagaatagcaattttgctttttcaatttttattcatgcctctcacattccaacttatcatgttacaagcatccatcatgagtaagaatagagctaggaacaatcatctcatcaaccgaaattgcttgtaaaacagcgtctccattattacaactttccatgtttggagcttccttgtttttgattgcttcattctgcttcagccctcttctcttgggagtaatccactctattttccccttattggatttctggacaacctggttatgctgctcatcgttcaacacaacagtatcaggtcttgctattgtcgtgccaatctctgagtcttccttctttcttcgatcttcaccctccctatcctacttagcctctttctcaacaggttgtttctttttccagaccactttcctctccttattgcagttggcaactgtatgtccaagatttgcacaagccgaacacttcgatgggagccattcatattcaaccgcctgctccacaagctgcttccgttcat

SEQ ID NO: 237214 - DNA, 2760 bp, Cannabis indica
tagtctttcaaatgaggaggtctatttatgtggcaaccaatttttgaggtgataggttggacttcattagcttggtccaatgtggtaaaagagctattgtgtattgatggtgcctcaatagtggaggctggtttaattattgaaccagaagatgaattagttggttgtaccttagtagtatgaactggtgtgttttaaatactagtagttgtaattgttgtatctcgagttattggtatgtgaactggagtgattagttgttggaaaaattgatgtattttagtatggaactttgaccagtgaggggaaaaatgtgttcatggaagatgaaatctcgagagtggtaaatttgcttggttttaatgtcaagaagagtgtataccttcatgccatgggaatagccaatgaatatggaggcacgacttcttggtgagaatttgtgtcttgtggatggtagagtggaatcataggctaaacatccaaaacatcttagtaggtgatttgttgttatgttgttcataagaggtgctgccttggaatagtgcagaagaagttatattcattaaataagtggcaatttgaatgagtaatgatcagtaaacaagaggtaagtgagattggaaacacaatgctcttgctatgttgaggagatattaatatttcctttccacaaatgagttttattgtgggctttctacacaagaatggtagtggacaatgcctttagatgcataaaaagattgcatgtttagttctatggaattgtcagatcgaatggccttaataggcttagagtattgtgtgcataccaggttgtaaaacatgggaatgactgtctggacttttgctttgtttttgagcatgaaagtccaagtaaatcgagacttgtcatcgacaattgtaaggaaatatatatatccttcgatgcttataacattgaaaggtccccaaatttccatatgaattagatcaaatacattttttagctaaagttgttgtttgatatgaatgataattttttttttgttcggcaagatggaaaatatgataatgatagttttgtgaaatggaaaaactagaatatattttttattgaatgtatttaaaatgtaaattgagggatggccaaggcgtttatgccattggtctacattatttaaaaaaaacaaagagcaactagaaccagctataggaggagattcttggagaagaacatagagttttccaagtcttttagctatcccaatcaccacatttggagaatgagcctgtatgacacaagaatcatgttgaaaaaaaacaagattagtggtgttgtcaagaaaagcagtaatggaaataggttgatggttaatgtgggaacaaagagcacattattgagagtgatgtgcttgtttatcttgacagtaccaatacccttaactggaattttagtgtcatcaggtaaaatcacatattttggaaaagcatcattagaaaatgaagcaaaacaagatttggtaaaacacatatggtgtgtggctctactgtcgatgatccaagaaaaagtttagaaaaaaaaagatttgttaccaaccatgttggctgttgcaggggcagtgtttggatcatcacggaatgtgcttggctaagttattggctaagaagtgaaatgagttgctagcattgggtagagagatctacatgggagtttgcagcgacattgtctgagttggggctagcagtagcattattggtagtagatttccctttatatgattttttcttgtctccatagcctggagggaaaccatggataaagtaacacttgtcaacataatggcctggtttgccacagttggtgcatgagggtcgtggtttttttgagcgtggaggattggtggatgaagatggtcgaacagaggatgccaaggaagtcaattctgatgagccaagggttctttgtctctcttcttcaacgatcatgaaaaacaccgtagacagattggggataggttcattgagaagaatttgagtctttactaaagcatacgactcattcagatcagttaataattgaaaaacttggttttaattgtagtaatcaaggaaaaattgcatggtactacaggtacaagtgatgttaggttcgaattcctttaattcatcccacattgatttaacttttgtgaagtaagaggtgacgaattgatcaccttactgcaaacttgtgagttgagtttgtagctgaaagattcggagtccattaccttcattgaatctttcttgaagatcatgccacatatctgtggcaagatgaaaatacatgatactctttgctattttagaagaaatagagttgataagccaagacataaccatgttgttacaacgaatctaagaaataaggtggggattaccagttgtaggtcaaggtagggtgccatcaatgaaggcagacttgttttttctatcagcgccattgttctatctcgtttccaagattggtagttagcaccgttgagaacggtgaaaaccagaatgaggctagtgtcatatgttgtactgaggaagaaagggcttgatacatcttcatgagccaaacgatcgagagttgaagggtgaagtacaaaatagtacgttgatgaaggtcaccaacaggaggatctggagaataatgaacttgttcaaggatgtcatcgtcggtctgagatcacaatcttgaagttataactcatcgggagcaacagaggtgttgactacaggtgcagaagtggcatt

SEQ ID NO: 237215 - DNA, 1336 bp, Cannabis indica
tatgagtcattgagacccttaagaaattgaaggacatggtcatggttttgatgatccaatctttgggcagcagcagtgcatgtgcagggaatgcagggtcttaattgattaatttcatccctgatggcagtgagtttagtgaagtatgcactaacagagtcatccccttgattgaggtatgttagtgtttcgtttaattcaaagatccgtggaccatttccttggttaaaccgattgtttaacacggtccacatctcagatgcagtatctaagtacatgatgctgctttttatttcgggtgaaaccgaatgcaagatccaagacatgacaagttgattacacctattccaagaatcaaagagagaatcatgggaagggggttgaggaagagtacattcaaggaaaggagttttgcttcttgctccaatggagagtttgaagtccctttttcatggttggaagttcttgtctgtaaggacagatgtaaccaagaccagaccaggatggtctgctgtactgagataataaggtgatcgaacgtcttcgtatgctggtctttcgactagaataggacgatgaacagcaggagaagggagagtattcgttcgaggcgggttgtcagcggaagtattcaatggtggaggagccgtgggagcttcaactctggaaggatcatcagaattggttgcagaacttgtagctcaagtacgcaccattgttgcgatggagaaagcttgaatcttgaagctgcaatttgatttcctggagcttcagggtattgcgactgataccatattacaagtaaaacagaggaaaaagtgaattgtattattagattactttgaatgaaagagtattacaggtatttataggcacaaagccaagttactgtacgtaacaaaataaacggaaaaataactaacaaactaactgtttcctaactgatctaagagagcaagctttttttttacgtgagagagcaaacctattaagaagaaaagtaaagactataagatacgctgattacgatgatgataataattttaaaaatattttctataaatttatcaattattatagatatatatatatttaattttaaattaatttatatgtatattttgaaaactaatacctaataatcttctcatgaatttgttcattattgcttgcatgaatttgtaacaaccatagatatgacagcctcaaagctcagacacaatgagacttcaaatgacttcaaacgcaaatgcactcgacctcacccacctaatcctacatgcttgaccacgtactacaaccaatgtgctaaattctacacaagaaatatgtacca

SEQ ID NO: 237216 - DNA, 623 bp, Cannabis indica
taacaaactccttgtaacaatatggccgcgtcaacttgagttactaaagtgctttcggatgagacgtatgctctctggaagaaagaagtgacgctagagagacttcccgaataggaatggcaatagctgaagtctactatccgaaagtcccttccaagagggaacaactagtcatccgcaactcctttccgaaggaggactagctttcctgaaaactctttcgagagtggacaagatagacttctaggaacgtcattccagacgacatctatcattccataagaatttttctgaattgacaagttagactttcgggaacgcccttgtggatgacatctaattttccataacaagaacaacttttggagaagctataccacaaatacatagtttcttcaaattcacatatgatggtggtgaagaaagaatgtacccatcaatgttggtgttcaaaaaatcacaatatactaacctctgacaatgatcaagtccaaacaatgctcaaacttgtttattatttttttgatgaattaggtgaattttattgcatttaacctgtaatttgtacaacctataggcaccataaccacttagatatggcctagcacttttctatacataaa

SEQ ID NO: 237217 - DNA, 490 bp, Cannabis indica
agagaactttttttaagcattgaaagtgataaaactacttataagtcgattactccattattactgaaaggaggtgagtataaatctaatgtttcttgttttctcttattattttttatatacggcttacttgtgatctattattctttgtgttcaattgcttgtttataatctttttaaatttgttaaagaaaaaccgcatcgacaacttttctaatttttttcataatcatgtacattatatttaagaccacctatttagaattttcataaaattttgaataattctcggcaaaaataaattttaaaaaaatactcaaatagtttacaatactaaatagttggtaattacatacaaaattaatatttaaaatatttttttttattcaattaaacagtataaccacatctaaatctcataagttatgagaattgaatagtgtaattaagacttttcaattacctctaatgatataattacctttaaatt

SEQ ID NO: 237218 - DNA, 788 bp, Cannabis indica
gatgaataatggggtttaagagttttgtttatcaactgttcaaaaaagaaaaacaaaagaagagttatttattttactatatatattttttgtccatagaacatagaatagaagtaattaatataggtagcatagcagaagccagaaagaaagaaagaaaaatttaaaaagccagttggtcaacatgaaatcccagatcctctgactgtttgctttgaaggtagggaaggtttaatgttttgagcattaaaaggctttacaaccccaataaagctacctatgttcactttcttcaaaataaatatataaaatataaacaagagagagagagagagagagagaagtgaagtttgacttgcatatgaccatgctcctcacgcgacagaacataagagtttaaaaagagatactacaaccagtttaagatacacactgcaaaaccaccagagataccagagtccaatgctagcatccattaaagatactacaaatctatacattatctaaaaataaaataatttcatattatttttagcaatctttacttttaaaattaattcaatagtacaacactctttaaaaatagtataattataatctcacacattattatttaagttttttagtaacaataattttttattaaaaaaataataatagtatcaatgctactgtatagcatctacacaaatttttaagatagcattcttttttctctaatagtatagtttctcaatattttgccactttatctatccacttcagcaagcatcagagatgctctaatt

SEQ ID NO: 237219 - DNA, 884 bp, Cannabis indica
gggcataaaacccaacagaccagccctatacaacttgaaggcacaacatacattcaccacactgcctgaaattcctagcaaggcaggggtaggatgttgaaagaagaccaatgatttgcctgtcattgttctaacttggccttgtccaaagccaagaaatagaagatgaatccatcagatcaggagcacacaagcttcatagtgttcaatgatcttatcaaacataacatggaggtgtgcgtggacgatatgcttgttaagtccaaaagggttgggggcacatggaagacctagacagaaaacttcaaaatcctctacagctacaacatgaagaagctcgaacccgaacaagatctaagccctttcgaacatgaagtcgcccacaacaatcaggaagtacaaagccaaatacgatgcactgttgcactataggtaaacttctgtccaagtatacagacaagtgtgtacccttcttcaacatgaagcaaaagcaacaacaaatttgagtggacaaaagaatgtgaaatttcaatctaggagctgaagaaatagattggctcagccacctctgttgcccaaatccctagacaaagaagagctaggcgtgcacctagtagtcacagaacatgttgtgaatactgccctcacaagagaagaagacggtttatagcaccttgtatactacaccagcaagagactgaccgacactaaaagttggctcctactcatggagaagctgacccacaacttgctcttggtttccagaaagctaaggctatacatccaaatatgccacataaaggtgtacaccaaacaatattcaaggtaggtttttcagaaacctaaagcattaggccaaccactcaagtgaaccattgagactc

SEQ ID NO: 237220 - DNA, 615 bp, Cannabis indica
ttaatattaactaatataatttacgaaaagaaattattaaataacatactaaacatatcaaaattataaatttgattatgtttatcacccctctctcctcacataataaaagtaagtatttcctgattattatttaatttattttatgtacagagcacacttattagaaaggatattaaggatgtttacaagtgagatacggtgatgacattaactttaaatatagtgatgactacatataagatacggtgatgatggttgttttgaaattatatgatgatgagttttctatagatttattactttctttctcttttagatctttattttgtgtaacaattgtttagtttttaattaatgtacatttaaaaaaaaatagcttgattttttatttatgtaagaatagtatgataatttatttttcaattttagagttttttttatatagattaataatcataattattttttaaaaaaaaatgcatgaaaataaatttaaaattatttgataataattttaaagttcaattaatatttatataataattcaactaccgcacgcgaagcaaaacctgttcactagtatataattatttgtaagagctggcatgtgta

SEQ ID NO: 237221 - DNA, 2078 bp, Cannabis indica
ttcgtacagagcatcaagtttgcttgcagaagatcatcgtaatgttgggctagctgtaagagacattgatactgaggtggtatgagtggacatttggctggaagactcaataatatcagagggtgtaagtgggctttctctataggtatcaatcaaggagaacgttacctgatttgatatgagtgaaaagcagtagaaagagatataacgctaatccatatagtcagaatcaaactcaagctttccctagcgctggcttttcttcttaccctttgtaggttatgcttttgagattgacacctactatatagactttggttttatatatcttctgggtggtagtcttggagctactgataatattcttatgatctatcctagtagagaaatatctcaaagaggagatttagaaagacatatttggaaagatagataagatttttaatatttaaaaacttgattttcttgtttctttttgcttttaagttggttttcttcatctaggattctttttagacgaagaatttggtctcccatttttgggggagatgctaacggttgagctgatttgggtaatgttgagaacatccacggtgtagagtctaggcctggagcgagaggtgatccttccatagattgagtttgcatggagacttactggctttttagaccctttagctctgcttcctaagaagaaaaatttcttgggaaactttcttagatttgaccatctatagtagttcctcgtgtacgtccgaaattttatagacaagtctggtcataacggtgtacttttgaaaatacttcgatgatctgtgtaaatttatgggtgaccgtagatagtttctcgtctctgttggagggtcttattttgggtcagcatactctctgtttgccaattgaggaccgcttcggccggggttatgaagagatgtggtttagacttctttggttatagcacgggagtaatggcttgtgctcatcatcttcacattcccatcttgttggctgaatgtcctcgtgaattaccggtttggaggaatatttgactatgtagtcaaattttcctgagggttcaacgagtgggtcaatatccctttggtcgttttcccaattttttttagcttctttccagcgcttttccttttgggtgcttcttcttgttcattaggtattgtacaatctgggcagctgcaaatgtcccaatatatgtgccctgaagatgatttgaaggcatatataggggaaccatctttatcaaaagatgatatttctgcagatgataattattatgttttaaaaaaaaaaacttacacgtatcagtgacgacttactcgttattgataattgtcattgatagcccaacttgaataaaatacatattatcaatgacgacattatcgtcactgatgtttatttttaataacgactttgaatgtcatcattgatacttactttcagcaacgagttatcactgacaattttttagtgacaacatgtcgccattgatagtcattacttacgtaaaaaaacacccgtaaatgacgaaatttgtccttattaaaacctatttttcttgtagtatcatacgatgggtgagatgacacttcgctaaataatatgggaaagacaggctcattaatcttcatgccaagtgatgtcatgccaatattttaaactccatgccaacatatgtggtgctatagcgttgtaatctccctcccaaaatatgtcagatcatatttccaaataacacatgttaccctttagaggtggttattttcaaataatcgtttttaaaggggtttcaagatatttatttttttccttttagctatggcaacgcttttgtttagtgattgaaaaaactatctttaaatatcctttttgtagtagtgcttgcccatttgtgatgcactcctcactgaaggacccttccacttaagccttcaacacttaggaaaatttaaaagtgttaagaaagggtaacaagggacaaaagacttggcatgacacgaaaagtcaaaagtacggccacgcaacttctaggcttatacaagaattagctacccttgaag

SEQ ID NO: 237222 - DNA, 1033 bp, Cannabis indica
aattactaacaaactttaactttattaataataggaatttacatattacatagagataaatacaacatttacattttaactttactagtaataaggtcgcaaatgttcactattccactggttctttattagcaagtcgttaagccgagctaatttataaaccgcagtttctactactgcttcaataacatagggaccttcccagtttggattaaacactccagcagatggatctcgtgtttttgcaaatactcatcttaacaccaaatctccaacattaaagagtcttttcttaactcttttgttaaagtatctcatgattcgatgttcataggatgcattagttacttgcgactcattacatctttcttcaagtaagtcaaaagataggttcagaagctcttggttttctgctagattatagaacccacgtctatgggtcgcaatattaacttctactcgtagcattgcctcctagccaaatgctaacgagaattgagtgtgtctcgttgttgttttctctattattctgtgagcccaaagtacctgtggtagttcatctaccgatcttccttttgtagcatcaaacttcttcttaatagtatcttttaaggttttgttaacaacttctacttgtccgttttttgtggtcttgatagtgacgagaagcttttaataatttgatttctttcacaaaattcagtaaatagctcgccgtcaaacggagtcccgttattagatactattttgattggtatttcaaatctacaaataatgttcttgacagcaaaatcaataacttttttgcaagttatgaaaactagaggttcagcctctgtcctttatgtaaagaagtcaactgctactatagcgtactttgctcctcctgagcctttgggtaatgccccattcaagtcgattccccatattgtaaattagtatggcgaggtcatcattcttagttcttttggtggtacacgaggtatatgtgaaaacctttggcatttgttgcatctcttgacaaattcatgcg

SEQ ID NO: 237223 - DNA, 1220 bp, Cannabis indica
caaaaaatcaatttgagaagtctttagtgttttttagtaggaatacggcggtggacgtcaaggataggctttgtagtctgatgagattgaatgaggctagtgaaaatagtttttatcttggccttccttgtattatgggaagaaacaagaatgctattcttggttttttgaaggaaaagatgaaaaagaagattttcagttggaaaacaaattcctctccaaagcgggaaaagaggtgttgattaagtttgtggctcaggctcttccaagttatgctatgagtgtgtttctcttaaccaaggaaatttgctctagtcttgagggtttaatggctaaattttggtggaatactcaagctaactcttctcataaagggattagttgggtcagttggaagaagttatgtcaacacaaacatgttgggggcttgggatttagagaccttaggaagtataatctttctttcttgggtaaacaagggtggagattactcacaaaggaagactcacttgttggaaggatttataaggctagatactacccgagaggctcttacctcaatgctgaattaggacaaaatcctagttttatttggcgcagtatttgggaggctcaatcccttgttcggcagggtgctagaaggtctattggagatggctcctctgtgagtgtattacatgatccatggctgcctcatgatagttggccttatgttctcacggtcaaccaaggtcttgaaggcactttggtttccaacctgatgttgatggaagagaaggggtgggatgctgagatcattgaagacatgtttgaagcccgagatgctcagctgattctgagtatacagctgagtgattcaacaacagcagactcatggcattggatgatggaacaatctgggttttataccgtcaaaagtgcctataattatcttcaatcttcaagcggtaattggcttcattttgatgatgatagttactggaaaaggctttggaaaattgatgttccttcgaaggttcttcacttcttgtggaaggcttgttcgggttctctaccaacgaaggttcaacttagcactaagcatgtgaatgtcgatcttatttgccctctttgtaatgtcttttatgagacgattttccatgtgcttgttggttgtcggtttgtcgaagcttgttggaacctctcggcaactactgctgctactggtgtggacgaattca

SEQ ID NO: 237224 - DNA, 1240 bp, Cannabis indica
gaggttgaagaaggagttcgaatttgctttgtctgaggagagttcagagtgaactgttgaaggttcttcagctgcgtggatgcaaggcgaccttgtgttcttggatctaaatgtgtttagatctcttaacttgagtttgttcaagtgttagataacatcgtgtaaaagtcatttcaaattacatagtttggtttgtaaaattaaaactggtgtttgtaattgatttgattttatagtggatgttactttacccggtttataagaatccaagcactactcgattggaatatatttccaatgtagagaaaacttgtaaatttggtgttctttgattttggtttatgtttcaattcatagtaataaccaatttagatctatcacttagctatcggagaaattaaaactttcaattaacattatatatagagagttttttgatatgcatgcttctaataaaattatacaatttgaaaggtgtttaaatattaaaattttatgctactggaaatgtctacaacaacaagtcttgaaacaaataaagtaatttatgtaaaaaaaatatctttgcttcaattccaagatgaaacttaggttaggtacatcaagttagctatagaacttgtacagagaagactacaagaacaatttaatttaataaaatcagcaaaaattgattatgtagtcataagcaatattatttcattaacttaatctagcaaaagtcaaatttattagtactaaatatacaaacatattatacattcacaaaaatcattattagattattattcatatatgtttccataaaaaaaaaattgttattatctctcaacaaatttttttaaaattatataacaaaaaggaatatttacaacaaatattgttggagataatttttttggagtaaaacttaataataaatgtatatctaatgtatcaaataatcttatataataaatatatatatatatcttattaataaaaatttggtaaattacttcatatactgcttttttacttttttaaaaaaaaaatttacggtttgggtttctaaagtggttgcagcgctagttgcaataggagtttttatacgattttttattgcaatttaggttgcagtactagttgcaatatgaattctatgtagaattctataaaaatgcaaaaaaaaaaaaaaatatattttgaagtgtataaatgaaaaagcccttaaaaattttggtaaaagtaaaatcacact

SEQ ID NO: 237225 - DNA, 1279 bp, Cannabis indica
ataagaaactcaatacctgatctgaccatatcattttgctagctggggtgaaatcaaaatcatgttggatacatgccccgggacccttcctactaagtgcatctgccaccatattggccttctcgggatggtaaaggatttcacaatcgtaatccttgaccagctccaaccaccacctctgtcttatattcaaatctttcttggtaaagaaatatttgaggctcttgtgatcggtataaatctcacacttttctctgtagagataattttgccaaatttgcaaagcaaaaactaccgcgacaagttctaaatcgtgagttgggtatcactattcatattcctttaactgactagaggcataagcgattactctatcagcttgcatctaaacacatcccagaccctgtctgtatgtttcacagtacaccaagaacttctctttatccgatggcaaggctaacaccggagctcaaatcaacggttgtttaagctcttgaaagcttgcttcacacttgtctatccacaaaacctgttgattctttttattgagttcggccaagggtgttgagatcttagaaaatacctcaacaacctaacgatcataactcgccaaacctagaaaacttctgactttagtaactatcttcggtcttggccaattcttgacgaattcaatcttccctaaatcaaccttgatcccattgataatgtgttcgagaaaagacacttgggatagccaaaattcatgctccacttctgattagagtatacaaggatgtcgtcgataaataatatgacacatatattgagaaaatccttgaataccctattcatcatatccataaaggttgccaaagcattggttagtccaaaagacataaaccaaaagttgatagtgcctatacctagtgcaaaaagtagtcttagaatgtccttctctcgaattctcaattgataatagcctggtaggagattaatcttagagaagatcatttttccctaaatctaatcgaacaggtcgtcgatcttagggaaaggataattattcttgatattcaatttgtttagttcccacgagtcaatacacatgggtagggattcatctttcttcttaacaaacaacatgggagctccccagtgtgacacactaggtcatgaaaaccctaggtcaagcaacctctaaagttgactctcaattcttaagctctaccacgagcaatttgtaaggtgctttagaactagttatgctctatgtcctaaatcgataatgaaatctatt

SEQ ID NO: 237226 - DNA, 933 bp, Cannabis indica
aagagtatgaagaaaagcttgaacctaggtcaacatagagcttctcaatttcataagatgaattagtatgatgtagaaacaagttttgtgtataagttgatgatggtattagacagaaggttttggatgagcttcataccacgccatatttactacatccgggaatagctaagatgtatcacaatgtaaaagcctgtactagtggtcaggtatgagaagtgacattgttgagtatgtgtcaattgttgaatttgccagcaggtaaagttaaagcatcagagaccagcgggcatacttcaacctctaatggttcctaagtggaaatgggaagaaagaaccatggacttatatagagttctacaatcctatgtaagtaattattgatggatatacaaagatagatcactttttaccagtactgactatgtatacagtggaccaatatgctgatcttttgtcaatgagatagttcgacttcatggtgcacaaagacgatcattttggatcaagattcaaagtttacatccaagtactaggagagtctccaatgagcaatggataccaaattagagttctgtttgagagaacaatttagggtactgttggcatggtaccgtacgagatgctttatggttgaaagtgtcgttcacccattcattgggatgaagctggtggacaaagataccttggacatgaggcattccaaatattagcaatattaaattctatgttgggaattttatctttcttcagttgtttccaatgaagtgtactcggaaattggaaagaaaggaaagttaagtcccagatttatcaaactgtttgagtttctggaaaagggaggttaggtagcttatcatctaaccatgctccctaccttacttggagttcacaaattgtatttaaaatgtttagaagtatgaggtagatacg

SEQ ID NO: 237227 - DNA, 1455 bp, Cannabis indica
ttttggcaattagtctgccaggccataaagacgccatcatcaaagggtttggtgcagtgcttgtagacaacggggcccaggagctcatccctttttgccttcttcagggcctgatctttgaattccctcagctccttcacctcaacggtcaagttggccgtcgtttgcaagtcagcccgatgcagttcctccattgacttcagcctggcagtgagatctttcaactacctcccttggcctccctcagctcgcgccttgcctttttccacggcctcatccccggggtcttcaactcctctgcctttggcccttcaacgcctcctaatgcctcctctccgccccgagcctctctctgttgagcttcctcccgaaatgccttcctctcagccgccagatctctcagactcttcatggcctcgcccatgcccttgaacttggacatgacgtacctatgatcaattaaagtttttgagaggcgaccggtctctgcagcaatctgacaaaataagaaaaaaaggttaagtatgggagatcaggtgccacagagtaaaaccccaagaacagtaacagagacttaccgcggtcagagcggcgctgatatcctgaatctgatagatggagtttgtggaagcgcaagctgcgtatcttttggccggagttgggttaggttggagacaaaatggctcatcaactcggaggcgaagggagcaagagtaggcccgacaaagcgattgaaccagtccgtcaggggatccatattcaggtcccaagcattcctgaaggcctcctcgcacaaggaattttgctgggcctcccgcaagacctttttcaaagcctctacctcggcgttccctcttgtatactcggccatagcataatcatgcttcgctatctggagctgctgtctctccttgtctgcgggaatgggggtaagaatgatgctggtaggcacagtgtactcctccgcttctggtggaatccccgagtcagagctgacagacggagtgttcaccctcttagcctttttggaagactctacctccaccactttgcccttatgtttttggtccaaggggccaggatctcaccctctccctcctcctcctcgacctctccgtcttcatcgatcaagacgatttggcctaaaggggcactagaagaagaccttctcgggatcaccaactggtcaagcgccggaggaagagcagagtcaaggctgtaggtctgggtaagagtcgccaaaagatcctccatttgcttggctgcttcaaaaagacaaacaaattaagtgtcagagtggccatgagaaaatgtgcacacgaaaacaaagcggtaaaactagtcctaccctgactatctaactcagtcctagcaaagtcttgcactacaatactggcttcatcatccccaagaaagttgtccgaggggagaaaccagctggaagacagataagct

SEQ ID NO: 237228 - DNA, 882 bp, Cannabis indica
aagctttaaatactcagcttctcactcgagacaagttccaacagtttcacatcgtgttggacaatgttgattgtccggtttgtggatatacaaccgagacaaaccaacatcttgtgcagctactctcaaatggttctagagtagatcgggggctggttggggaaaaagacttggccggttgattatcatggctggaaaaattggttgattcttgacagaaggaacaagctacacaggatccatatggtaatcttagctgctgtgatatacaatgtgtggattaaccgaaacaattgtatttttagaggctattcttggctgacggctaagatagtgcaggagattaaacaagcttccttgtatagattgaatataggaaaaaagaggaaaatagatagacttgagagaatgtacatagagcaattatgttgtaaataaggtttcggttggtctaagcttgtttttgttgcttagagttggttgtaattgcttgtgattaatgaagtttgttccttcttgataaaaaaaaaagacagtttgttgagaaatcagtttttcaagtttaaagcctactaatatctgaaactaatttaaattaataatgtaattaagaaaaaattaattttaatatgataattagatttttatttgaaatataagattctacgtaaaattctactaaaatttgaatttattcattgacaaacgatttttaaaagttgaaaaattataaaaattggcaaaaaatgagagaaggcattgcatactccaccgcacgcgaagatgggagtttggctaaggaaacaggctgcgtgcagcctccatgtaatgaccgcatattagattatgtatttgtaaatgcaattagcattaatattgaca

SEQ ID NO: 237229 - DNA, 2002 bp, Cannabis indica
atcagcctcattatgcatccactaaaaataaaaaaacaatagcgaacattagtgaaaggatgaaatatataatctagggaacttcattcatctctaaagcactgtaattcaacagctaaagagtcaaactcaagccccatcaaaaactcacaaagaaaaatcattcaaaaaaaacaaagtgtttgtctcatggccggccgaataggtaaatgcagcgaagccactacccaagacaatggaatatgagaccacccgaaacggaggaactcccaaaaatgggagaaccgtcaacgttatcgagattttttatacgacgcttacttgggattatacaaacattaaaatagttcgctcccatatataaagcaggagacttcctcgcagaaatctcacgtcgaatgattaatacaaaattctgctcagggaaaatgaattgtctatctcattgattttctttcgaaaatctccgaagtctgacatgtgttaattaattcaaaattcctcactgcagattgtttaatgaaagagcaacaaaaagagaattgatatttgtagctctcattgaaatataaattttctactcataatgaatcagaatagcgtatattgccgattaggcacgtaatcacagagccgtaaacttaacaaagaattttattcaataaccaaaacaaaaattatgtgaggataagcaattaaagtgatagatcagaagtggttaaaggttgtcggtcacggtaaaatcagtaacacggaccaattgttaatcatcacatccaacacaataatttcatcaaaaataattgaaaacaaatctaaatgacaaattgaaccaaaacaaacaatggagaaaacgatcagagatggttaagggttgtcggtcacgttaaaatcagaaacacggaccaaaggttactcatcatatctacaaagataattttgatatatgaaaaataattttacaagaaaaattcaaaactgaaataaaaaaatcatcagagacttaagtactaagaatcatggaaagaatccatcatattgttgcagttatattctcatcagttgattgccaatcacaaataaaaaagtaaaggaaaaccagaaagagtaaataggaggaacgaaccgagtagccaaaccctaagatatggtgatgatactgtgagatacaaagagcttgcctctcattgtttatgaaagcgcctttttatagcaaatgagatgaaaccctaaattggcgatggggatttaaatgggcctcaataagcccatgaaaggcatgaccctctatcaacgtaaacaataattttctgaaccctagcccaaatatccgaccaattcttttatgaatgaaaactctataaaatatgcccatttttttccaactttatatatttttattatatttttttaattttttcagtgaactatgcaatgttttccaaacaaatgtgagtctctttaaaaatatcacccaattcattcaaaaaataaaaataaaaaaaaatagaaaaatttacataatttttggattaaatagtaaaacaatactttaaacaaaaattcctcataatcccacttaaaactcactaacaacccattaatcttaaacaatactaaacaaaaataccattaaatataactattaacaataacccataattaatcttagaaactcacctcaaatgaagatttttgaggcaaaaattacacaaaaccgagcttcccaacaacagccgatgcatatgattttttttctttttttggtagaataatgcatatgaatttgaaatagataaatttctctaataagtaaaccaacttactaccactttcactagaacgagcttgagattcaccaaaccgaagaagaattaattaaaatttaatttgcatccataatgtgaaaataattctaaaccaagtgtcaatcatccataatgtaagctatatattgagtcaaaagaattttcaaattcaaaattttcaaaggccacattta

SEQ ID NO: 237230 - DNA, 811 bp, Cannabis indica
aaatagggccatttacttacatttctcgatcatatttccccttatttgtttatttgggctgcgaaatttctctctgagctcttagaggaggccctcactaatggaaacataaaaggtagccaataattattagcaatgtgtgaaattttgttccaggttaggacaacaaattaaagagcttttggtaatgaaaagagggattaaagagcttttgggaattaatgagttgcacgagaatataaaatatttgggccttccacttctaaacacgagacagaaagatgtagatttcaattttattttagagaattttattgccaagctccaaggttggaaggtgaagactctctccaaagctagtcgtgctacttctatcaagttctgggtttgtcgttgtcgatgtattccatgaatacgactaagctttctaatattctagcgacaagaattgatggaatggttagaaatttctggtggttctttgaaaaaggaaaccatgggatccacctaaaggcgtgggacaaagtgtgtctgcctaagtctcgtggtggattggccttccgtaaaacaagagagatgaatcaagcttttttggttaggtgggtttggaatttgttaacgggtaatcaatctttctattgtaagattttgaaagttaaatatttacagggtaaaagtttcttcccctgggcctacaagaattttgatttctagttctaacataatatggtaaaagctaaagcaacaatcaagaaaggtggctgtaaaatggtatcttttggtaaagacaccaggatctgggaggatccct

SEQ ID NO: 237231 - DNA, 1601 bp, Cannabis indica
acatatggtggatcagatgcagagttgtatgtaaaagaaataattcgcctccatggagttccaaaatctattatttaagacagggatcacaagttcacatcaaaattttgggtgagtctgtaaaaagccatgggtactaacctgaagtttagtacagcttttcatcctcaaacaaatgggaaatctgagcgaacaattcaaatacttgaagatttgttacgagcttgtgtcatggactttgagggttcatggagtaaatatttgcctctagttgaattctcatacaataatagttaccagagtactataaggatggctccctatgagttgctttatggcagaaattgttgttccccaattcattaggataaaacttgagaataaaagtatctaggccctgaattagttcagaggacaaatgaggcaatagacaagattaaagctcgaatgcttgcttcgcaaagcaggcagaaaagttatgcagaccccaagcgtagagatattgcatttcaagtaggagagcatgttttcctgcgggtttcaccagtgaaaggtattagacgctttgggaaaaaaaggcaagctaagccctagatttatagggcctttcgaaatactcgtgaaggtcgaccaggtggcatatcaattggccttgccagtagcattatcagctgtgcataacatattccatgtgtcgatattgaggaaatatgtatcagacccaatgcatattctgagttatgaagccctagaacaacagccagatctatcttatgatgagcagccagtgcaaatcctggatagaaaggaaaaagttctttaaaacaaaaccatagtgctggttaaggtgctctggaagaatagtaaagtggaagaagccacttggaagttgaagtccaacatgagaacttaatatccagagctattcaggttagatttcgaggcaaaatccttttaacgggaaaaaatgtaaagaccacttaattttaatatgatagattagcaaataattaaggtttaattatgaattagattattaaccatgatttatgcatttatgaagatttatttgagttctagatgcgttattcatgatatatatgaaatttcttgttttttgtatttgtgcctgataacagtagaacgtgacgttgggccaatagtgagtcacgttttcttatgatttaatattttagtagtagtggggcaacttagataggcattagaaatgttggtaataattaggatataagaaataaccaaattacccctaggtggcatgtgtgtgtatatgggtacgaatgcatgttaattatattgtttacactaccaacgctataatagttgtaatactgagtatgttggtacaatgtatgatgtttaagggtatgttacaatgttaccaacacgagtacaagtgggtacgaagtgcatgtggtacaacactcagtagcacccgaaagtacaatttaaccctaccaaaactagtacggaggtggtacttcagtgcatgtcgtacagaggttgtactttcgtttagaacgttcttgaccatttggtgagtcgtataattaggcacatgatgttggatatttatttta

SEQ ID NO: 237232 - DNA, 1004 bp, Cannabis indica
cagataataaggagatgtgtgcctgaagaagagatgtattctatcttgctggccctcttgacccagccatgcagtacacgcatgaccagcttaattatcttattcaacaaaacattcacatgcagagttatatggtgcagaggagtgtatttgacgagaaccaagtgcaacagttgaattcgctgatcacaatgatgaatgttgggattgacgagcctaattacttggcaaatccaccccatttttatccttatgaccagccgcctccaccaaatctctgttgatggggctcatgtaagtctctctctcctaaattttatctcatattggggacaatgtgcatctctagtttggggggagggatttaaatttttcagtttatgttttttgtttatttagtttagtttttgttttagattcatgtgttgataacttagccgaaatattgtttgaactactgttgtttattcgtgcaatggattgagatttaaaccgtgtgcttgattcataaattctttgaattgaattggatggcttgtaaacattattttgtaacaatttttttcatatagatgtgaagcattgatttttggatagtatcacttttattctacatgggtttgtggaatgtttgcttgacatggaatagaacttgtgcgacttactctcttgaagcgaaatccttgatgattgttgcttggaaaatgatttaagcaattttctttggaccgattgagcatttcaagcttacctgtaaaattttgtccttagtatacccaaagttgagctttagcctatttcaaaattttacccacttaattgagcctaatgtgttgtctttaattactttcattctcaatgtaccttattatgccatatgcttttaattaagttggggggggggatgaagtgtgttgagtgggtaatattttggaagagattgaaaaattatgggaagtgtcttaccatcgatagaaaagaaaaaaaaaacgaagaaaaaaaaa

SEQ ID NO: 237233 - DNA, 1272 bp, Cannabis indica
gggcgccaggtgggtaagccctccgtacagggttactgaggcgcgcctgtggactctcgactagggtggctacctgggcgatttggattgctacattcccgcccacaacaaccatgccacaaaccctaagaaggggatgtgcgcttggttgggtgcccatgcccagtagggggcattgatgcctttgcatcaatacttcaagaatgtggtgaacttcttcggtctctgcccggcccagttcactcctaagggcattaagtatctgtctcccctcttcgtagtctacgcctcccagaagtggggtatgccttctcctcatgaagtcagctggttctttaatttaaagtccacccctaagcaaggcaggtaggggtacttctattcctctcagccggacttcaactggttgacgggcaccgatgactcggccatcagcaaaattaggctttttgttgatgagtacttcacggtgaatggcgcgggcattaccgtactcggttccaacagatttcgacatatcaccgccctcccctcactcttgctctctatgatggagctcaaaagctcgctcgattgccgggagaagaccggaatatcatccagttgaccttcgaggataactttgtgaagtacgggctctatcaaaaggacttcattcccaaaccagtgaaggggaggaagaggaaatctgatgctggacgagctaaacaagctcatccggccccgcccaggcctattgaacatgcaattcgcattagggagcccatctcgcctgctcagccgccttctcccgtgcttcgaaaagggaaagctattatgtctgaaataagaggcatgtcaggtgatgatggactttcgagtcttgctcgggcaatcatcttgcatgttacttcatctcatttttaagcttcttgactattatgccttatgtttctgatgcctgttttctctaaccatgctgtttttgttccgtgcagacatgtctcagaagatgcttggcgctctgaataagagaattggtggaagttctagtgcatctcctccagccaagaagtctaaaggcggtgaggggtcctcttccaaggaaaaggcgcctgtcggggaggtcattgatctttctgaggagctagcggttgcaaacccatctactccaaaagttgccaagcccaaggagtctcgaggaaggagttcggacaggcctgaacaatcaaggagtgggtctaagctgactaagagtgggcccgaacagatgcgggcccctactccaccttt

SEQ ID NO: 237234 - DNA, 926 bp, Cannabis indica
tcatattatcttggacaaaaactcagaacggtgaacaaaatataaatataacagtgaactccatttgtttcaattcatattctttccatgctgtatgaaagaacaagttgctaacaccaagtatttcataatattttctattttcattagtgaagcaaaatgataagtgaacctttttttttttaacaacaggttgagtcgtccaaacagagcaaaaggacaatcacccaaatctcatcaaccacaagcattttacctcttaaaaaaagttaaggtaaccactatatgtgtatatacatataccgtactcaagaaagaaaataagaaaacatagagcatgagcaacttccttatatacataaatattcaaacgtgtatataatctcctctctaaattaggaacctggtataaaaataacaacagatttataatatatcttacaaaattattagagtattagtaaactacaaaaatgtacacatataataaaataaagtaaatatatatatatgcttcaaaatacaaatgtaactggagcagagccggtggggacgattgctagagtcgaagatgattgttgaaggcccggaaccgaggacgactacagattgaaattgttgaacctggaagaccaaaaaaataaagaacttgagagaaatctaagtgaacagaaatttttttaaagaaaaattaatagcaaaaattctagtttgatacatttaagcataataataagatctatgagaggagagatcttagaggttaagagaaaatatataaatatatatatatacttacagtgagagaaatggacgtgagcaagaaatattgaggagagagagtgaatcggcaggggttctactttagaaatttaggagttttacatagatttatacaatttaaaatttttgggtttagagagaaa

SEQ ID NO: 237235 - DNA, 841 bp, Cannabis indica
tacagtggatcaatatgctgatttgtatgtgaaagaaatagtgaggttacatggcgttccgaagtccaatatatcagatagagattcgaagtttactttaaagttctggcagagtctttagcgggatatggatactaaattgaaattcagtacaacattccattctaagactgatggacagtctgaaacaacaattcagatactggaagacatgttacgagcctatgtaatggatttcgagggctcttggagtaagtacctgccactaatagaatttttgtacaataacagctaccaaagaacaatagggatggctccttatgagttgttttatggaaggaagtgtagatatcccatccactgggatgaaacgggagaaaagaaatacctaggttcgaaatcagtgcaacagactaatgaagccatagaaaatattaaggccataatgcttgcctctcagagtaggcaaaagagttatgcagatctgaagcgcagaaatgtagactttccggtaggagatcatatattcctatgggtgtcttcgatgaaggggatcaaacatttcaataaaagaagcaagttatgccctatgtttacaggacctttcgagattctcgagaaggttggactagtggcttatcgtctagctttgcccccagctcttttagcagttcataatgtatttcatgtttccatgttacgaaagtacgtttcagatcatgctcatgtattgagttatgagaatcttgagctacaaccagatctatcatacgaagaacaacaactttagatcttagacagaaaagagaaggttcttgggaacaagaccatagctttggtc

SEQ ID NO: 237236 - DNA, 879 bp, Cannabis indica
tttatttttgtgatttaaaaattaaaaaaatgaaaatattacaaaacacattattatacatgcatttaagtttaacatacaataaatatatttgatttttaccatatgtgttgtccgacaatctaaattctaaactacacataaaatatcatttcctaatatatatttgtatttagctatatacacatgtcactcactaaataaaagtaagaatagtctatattctctttacataagtgtaattattagactaatgagttaatgtattattaagttgcaaaattaaatatttcaatatacgaaatttggttaaacattcgatgttttgctcttattttaaagacctcacagtcattacataatatgtttggtaaatagcagaatatcactaaataacttgtggataaatgcccacttagtcacattatgggcaataaaattacaagtcctgctaatatgagagaaaataaaactcgaaaataaagaagagtgactattacaaaaagaaacatagttttcaataatccaatgagactccttcccattgagagcattgatgactaccctcgaatcgctctccacgatgacaaacttggcatcaaaatccaaagcagtagaaatagccaaacagtacgccgccacttccccacaaagagcatcaaaaaagtcaagacaagtcgtatgaactcgaaccacctcgcctaaatggttcctggcaataactgctatacacatgctatcaagccgcactttaacatcgcaatttagtttgatccaatcttgagggggggagaccagcactcctcaggcaagggacagggtaagggaaaatagtagcatgtaattctgcaaaagaaaattgaatagagtcaatgcact

SEQ ID NO: 237237 - DNA, 713 bp, Cannabis indica
gatgagattgccaacttcaaatgtctgactcttgactttggaattaagttccttgaaattttgcctagtacatttttagcctgacttgggactcttcaatcaaatccaaagattcttgaagtagagcatggttccgggtagggtcataagtttctattctatgagatggaatagtgttttcaactgtgatgactgctttgctccgtacaccatcaaataaggagtgtgcctcgttgaaattctctcggtggtcttgtatgcccaaagaactctaggaagttcttttggccaatgatctttacaagcttacaatttcttcttcaacgtgttcttcaggattttattgacggcttccacttgttcgtttgcctatggtctggccatagctgagaaacttttgatgataccgtacttaacacaaagtcaatgaagtgatcgctattaaattgtttcccattgtttgctatgattttgtgtggaaggctgaaacgacatactatatttttgatgacaaagtttaaagccttcttggaggtgaccgtggtcatgggttctgcctccacccacttggtgaagcaatccacagtaactatgacgtatttaactcctccttttccaattggaagagagcctactaagtcgattccccaaacaacaaaaggtcatttattgttcataagggtgatttctgttggtggagcttgcaaaacctt

SEQ ID NO: 237238 - DNA, 789 bp, Cannabis indica
catgtgtgtgctttataaaattcttattttatacactatataattatattgaaagtgtgggtaattaaaattttataactaaaacaaacacataaaacttttttcttatataaaagataagtaatattaactacggggtccccctattttcaaaatatttacaaaccagtttattagtgcttttaaaacagaaaatttgcatttccaaaatacattcaaaatagagcatcctgctcactggttcgtgccactgcggctgatatgtacattgctactatgacctcaaactcatggctgcttgacctttgccttccgtttacatgcaccataaagtacccgtgagtcacagagactcagcaagaaaagtgaataaaacaataatcaatataatattcaacaattcaatctcatatcaacgtgcttacacatttacaccataacataaacacataatcatggtactttataaagtacccctttaccactcgttaaccacgagctgaatatatcaccatcgttgcccaatgaagcaaacgataagtaagaaacctatctggagtttcaggagtaattactcgtaatgataataaccgtttccaaccctcggtcataactgggactcaacaaacatttatccagaatctcgataataatcgaggctataatcattcaaccgctaacatctaaccacatatggtgcttaccacttttcttaccttaattcaaaactcaagcgtgcgggccgacctgagtggaaaacaagctgggcgatctcagtcctatgtcacg

SEQ ID NO: 237239 - DNA, 712 bp, Cannabis indica
tttttcataaatatgggaaaatagggtagagtttactttttatttggcataaataaataatgtaaaaaaatatgggattaaaaaataattaaagtttaaaatatagagaaaaaataataaataaatttaataaaaattgtaataataagtttcgtcggaaaattcgtcgatgccgaaaagttattgtcaccggaaaagtcacaatcgctagaaagttaccaaaaaagtcatcgtccctggacaagtcaccagaagtagatttctcagatataaataaaagtagaaccagtttcataacataatgaataaaaacaaataactcaaaccgattataattgaaatatagccgattataattgaaatacaaccggctatgtaacataataaataaaaataaataacacaaaataacttaaaccaattataataaatatagagtctctcctctatctcttgcttctctgtctcatcaagctcaatcgactcgctaaaaggttttacttccatcttcttgccaactggagccttcaaatttttcttgcactctaccataatgtgaccataaccatgtcaagctttgcatctaattggaagccactcataatcaacccctgttcaacaagttgaccatgttcatttaaataatgaacgactctcagaggctcatctgttatgtccatctccatgagaactcttataaaatttttaccca

SEQ ID NO: 237240 - DNA, 1414 bp, Cannabis indica
ttttttttgaagaaaagcgtgcttatattgatcgaaaggggttagacctcgcggtcattacaaaataacgaattgggaaaagaggaaatagggacgacgccaaacctctgatgggaaaatgcccacttagccacattatgggccataaagttataaagtctactaacatattgaaaattacagccaataaacgaggaggagagagttttacaaaaggagacatagttatcaagctcccaacgggactccttcccattaagagcgttgatcactaccctcgaatcactctccacaatcaaaaacttgacaccacgagctttagcctcctctaaggcaaaacagcaggccgccgcttccccgcagaggacattagaaaaccccaacttcaaagtagacacccagatcaccttgccagcgtgatcccttgcaaccaccgcagcgcacatgcactccaaccccattctaatatcgcaattgagcttcaaccaatcttgagggggggggactccaagaactcgtcggctgagggatggggcaagggagcaagaaagcatgatgatctgcaaaagagaaacgaatagagtcaatgcatttaaaaatatccacaggacagttattgtgtaccttctcattccgggtccgccatatcgtgtcaataatgagtgatgcataaagaaagacctcttgatcattgatgcctctctttttgagatcccataagaatttaacccagtcccacatttttataccggtatcacagataggaaaaattcccaagggagacgacctccataagtgagaggcaacattacaagctaagaaaagatgctccatagactcctcctccagaccacacaaggggcaactttcgtcttctacagggaaccttcttcgtaacaccgaacgaacagggagagccttagacagaatacaccaccataaaacctttagtctctctggaatcttactattccagagcttgttccacagagatggggccacctcgcccgggttttctctatccacgacctgggccaaataagctgatttgcaagagaatcgaccattactttccaaagtccagaaccagctatcatttccgaggccagcgagaggaccccctttcagaatggctgaaatagtatcttgatcaaacaacttgtgaagagtttggaggttccatccaccattatccaaaaggagctcagctacctttacctccctattcaaatcccgaccaattggttgagggataaaaccctttaagtgtgcaacccaaggatcctcccaaatattagtatcccttccatcaaccactctcttgcaggcacctttgcaaattaatgctttagatttagccacattcttccagaaccaggagtctgaggctctcggctcgcagtcaaggaaagac

SEQ ID NO: 237241 - DNA, 1802 bp, Cannabis indica
caagagtttgagatcaaagactttggtacttttagaatactaatttattggaggaatcttcattaagaaatgtaagtatgttcttgatctgcttaaagagactgttatggtagagtgtaaatctgttgaaacacccattgaaccaaatattaaattgcaacccacacaagcagagaatgtgaaggaccgaaaatgttatcaacgtttagttgggagactgatttacctatcatacacacgaccaaatatagcatttttagtgagtacagtgagtcagttcatgcacgcacatgaacctaaacacttcgaagctatctacagaatctaaaagtatctaaaaggaataccatgtttaagtcaagaggccatttacacattgaagcctatactgatacagattaggctgggagaatagtggatatagaagatctacattagattattgttcgtttgttggaggtaacttagtcacatggcagagtaaaaaatagaatatgattgatagaattagtggtgagactgagtttaaagttgttgctcttgtgtgagatattatgaataagaaggttacttgaaaagttgaaggtatctcaagcatgtcctatgaaactatactttgattgcacataatccagttctgcagataaacatttcatcaaagaaaagataaaggatgaattgaattgcataacttattttcataccaaagtagtagatatttttacaaagggattgttcaaaaatcagtttgattttctgaatagtaatctggctataccaacttgaaggagagtgttggagaaaatcaaattattttagaaagttttctaattctagaatgattctttaaagctataaaatagcttatttatttactaattttatttattattgaaaagtaattaatagggtgatatatcattaaggcaactatatatgtgcatatattgtagtattcacaatgatataaaatatcagaaaattccctgcttttgactgttaccgtatatttataactaaactcatgacagtaagtaacaattctttcaaaagaaaaaaaaagtaactagtggacaacttgtccagctcactccttacacttctaactaattgacacactaaaacacttatacttgatagaagctcacgaccaagtcctatttgatatttccaagaaaaaaaaaagaagagatgctattgtgtaattaaagtttaatagctattacggaaaaacaaattatcccatatattatttttcaaacttttttttttatttattttttacagtttgagttgtttcggtagttgctattttgtaaatttaaattacgatttaaattattttattaattgctacgtgagttgctagcgttttcgtaaaaatatagaaaaaaatatataaattaataaagcatgatgatcctagttaatataatagcatattattctattatcttttttaagtaattttattgtaagacacttctaatgtgttattgagacttgaccaacacgctacgaagtgtagcgacacacttttgtgataccatatcccttgtgataccacaaacattactatattactttaaagttacatttattaaaattcctcaaagaaatcaatgtacttaaactcaaatccaggcttgtggtttgtcccagtcccaccatattatatgttagtttataaataaataaaaggtgctttatcttatcttttctctctgtcacacagataaattagtttaaaatctcaaagttcttacattttcaagaaaaaagccttatttaaatctctgaca

SEQ ID NO: 237242 - DNA, 1057 bp, Cannabis indica
taaataaatagagtggtatagaaaaaaaaattaaggtgttcctataatgtatttcattgtatctcatctgttttcattattgtatcttattcgctttcaataccatatttaatttgttatcaccaccgtatcgtattctttgtcatcgatcatcgtcgctcactcgtactcatcactactgttattctcaaatatatatctcaatcttagattctatatctccaatttttttttttttaatattagagaaaattcattaatatatttaaaatttatatgataatatgaatattaaattttaaattatttatataaaaatatgttatgattcatccatacggaaggttagttaagtataaaatatctaaataaatttaaatttatttgaatagtattaatgagacataatttatggaaagttatttttaaatatttatattaatatttttaataattttttgaaattaaagttattttttaatttgatatttatatatattttttaaaaaataattaagtttaatattaaaagaaaaataagaaacgaagcaacacattatttttaattatattattttagtattgttaatgatatttctgaattaagataattttttttattgtgggtgatattttttttttcaacttacacaagatgattgatcattgacaacatgcaagacatatctgataaaatatatgtttaaatgaatttaaagcaacaaatctttatgaataaaagaatttttagtttgtaaaatctgtataatttcattgatttacaactgtcaatgtatttatatcttttataaattcaaagtatattcgttataaaataaataataataatatttgataaaatctcattttgagtaaatttgggccaaaaaatactttctaatactttttttaaatctaaacataggcaaaacacttgttttgaaagtacttaattggactttgtgtcctaaataaaactctatttcaatgtaattttttctattcaattatcaataaacaaacagatttaaattcattacttgtttaatgtgttatt

SEQ ID NO: 237243 - DNA, 1107 bp, Cannabis indica
gccagaggtaatagggttccaaaccatgtattcataactatcgtgcggtctatccaatctactaaagattctggctgccacatattaatgggtggtcccagagtcaaacagcacagagaaataaaagttattgacttagaaatgacctgttactactgaagggctggcttctgcattagccagagttatggcgaacaccatggccgaaccactacctcccttgcttaaacctgatgtaggaagggtaggagcccctccaacaaccggagtcccaccagactcaatgatacatcccactgcaccctcagctcgcagtgctttatccaccatttccacataagttgttttttcgttagtagtgatcattagatcgtgtctgatttttgcatttaacccatccaggtacttctccttttattgaaatcagtttgcacaattcccaaggccaacctcgccatgcaatcaaactgagtcgtgtactcagtaacactcatgttttctttctgagtcaaatgggtgaattcttttctcttagcacttctgaccgcctcgttatagtacttggcattaaacagttcctggaacttctcccaggtcgttatggtaatgtcatgaatcatggacaccatgtcccacaaaactaaagcgtcttcttgaaattagaaagtggcacaaaccactcaatcattacccgtgacgcccataaaattcatgatcctggtgatcacagttagccatttctcggctttcataacatcggggcctcccaagaaaactgaaggtgcctacttacggatcctttcatacaggggttccatccggttaattgtaaccaccggttcggcctgcatagtaggggcaagtgccactagcatttatggaacaggcactgcaggagcaccccgacaacttcccctgcccctgggacctcaacctcggccccgaacatttaggggaatctgagctccgtgaccttcatttgatccaaccgagtttccatggctcctggtgtttcgcctggcgtccatactaatatgtacaacctgcgtaaccaagagctagtcttgtcagattgtgatcaaagagaaacttgttggaatttatttt

SEQ ID NO: 237244 - DNA, 1073 bp, Cannabis indica
cttagctgggaaacttaagcactgttcaaagcacttttctaaatggaaaaagtcacttgggccttccatatcctccaaaattagataaattcattacaatcttaagcaggtgcaaaattgtgcttttcctgctgattctcagcttcaacgtggacgtcaactggaactcgagcttgataatcttttatataaggaggaagaatattggaagcaacgatctcgtgtacaatgcttaaactgggagataaaaatacgagatattttcaccactttgcttcttcaagacgagcgaaaaacaaaatcacatcccttttaagccctgacggatctctagtcaccgacactgaagctcttgtgaggacgattgaacattattttgaacaacttttcaccagccaaaatcctgagcaagagatcattaacaatgtcctttctggactcactaatcgcctctctgaacccgaatttaattctcttagtatcccttatactgattcagaaatcaagagagcagctttccaacttgccagtgacaaagcccctggatctgatggctacaatggttctttcttccaaaaaaaaaattggcatattgttggaaatgatgtcctagaggctgccaaaggttttttaaatggggatgctaacattgaggccattaaccacacggttatagtgcttattcccaaacactcccaccctcaactagtgactgattatcggcccataagcctctgttcgactctatacaaaatcatttctagagtccttgtcaaccgtcttaagcctatccttagctgcattatatcccctgctcaaagtgcttttcttcctgaccgtttaatttcagacaacattatcatcgggcaagaagtctttcatgctttatcccatcggacatctgggcgagatggttggatggccatcaaattggatatggccaaagccttcgatcgcgttgaatggaatttcatcaatcagatcatgaccaaattcaacttccctactcgattcatcaatctggtaatggcctgcatttcaacagtttctttctcattttctattaatcagca

SEQ ID NO: 237245 - DNA, 1317 bp, Cannabis indica
agcaccagccaatagtgagtttgcaaagatttcttgttatacggttacattaaataataacagattccaaattatttaaaatctacaaacatgacaatttcttgaaaatgtaattttatgttatcaaaaacaaacaatgattacatcttacacttctcaacatatacaaccatcttatcttgaaaagttaaaaaatgcacatttttcggagaggatttgttttggtattaattgctgatatcttcttattattatttcggattattaaaaaaatccacattattaacttcaactccccaagatcatattctacaattaaaaaatattaaaattactaaaattaattacttaattaaaaatataaataaaatgattaagttattaaataaagaaatatacaagtccacattattaatttatcaagacatagattgataagtacaatcatgttttaaagattttctttattttagttcattatgaaataaagaaaaacctaaccaatcttaataaacacaacttcaataactgaattctttaacaaatcacagatataggatacttgttttgattttcaaaatggttattcttaaaaaaaataatgaacagtgttgttataaatcacagaataaaagtaatttattttgcaatataaaaattattacaaaagaaaaaaaattgtcaccatcatctaaacgagatttaaagattgaagaaagtattactttcaataataatataataaaataaatctgtagttgtattttttttaacaacattacgagtagtttaatgtctctctaaattactaaaatttattgtctcactacatatgattgattttataaaccttgtgaatctttctttgtcgccattaattaagtgatcatgtaacccaataatatctaacttttcaattccgatttcttcttcccacatatctatctcacgttccaaaaaaaaaaaaatgagacttgatgcgagacgttctcgttttttttgttgctcgctactgaatttgccaacttcaactttcgagatgttatttaatatgtgaagccttggatttggaagactcttcacaagcaacaactgctcttgtagtgcaatgattatgtggcggatcagtatttcaaacagattaaatgattcattacacattattaaacaatatgagcagtatgtttatgagaggagtagggtgtgtgtagaagagaccagtagtgcttttaagagagaatataatttaatggcacaagaggaaaaggtgaatggagagtaatatcaatggatgatgtggtatatatagaccccacg

SEQ ID NO: 237246 - DNA, 842 bp, Cannabis indica
attttaactccaatataacaatatgcacactagtttacatttagttaatgattcataatatggttaattattgagtattattcatcattactaattacttagaaaatacgtgattttcaaaaagttaatatatatcattagcgtttattttataataattattaaattaataaaatatatgaaattatacatgcagactagccctagcaacatgtttgtttcttttaattagtacttttttattaatttatttttataaagtcttagagaacaaccacccatgagaattaagcaaaaaaaacttattgtatacaagggtgaaattattgaatatcaacatcagtcataaaaaaaattacttgagactagctcaagtggccataagtgggtgtgtgtcttggaggtcttgggttcgagtcccaagtaaaacatggttgtaatatataaacgcttaaaaaaaaaaaaaaaaacatcagtcataaaaacgttctgaattgtatccatagttaggataactcagctactaaataaatagtgctaactatgtctgataaagcatatttagctgaggtgttgacaaccacagtaagaaaacaaaaacatccagattcaaattcaatatctttttaaaccaaccccaaaaaaaaaaatcaataattgtataatttgagaacaatatatactttgacaagatccatttcaaagtactagaactcctttattaattaataatttattttggtgctctttatttaccttatatttattaattaactttctacatataatacatatctcagcaaagtcaatttaaaaagcttataatttctctctctctctct

SEQ ID NO: 237247 - DNA, 633 bp, Cannabis indica
cacgattcaactctggttcatttgcctcaatccccaattctgaacacaaattctcaatcgtatcatggaactcttcagctagctccgggtcagtcgcttcctcctggattgaagggagttctggatccttgtcgacgatctctgtagcagcactggcaggcttccggccaaccctcttcttcttcgccatgggagaagagcgggagacactttcgccttaagtacgtttcacgttgtttcttttgtatgtttgcttcaatttctttatttattactaacactttacttacgactaaaaaattatatttattcataaattatctttaatatgatttgaacttatttgttaggactaaaaacactattaattataaataaattataatttttgtgactaataatttttataaaaaataaataaataaatgttaaaaaagtattagtgatgtttaactttttattcgttatcatgttactattagtgtaattaagtattagatcttatataatttaatataataaattttaaaaaatatcgctaattaattgtataatgctattttcaaaaggtgccacaccaataatatacttaatagcaagatatatgtattaaatattttgttattaaaaaca

SEQ ID NO: 237248 - DNA, 688 bp, Cannabis indica
gtactgacgccatgtttgagcgccatggcttgtcgactgcgacactactagattcctcatcacaggcgccaaccacgtttcaggaggttgacgactctactgaaccagtgagaatcacgaagccatcggagaaggctctcaatcttgtcgacactgacatctcagctggatctgatctaggtagatcgcaatcaattttggttcgacctatgacgaagaaggcagctcgaagaacaccgaaagcggaggagatcagcgtggcttcatcggatgttgtgggttctcgatctacaccaacgaaggcagctcgaagaactccaatgtcgcagaagatagagatggcatttgatctttgcgcataaggttttgagcgtgtcagagagactgtttatgttgttaatggtggctcactatgagaatcaattcacacactgcgaatagatcggagaaggattttcgatcgtggatgacggtagatatttaatcggggacgactatggatctttaacagggagggacgacacgaaatggtcactggaggacgatcagaagcttggtcgcgccggattgcagaacatcggagcgaaaacggtgaccatcgtcttatccttactggtttgctaaaagatatatgtatacatacatcttttcaaagaaaaatatacatatataaataatgttacaaata

SEQ ID NO: 237249 - DNA, 699 bp, Cannabis indica
tttctttgtgtttctattgcagagtttttgcagactcggaaatggttttgtggtcaatgattctctcgtaccacataagtctacttcagatcagattgggttgatgtgggatggagaatctcacttctgtctttgtcgcttctcgaacaataagtacggacatggtaagtttttatgattttgtctacctgttggttcattataatccagaaaaaggttacctactacatctttggctattcaagtatatgtcttctcttgataatatgaaatactttctattagaattagtttcatttcgagaaagcaaaacaagtatcagcctaacagtatcgattagaggatgattttgttcaaacagtttgtagaaaaattgtgtactagaagatgtagcagtttaatgtaggaagatgttcaaagatggagctttttctctattaattaatgtttcacaattgtaacttgtaaggtattggatttatgattttgatatttttacacattttagtatatgattatgcttgaattgaaactataagatgaaatttaagtggtagaggaggcagatgaagttggtggcactcgaagcacttgttgaagtagtaaccgagtagccaaacgttgagtgatccctccaatcacacgcccgcccagactacatccctccggttgttgaagcacttgtaacaggggctgcaa

SEQ ID NO: 237250 - DNA, 729 bp, Cannabis indica
ttcataacctggtttaaaccataactcagcctcattcgaaagataccaagtatcaaacgtaggaaacaaacttctttcttgagcttttctccactaatcaagaatgatacgagccaaattgacaacaaactccacctgacttttcttacccttccataagagttgatttcgtgcgaaccaaattacccaaaccaacatcaccgcctgaacaatttgttcctcacacagtcatgagaataaatgaaaaaaccagtccccaagcgactctacatcaactagaatcatagccaaactcgctacccgccaacaattgtgcaaaatcacaggcaactaaacaatacaaaattaattcacctgccccgtgaaaaattagacacaacaaagagacatccacgtgtttagtcttcaaatgaactctcgtaggaagacacccattaacgaccctccatacacaatttttttacctttggaagaaatttaattgccaaaagttattccaaaacgccacaacctccccgtccacactaccctcacggtttgcctataataatttaaacgcacccttaactgtatactcaccagagattcaaacccccaatactagtaatccttagtaaccaaattgaaaagggaaataccaagaatattaactgccacttcttcatcaaataaatctttgacaacatcaacatcccaagctttctcacacaccacaaaaagactactaac

SEQ ID NO: 237251 - DNA, 856 bp, Cannabis indica
aataatgatttttagctgcagtcaaaatcatcacggagtttaacttgattttggtccaatccttgagtaattctgtaaaaaatgaattcatcacattgttaatgtaaagagaaatatcattaaatgtattttcatatacctaatccgccatattgtataaaccacaatgagaagaagctcttttgaatcaacccctcacaaatggattctccaaaagaacttgatccaatacaaactcgtcccccactgtcactagcaggtatatataggtccccatgaaaatgctctttaaagatgagaagcaaaattacaagaaaatgtacttcatgctctcctcaacttgatcacaaattgggcataatatatcttcaatctacattccaactctctccaatgctaaataagcatatttggtagtgaatctcccatgatttttctcaatcaaaacacatttgtccaccccttcacatagaggtctacccaatttaatattcgagattgtttttctatcataaatctcctcaagtttatgaaggtcccaatcattacttggatcgataagatcagccacaatgtgatttctctcacaagccattcctctcagaagacattaagggtacccacggatctttccaaatattaatagtatttcccgtgccaatagatttgtaggcccctttcctaaagaatttcttcgattcgaccatattctttcagaactaagagtttgaattccgatagctacaatttagaaaaaaatttcttgttttaaatatttagctttgagcacattacaataaagtgagtttcaattggtcataagaacatataggttaacatattttgtgagggttgc

SEQ ID NO: 237252 - DNA, 1105 bp, Cannabis indica
tacaagtttggactaatgaaacaggttgagaatgttgaaagtgagcgagaaagcccacctaagtctccaaagaagactaaggcaaaagcaagagggaaaacgaaaacaaaaccgaagtgatttaaagccaagctgcaaaatactttatgtttatcttttgttgtttagccaagatatgatatcatattttgataacttgcggttaggtttttttttaatttctatttatgttgtttaacagaacttaaagcaaatgttagtttcttgctcatggctatttttatgttcttttttgtgtttttagcctgaacgacacaacattgttagtttattcctaaatcttattattttatataatgttgattttatacatagttatgatcaaagttttattattattttttttcattttcaatgattattaacattttttttatacaatattaaaacaaaaaatcaacatgtaatctgtttcctaattacttttttatatgattataggtaaattaagcttgaagtttttctcaagcacacagtaactaaacaccaatttctagctatcttaagagtttgttcttaaagttttttttttaaattatttttattaacagtaaagaaaaaaaaaatcaatttcatataaaatatgtttaatttaaacaacattaaattttcatgtttttgcaacattaatcaagccatttaatgaaattcacggttaaactattcaatatcaaatcaattcatttaaaatgtaattcagagttgatatattcaataactactaaattcacagttaatcaattcaatatcaatcactatttaaaattcattgtttctattttctcctctttgcctctgcaaaaatgttgtatttatgttactttttttattgttgttgtgttttgtaactgctgtttgttcaatctagagatgggttcttgcatgtcctcatgttgtgtccttttcttccatatttggtgcatttattttgtgtctttgtctcccaatttgatcttgttcttttcttttttgatcttcccgctttcacccgttcaagtggtggcaatattttaatatctttgatctcttgtggaatgtcccaatt

SEQ ID NO: 237253 - DNA, 531 bp, Cannabis indica
gccggtcatgatgttttagaaaaaggccttatgtctgaataagatatatatataagaaagaaagataaaaagagaagtatttaaacagccggagtccctggctcttggttcgggttttctgggccgataggaggtggatgatctgttgtctgagcggaaggaacatcaacattctggccagaggtagaagcactcgcctggggttcaccataagccacttgggaagcgcagtattcgagatacatgtctttggctttgcccaagtaatcgaaatttggctgagggttagccttccaaaagtatctcgagaccagttacctctgtgcgcgcgaatgagaggggacgtgcgagtgagaaggctgcacgaagcctctgttggttgagggagctcaacgtgaggaggccttcagacaaggccttgttcgagtaaccttggtcaggcacttgtctgaagacacgtactggccgagtgaagggcctcatccatgcgcgcatgtgtagtgccaactttcagatattttcatccaaatt

SEQ ID NO: 237254 - DNA, 5058 bp, Cannabis indica
taagaatggactttattctatgataatgatactgttttgaactggaattactttattgttgaatagctcggcatgggagtcacatgctttgattatagttttgttaaatctatagttggctcttcgaattgtttcggataataaataatggaaattgatttgatcttgtggatagtacgttctttctaaatgtatttattgattaatacccactgtaatcgttgtgcttactgcttaccaattgcttttgcatagattgtttttatttgttttgtgggcattttcattttagatatgtgttctcaaaattacatgatagcatgagtttcttgtgtgttagataattaatcattgttctgttattctgtggctgttagtagtcagtactaggtttccaatacattatgtctagtaagtgttctttagtgttaaatcttgtctgggtgtgtatgacattatattacattgatcaagctttagtttgaaaactttggcttgaaatgaactatacattatgctttaactcgaatataaaattgtcaattaaaaacctggggagctttgaaatttgttacatacatgtattctttcctaacctgtaatgctataacattttaatttttcatcaatcctgcaatctagaagctcctgaacagtgtttgttcagtcaagtgctatattgctcaaatgacttggtctagcctgatttaggggtctggtgagttcatgtcagtccacttcagtttaggagttagtactagctggtgcttatttgaaatattctccggaagagtatttttgtagttacctttctctactcttccttgttaatcaccgtagcacgaagaaagaaatattcgaaatcaaatatacaataaataatattagttcttgggattcctttgttgaacttaaaaatattctcatagttaggagttgagtgaatatttatataacattagggacatctttagtatgtgttttgttatggcattcagagtaccaagctttggattgttgcatgtctttgaagttagtcagtcagtgactggactgatgcccaaagatgatccccagttgagcgaattgagcaggtgaataatattgtctgttatatctgtatcagaaaacttattcaggaattaaatatattctagaacattctaacatggcaggacattagggaccaacattagtagactaaagtaattaaaagaaagtgttttgttaggtcgaatggtcaggtcatagtttgctcccatgaggtcatggttcaatttcttaaggacctagtaacaatctgctattttccgagtgcatggtgtagtgattgggacgcttcttcataagtccctcattgttgccttctggaattcaagtccctatggtgacatttggaacttgactttaaaaatggcactcctttggagctacaggtgaatagtgggtaagttatgggttccctggtgatctccaggattaagctggaggagatgacgatatgatgtaccacttttgcctctcaaagattgtagggttcatgaaatagtatgagcccaaatgcgtattaaagaaacaaaggggaatagtcgtttactttcaaacttattttgtaattcttcaggatggtaggctatgccattgtttgttaggagcatttctatggggcattaaagtgcctaatactactatgaggtggcgtactataattggttagtgattttttataatttttattaaagtaaaatatgtgagatcgtaagacttaatattgaattatagtaaccgtttagcatttctccattgttagagatagagcttaatggaaggtgggtggtgtctatagagactcaagggagggatagagtatagattttgagccagtaacttgtatttaatttcttcctacccctttctagataaatgcattaaatccttggtgatgaatgctacatctatttcttccacatttggaaaagtgttactttcattaaaatgcattaaattctcactttggggagtttgatttaagttctcatactaaacaggagacgatatatgatacattcgaacgttttttcaatcaagaatcgtggtgatagtattcaaatattcgaattaacaactcacaaagccagcttctatttatagttcaaatacttataatatttcatcagtttacctataattatttataatttatatctttcttctttgacatttacaataatttttcttattagtaactgttgtcaaatcttgaggatatgtccattcttcctcaccaagttcatcagttaagttttcttaaattggcattattgtttagaatgccgttaattgcaaaacaagtgtcaaatttattgtgcgttttgtttagtataaatattgtcatgtgaaaatatacaacttgttttatcaagggtggtctttgtttattttgaagacctttttgctctcaattttggaaagattaaaatgtagtgaaccctagtttgttttcaatatcttcccatctaaatattgtgaggtgcgacctaactaagtagttaagtaccaactttcaattgcaagtattggatgcagtaatagtaacaggaaaacaaaattttccaaatattcacaatgatcccagagaatgaatacgggacaaaatctagtgtctgctcatatacaagggggttcagcactctacatgagcaaaattcaaagcctcaatcaaccccaattattgcaaaaaaagaaaaagaagagaagcttggaacagatactacccaaggatgaagaaatgtttatcgccaatgcaaaattagtcaaatctcattttggaactcggagatgaacaaatgggacttaatttaaatccctctttaatttatgcgagaaattgggaaggaaaaaaaattatttgaagattagcctccagttttagagcaacattgactcggggttctcaatgtagcctttgaatgcttttagccactctgcaccaaccgcacctgagaaaaacacaacaggtaattatttacttggtaaacattaaaaagagaaaggatgaagtgtccacatatctaggtgaactacttgaaaaacttaccatcaataacgcgatgatcgcaacttagtgttgcagacatgaaggaagcaaacttgtattgctcgggcccggagctaggcacaactctcttctcagctgcgctcaaaacaaaagggcaaaaaatgtcaaatccaaggagaaaatatccactctaaacaaaaagacaatgtctagggttgggcttaccagatccaattgcaagaatgcctgattgaggagggttgatgatggcacagaattgcttgataccgaagggacctcccagatttgagactgtaaatgtacctccctgcacaagaggataaatactgtacatgtaaattgatgtaatcacaacttttgcattgaagttggggcaaaatattcttcttacctcataatctgcaggttttaggccgccatcttttgctttttgagccaactgcttgacctcatcagctatggtggacagacctttcttgtctgcatcctgcaagttaaatgcgagtagagcaagttaaacagataatgaataataacaagatacattttatcaagatgtaacagagccaactcccaaacatacccggataacaggggtaaaaagtcctttttctgtctgcactgcgacattgatattcacattatgaaacctaaaacaaagagaaggaataaggttttgctgaaacatgatatgaaaacacaactttcatataaatgtttcttactggcggatacattcgtcagtccatgaactattgcattgaggaactttacgaagggccaacgcagcagcctgcagcaataattacataggagttaaatctgaagagtaaacagaaaataaatgatatacatatacttaaatacattacattacttagcaaggaaaggaagaaaagaaagggctgaaagttcttgttggcagcatgcacagggtacagtttgtaaatacattgtgttggaaatgaaagcagaatcagttttgaccagagagatgcttcacccctcatcttaagcaagcatgagttttgtttcattcacttctctaaccatgaattgtttcaaactatcttataatttattgatattcgattagagaaaattttcattactaattagttgcccaacatctaatgttacaaaagaaaaaggataaatccaatacctttagtacaaggtcattaacagatatccgctttccacctgacgcttcttgtaatgcattgagctgcccacgtaacctgcaagaagagcagccatttactaagcacaagacatttaatcacagcttaacttcggaagaataaatgttaatgcagaatagtttgcttactccataaggttatcaacacatgaatctactgtcaaataataatgaggaatagtttgctttgcgaataataaacgtgatgctgtgacctgtcaaattatatcagagaataagttcagaaatcaaaacaattaaaattcaagaaatatggtccatagagtgcagaccaatataagagaatctaatcatcctggattggaaaatagttagattatttacaacacaatagtgagaataattatgagttaagaaactacctttcgtatttgagagtgaggaatgtcagtgtaatctacatctgcaggtgctgcatgcttagccttggcaggtgcctctttgctgcgagaagctacaccattgaataaaattagtatattaaactctggcattgatctaacttcactatacagaaaaattgaagagagaccaatgcacttatacaattaagataatttacaaataatcattaaccaaatgaagatcaatcatggttaaaaaagacattaatacccaagtaatcttcaatatcagctttgacaatacgtccatcaggacctgttcctttgatacttgaaagtgacacctagaataacacaaacaaagcaccagttatgaacgagaggcatctctaactgtttatgatagactt

SEQ ID NO: 237255 - DNA, 655 bp, Cannabis indica
tttttttacatttttttaattaactttgccaatttaattcatattaatgagttattaatttgaaaactattaaggataatatattattggatatataatgatgttcagaaatcattgtaaatgatagtattatgggtgattaataaaattaatgtagcccaattaatcattttttcactagaagaatgcaatatttattattttatattttaatcttggtgaaaatattaaaatttaaaaaataatttcttcaaatatattaatgttaacgcaaattttcgttaactaaatttgagtctagtcgtgactatccacaaaaaaagttataaaataaaaagtatgaacaaacaagattttttacgtggttttgcagttaaaattctgcatagtcaacgagtcaatcttattcagatttctgattattttttagggcctcttttgtatgagtttttccgtctcccttttttgatcttgtttgccactatttttaattacatagtgggcacttaattacaaagttgactataatctgtttacaacgatcatcccctaaaatcacgggatttgattacatatcacgtagtgtaaatgcggttattgttggaatttattttaccaggatcttaaatctactcacaagtatgttgtttaaaca

SEQ ID NO: 237256 - DNA, 660 bp, Cannabis indica
ttttattttaaattttaattaaaaagaatttttatttagcattaatttatggtttttaaaagtattttcttagaaaagaaagtataatttttgacaaaaatatgttctctcaaaaatacatctcgaacataattgtaacacatactcaatatctaccaaatatcaacaatactaactaaaaagagtaaaaaataataaagaaagaaatatatttttgtaagaagtatactgatataaattttctctttttaaaattaaaaatttagaaaatatatttttaacccttatattttggttaaaatgtgttgggacattatatatttttttaaaaaaaattatatttcaaaggtcttatttttacaaaagagatcaaaatagtacataaacttgaccaaatatagtacatttctttctttgtccttcagttatcttttttgcttttttgagtcatcgtgtcagaacttagcaattgattttatatttcaaattattttcaccaaaatcgggtccatattccataacactattttgattcattttgccaaacatatagtttgaaatgaaactaaaaataatagagtcgaaacaaagaaacataggttaatctattatttaatattatctaaatttaaccataaatatcaactcaaagtaacaaat

SEQ ID NO: 237257 - DNA, 536 bp, Cannabis indica
ttctcaacctcttgaactcattcacactgatttatggggccttctcatgttgtgtccaaagacaattataagtattacattctatttcttgatgatttcagtcggttctcttggatttttccactaacattgaaatcacaagcttttgaagtttttatcagatttaagagtttggttgagaaacaatttaacctaccaatcaagggagtacaagctgatgaaggaggtgaatatagaccatttgagagattcttgacagatcaaggaataaaatttcaactatcgtgtcctcacactcatgagcagaatggacgagtggagaggaaacacaggcatgtgacagaaactggtttgacattacttgcgcactctggccttgacatgagctattggtggcatgcttttcaatgtgatgcctacttaataaatcaaatgccaactccaatcattggcaacatcagcccctatgaatgcttgttccaacaacaacctgattacaagattcaaagaacctttggttgtgcttgtttcccaca

SEQ ID NO: 237258 - DNA, 609 bp, Cannabis indica
agctcagaagaaaccctcctcatttttgaagaaaaattgcctccttcatggctgaaaactgagaaaatgttaataccccacatgaggaaactcatcatcatcctgggaaagagcccatgggctccaaaaggtctaccaacccgcagtctagacggaccacccattccaggaggagtcaacctgagcgtggccccaacactaggactacacgttctcggaggacccaaccagacgttggtcctagaacgcgaaaaacacgctcgaggagaactcagtgtgggagtggccagaaccctgggacgagggatgaagagcccaattgtggaggcacctagcctatgggagaatgtacttatgaaaccaaaaaatttcgcctaagacaccgtctggaagaggcgcagcagtggaacgctgaattagaacgtgatgcagccgtggccagggcagcacaggggacaaatgctcaaaatcaacctgaacctagagtgataagaccataggcaggcctcgtggctcacaaactaggagacaggaaaatgcccgggaagaacaacccaagtaaaatgagatacccccctaaaaatcaaaatgatcaaccaaaaccctctc

SEQ ID NO: 237259 - DNA, 1571 bp, Cannabis indica
tctcggatctcgtggcttaaatcactacaagaaatcttgcgtttacctaccaatatgttacctaccaatagttattggtagataaaggatagttttatccactaatatttattcgtaagatgtattggtaactaaatgtcaacaataatgtaatagtttagaattaggattctatactaaaaagaattggtaggcgtagagattcacctacacgtgtattggagatgaaattttagcatttggcgcctataattccctccgactttattttgattattttaatgttgaaatgaaaaaaaatactgataatgtctgatgacggatgatttctaaatgggtaatacccattaattagtactaaaaaacctgatgaggtggcaatttggtgacctactatagcaggttaccaacaatttttttttaatttaattataaagaataatgatttttttttgttaaacctgaaagtttcattaatgcgaattaggagaccaagggtggtcattacaaatgacattgctggggatcacttccaaagggatcaaacccattttacaaaattgaagttcccatttcagtgacaattctatcaatttcccaaaaagaggcctcttttttcagagcagcaatggcattggcagaatcaccctcaatgatcacatacgggtatctgtagtgcttagccatcgtgactgcaagtaaggctgcagaagcttcagctgtaagaggggataggcagcgtaccagcttggtgtgaacccatctgaacaaaggttcgaagaagagaacaataccattttatctgtactatcttctccatttttttttgaacgtttaaattttgttgtattctgaagcttaatattttgtttataggggaagcttaaaaatgtcatctttcaaaccaatcctcgattttgattttcatcatcgtgatcatgattttgatcttctgttacaggagagatattgttcgagtttctaaaccctcgattcctattctcttgtcgtttcttcttcgcctcttgtctcgtcatcgcgtgaatctcacgtttcgtcttcgcattaagaacttccctctccggcaccggcaccggcaagttgaccaagatggaaggccaagacaatgttaagcatcttgaggactactctgtctccaatgcacttgggacttgggtattctctgtagcaagggcattgttagctattcttgtgggaataaaaagaaaatctttagctcctattgtgttctttggtacaactagtacgatactccatatcattatgggaataactgctagcgaaagagagcacgccaaacgccaaatgcagctattagaagcccaaaactcaccaaatgatggtagtcttacctctgagagcggagccgagtcttagtttcattcattttttagctatgtttttgtagtgtgtgagctgttccatacttcatttggttagtctgaaatacctagttttttattttataccttttttttattcattgggatattaagtgtaattgtacaacataaaataagccttaccttttgagtaaggtgcatatgttg

SEQ ID NO: 237260 - DNA, 1333 bp, Cannabis indica
gaaatataacttaggtatattaccgttaaaaattaaacttaagtatttatctccaattaagaattaaacttaagtatttatgctgcaaattactctatttctatatacgtataccataaatattttatttaattaataagaataattaacaattttattcccctaaactttccacactacctagttttgtcctataaaatatatatcttattaaaaattctccttgaacttttacatttgtagaaatttagtccttctattagattttatcccattattccgtttgttgacgctgaaaaagtagacaatatcagctcgctagattgacgagatgaatttataaagtttaagtaaaaaaaattagagagacgcacaaaattttataatagttcactccccatgttgcgatagtaatggagctacatttcgagtttttatttctcacgagaattacaaaaaattggctaagtttaaaagctctaatttctagagagagatgctttgaccttttgagcacttttctgaatgtaaaaaatgagctagatgagctcttcttttataggaaaagagatcctattaaaataataataaaatattctaaaaaaatatagaaaagtacataggctatttttggccattgatgatgatctaactgtcaaattaactccggaggtcggttgtcaatttttgagcttgagtcgcatccgcaaggccaattcggtaagttgtagcttaaattcttaactcccttgaggataaaatttggagttgataacttcataattgtgatcggagtgttagacatgacttgatagagcattaaaatagcttcaatatgcatgttgaatcgtatcaattggatcaatattgagtgagttgtgactgttttactgaaggttgttttgggaccaacgcccggatggacatcccagctcctaggttgacttatgacgtcaaactggacgatgggtaagtgagaaaacgtgttggggtggtatattttgatgcctaagtgatataacttagctagtttctgcgctctggtgaagtcgttcaccagttcacagagatgttgttgttttgtgaaatcgggagactcaaaaatgcccgatttgcaagcaagtcactttgccgaaaaagtgaaaatatgaaattataaatttgactcttctgacttcatagctctcaatcactataaaaaactagatgaatggtcaagacaaaatcagaatctgataagcagaacccagtaggggtgttcatccgatccaatccgcactttttggtcaaacaacatccaatccgcactaagtgcggatttcatattttggat

SEQ ID NO: 237261 - DNA, 745 bp, Cannabis indica
gattatagttgtcccttttgtttagtatcaagtgaaaccatatcgcattgccttttaaattgcaacttcgctgctggttgttggtcgaggttggggctgggtgttggtacacgggtatgggactcttttaaagagtggctgcaagatctaatgggcagagttgatgagattaaggttgctcaagcggggacattgtgttgggaaatttggaaggcgaggaacgaactggtttgggatcaaaaaaatcggtctgtggaagatgttgttcagtttgctttaagatcacttgatcaatggagaaaagctcaattaaatgaaaattatccttcgttgaatcctcaatttttcaacaagggtgatgagctttggtctaaacccgtgacaaatgagatcaagcttaatgtggacgctgcaatatttgacagcagcagccagtttggaattggattcgtggtgcgggacagtgaggctgagttgttgtcggtggtgggtctgtatcggccagggaagcccgatcctgctgttgccgaggccatgggcatacgggaggcattgagttggttgaaggacaagtcgtttaaccaagcgagcgtggagagcgatagtttaatctcggtacaagctattcatagttcagtagtgatgtatttgggttttggtttaataattcaagattgtaagtctttgctagggtctttgacaatgtttcgtaaagtttgtaaacgttctgctaatcgagctgcac

SEQ ID NO: 237262 - DNA, 2221 bp, Cannabis indica
tctgggttttttgaacctagttgccgcggccagacttatggttgctgcggccaagtctggcagagagcattcccaatttttcccgatattgttttggccataacttttgattcataactccgttttggacgttctttatattattggaaagctctttttgagctctattacttggttcagtattggagtcttaaatgtgaatattatgaaatgtaattttgggattaacctattgtgtgaaacctaaggattgtgactacggatactgacacttggtcagaatcacctgtggatcgagatttctcctcagacattggaaatcaggtaagacagtgaactaagcacatagagtatagcatagtggcacatttatatgatttgattgttattgtgaattcgcgacctaggattactaccctaagtgcgtattattataaatgtgcaataatctgttaattgaatatttttatagagttatgcgggtaaggcataatcaggttagactcgatgattataaccgagacaaaccctagtaaggccttaaatataaaatgatgtgtgagcgtaacacataggtctatgctacatagacatttattataatgacattattatatagaataatgtaatataaagtgcggtgacatagtattaatatgcggtgggatactgtatgaagtgtaattattattttaattataatattgtatttttttttatcttgccaggccttagctcacgggtgctctattgtccaagcaaggtaaagcagtgtcgagtcaaccatgagattgagaattttgaggatgacttgtacatgttccagccatgctgaaccacgagggttgggtctaacaggaatagtatagaaattctattttgttgcttaggtcagcctatacaaaacaacttgtaatattttaaaaagaaaatttttatgggatcccaaatatgtaactttaaattgttttagtttatactaaaacatcgatgtttattgcaagttatttatttaaccaaattttatattagttttaaatcacatggcttatggaccccgattaacgagaagagttgcttgtaacatgacacgtggcattcctctaagtaggctgttacataaatgaatcacttcgtctcctccaacattcatctcctctcaaaatacccagccaaaaccctcacttaccatcgccgattcagccccaaaatctcatttctccaccatttttgtaatatcttgagtttagtaaatggattaggaatgcttattaaattaattaagtttaaatgagggattatattattatataatcaattatgtgaaattatttgagattatcgcatttaagactccatttatgagttagggacatttttataattttgaccagagaagggtaacattgtaattttattatattttgcgtaaaaggactatattattatatagtatgttaattttatcttatggcgagtgatttttgataagttagagctgtatagtcacaatcaggtattttaagttcaaactgggttcggggtcaaaaattatttaattatgtggttatgataaatatttgagatatgcttgaaattattaaattcgagtgtgatattaaatgcctaaattgcccatgtatgttgtatatgtgatttactagcctgcagggcaaaacagtcattttcccactttttactaattttaatatatatcatcattttggctaagtgtaaataagaaaaatcattttttttgttttcaatctcatcatttttggctaagtgaaatcaacttgatgacttaggtgaagtttgggttaagtttgtacatttcaaagctttaaaattagatttttaggtttttcaaacccagtcgtcgcggccaaaccttacagggagcatttctaattttctcgaatttattttggccataacttttgactccaaactctaattgggacgttctttatatcattataaacctcgtttcgagctatattatttggtctagtgttggagtcttaaatgtgaataatatgaaatgtgatttttgggattaacctattgtgtgaaacttgggaattgtgactcagaatactgacacttggtcaggatcacctgtggatcgagatttcttcacatacattgggaattaggtaagacactgaatcaagcacaaagaatatagcgcagtggcattgtaatatgatatttaatt

SEQ ID NO: 237263 - DNA, 2585 bp, Cannabis indica
tgaaatatcaaaagcatataccccactgatagacaaaaccctccacagagagaaaagattcttcttttcgtcagaggtctgtttttttactcaatattcaaactcactttaatactcatctaactatttgaccgaacaacctaatcccaacctattataaaaagccattttccctacattaccctacgtggacaagaaacactcaaaacaaacactaacgaaaaccctaaaattttaaaagtttagaaatcttactaggtgggggatcatgtgaattgcccctctggaatttcattgttgttgcttcgcctccttacatcgtcgcctgaaagggtagtgtttgtgtttacaatgttacagacgtgaatggtggaagagatgatggggttttctgttataggagttcgaatgtttaagtcctaatgttctcttctcttttaatttgttttgattttattttttagttttcttttaataaatttttgttatgattttattcagttatgaatattaattttgtttgtttttttatttattttttagggattttatttaatttaatttttgttatgattttaattttctattttttttttcaggagagaggggtttatttaatgctacggtggcataacttgctgacgtggattgtgctacgcaagtcaaattagcacttaaacagagcctgggagacggaatagtgctaagaaaaatagaactatggttcaaagagttatgtcgccaaaatttcaatttttataattaacggttacaaacttaaaaattagagtggtttagccgataatatcccttttagttaaaagagaaaaatattattgaaaaaaaaaatactcatcatttgcaaaacgaacaaataaagttataacacgtatcactctttgcatcgtacgtgtgtcatgcggcttgttcatagttcctacttcatagtggtacggcccctccacttggagcgaatcacagcaaagcaataacaataagacacaggcctccatggttaaatgcacggacacagagggtaccatcgtaacttcacatactcggtcgactctttaaataggccaaaagcattaaataatattaataattaaaagaaaaagaaaaaagaaaaacagaaggctgtgtctccgtaaggagtatcgtcaccttcctctctctctctgggcctctttcaaatcaaaatcagagacctttgaaactagagagagtaagagaaagaagtacagcagatgatgaagaatggccattctggttccctctatcttctctttttctctttatatctatatatataacaatatatatttaaccaaagggtgtaattatttatttatttaaatttgattagatctgaagtgtttttgagaatcctgattgataatactctaagagtctaaagtacgttggatcttgaaacatggacggtctacgcattttaatttctttatttatagttaatagataattaacgttttggattgtaagaaaatgatcagcaaatactgcttcttttgattattattatataatttttatatttgggtgaagtcactggaggcagcggttcatcgatctcttcctgaaattttttgtgaacaagaaaacacagaacatgaatcgatcgataaacctctgcatccagcgttcgctcatttttttaatttaacaatttgactaatactgactcaaaaatctaacaaaattcgaatgaatctatgtttaataatttggtttatgagtttttttaaaatttagttataaattcttcgagtaaaagaggttcctgcccaccagctttttcaggcggatccatataatttagtgcaaactgttaatttgactccttgtccaacttttttatggtaattttttttattcaatcacatatatcacttttggtttttcctgtttattatttatgctattcgcaacgaattgccttgtgttttcttaaagtttctatagcttgatacaagattgtgacgatgatgttgattatttgattttgaagttattattggtgatgctgatgctggatctaatattccattagctgtacagaataaaaattcgaaattatttatttacttttggtgggcattgtgtattttttctgttttgttatatagctgattctaataattcagttgattcatatttcaaaaacaaacaaaaaaaaattagttgattcatattctacattgtgctaaagaattatacattatacattatttgtttattcttactttagtttctattgttaaccaaacagtgatttttatctcttaatggtagacattgaactgaaacagttttatttttcttaattttagtggctattgtgaaactttatgctgttattgatacttgtaatttagtagctgattcaaaatgctacactgtcttgaataataaaatatgctttaattttttatatgtataatttgaatggccagtatttcatcaccctttgttgtctctaaaagctgtgacctattacatggcttaactttgatgccctttggaagaatcaagacgttgcttttcttgccgaagttgaattcatc

SEQ ID NO: 237264 - DNA, 621 bp, Cannabis indica
tccagatggtgggcttggaaagtgtggtggccattggaaagtaggtgggcttggagaagagcctccagaaggaggacttggacttggaaaaaagggatgtggccatgatgggaatgatggtggacttggtgatgatcctcctggagaaccaatcccaggaaaattaggccatctaattcctagaatgggatttacccatgataaacacagcaaaaaagctacaaacattgataatatcttcattttggttttacttttgactaaggatgataagagaaagtgataacacagtttttatagagagttgtatacgtattcctataaatttaaaaattagtttattattttttgaaaatgtttgttcatagatatttttaaccttcaactgattcaaaactctacagatttttacgtaccattcaaatttttttaaaaaaatatagaattaacctttattattaatacagtctatttttacgtaccattcaaatttaaaagaaatcctcttaaaacaatatagaattaacctttattatttattaattaattaaaaggttatttttaatcatcattcattaaatatatcttaccattgatatataatcgctatatttgctaact

SEQ ID NO: 237265 - DNA, 1072 bp, Cannabis indica
tagatttttgagatattatacttcgatttaaaaaaaaactcagaacaaaagactattaaggcgaagacgtaggtctcgaaatcacttaagacacatggaaggcctatatgtcttcgttatttcaaataaccgaagacatgggtatttgtttacaaaaaaattgatatgtttacccaaaaccaaagaaaatgtttaacatcgttgacccccgagccctaagacccacaaaaccctaaatctaatggttacttttctaattttaaactcacataatcctacacttataaacaaaattaatagattgtcaacagtaaaaccttaaacaatattatttttatattaaaattaaaagttagaaatgtttacttgatttttcaatcaccactaccaaattttttagcacttctattgatttttcagccaccaccgtacattttctgacaaccaccacgagtatccaaatcctatatcacacacacactataaaagatcaaagaacaaatgcaatgcaaccttaaagacatatattaaagtgatctataccacaatgagagctcaaagactcaagaaatatctccataagctattgtttaacactgccaccgccgagccccaaaactcacgaaatcctaaagtagaaataatttatttatcgttaaatcttaaaataaattaatctctagtagatctgtgttttttggtaagaaatataaaatattttacaaaaaaacgaagaaagcagtaatttatggagaaaataattgtttgagtttggtggtttattaaggtttcagatgacaaaggtgatgagagaagagagaaaataaaatatatcaacttttccaatgatatatagaaataatagaagatataggtcttcaatatttatttttaatttggtaatacttgcaacgaaaaggaatgatggttaaaaatgtatgagacttaatttcattacatatacagtagaacctctattcaagaattgggattaagcaaattatattctaattgaaatgttataattaaataaagttacactagaaaaaaaaattaaaataccaaaaaatat

SEQ ID NO: 237266 - DNA, 975 bp, Cannabis indica
aaaaatctagatttgtttaaataagcataattttttaagttttatttattattttttttaaataatttattttttgttgaatttctattatttttatttatttttttaggacatgatttgtaaacacaaataagtttcattttctcgtcacaaaatcttatttattattttttttaattttttattgaattttcaataattttagtttgattttttaagatatatgtttataaataaaataaagtttgaaattttattcttaggaataatttaagtttttttttattttttttattttttttaagtaaactcagcattttttaattaatttaatacttttatcaaaatttttaataatttttttcaaaattaatagaaaattataatttttgaaattattatttttttttataaaagggagaaaatttagtatttttcaaagttcacgcagtaaaaatgctaaaatttttaacggttaaagtaacgaaacctaacataaggggtatgattatgtaactgttatattttaaagaaaatttttaactagccgtatattttaagggataggatcaagtagtgttgaaagtttaggggacaaatatactaattattcaaattttaattatataattatcttttatgttaattattcaataaataacatcatttttgttttttcttttaatttacgtgttacttataaaagaaaatagactgataaaacctgttaattataattttattttttcttgtaatacttttaattttataatacttttatttgtttagaaattaatatcaaacatttttttccaactttttttaaaaaaacataattatataaatatattttttggtaactgtaccatagataacagggtcacaatagtaattctttaaaaaaaaaatgaactaactttttttttttttattttatttgcttaaaatgataacaataatagaaaaaatatttta

SEQ ID NO: 237267 - DNA, 1118 bp, Cannabis indica
ttctcgtttgttcttaaaatgacataaacttagtgaaaactctccaatatgacataataaatttttgaattccaattgattaaagaaataaattgattgagtctacaagatgatattgtggggactataattcaatgaaatcaagctcccaataagtagatatgaaatttaccgagtagatttcctaatttattaatttctcctaactccactaaagattcaaaattgcactcttaattacatagagattaatgctctatacatccaatatagatacgctataaattatccactgtttcaatctaaataatgaatgatcttttatagacagtttacatcgatcgagtagggacaaaattatcatttgaccattcgatgtattttatctttaaaatacttagcttattgtagatgatatttcagtaaactagtataattactaaaataatagctctttcatttatcatgtttagccatgctataaggaaaccatcattttacttctatacaaacatagaagctatatatgcccatatctatgattaacactcctactcaatttcactatcaagctcacaagatgtaagtatgtgctagtctaacgggtaagtcaataacaaacaagtcaaagaaatctaatagcgtagttaggttaaagcttatccatcacaggattaagatcaattgatctaagattaactaagtgacattgacttagaaaatatatgatggtcagtgtatgatatcttttctattgtcaatattggcccagtctactatatagccaatatatctcatacaagtttactttactaatgccatggaaaagacattctacttattcaagtgtaagtaaaccacatcctcgattatcatgtctgtgtaaatcttgtgcactgataaatcttgagactaaatagtttgaagcatataatcataattattttctactatgatgacatcactataattgtgaataactatatgttcaggatgtaataaaatttatatattaaacatataatcatgaaataaacatgtgaacaaaacatatgacaaggtcaagatataatttttgatgtttattgatagcgtataagattatattgatattcagt

SEQ ID NO: 237268 - DNA, 974 bp, Cannabis indica
aattataattatcatacaaatcatcagacagaccattcaaaataaaattcttaaaagaaaattattctctactcaggagtccctttccttaacctgcgattcatgtttctcgagttcatcctttttctctgcaggaggtggagtctcagacacaactgattttaaaatagtcaatacaaacgcaacctttttcatagtggaaaaaaataatatcttctgtcttcaatgcttaaaatgcaaaccttcaaaacgaaaaatacttgttcatttcagcaatagaaccaaaaaaatcatcgacagtagtcatggcagtaataacatcttcaaattgttgtaaacgctgctactaaaaataaaagagtaacaatattactaaatgaaatttttcggttgagtcgcagattaggtcgctctctttaagacgttcgcaacactgttcatgaatgtgcaagcaattgaaaaattatcggttgtcccaagataaaacaacacaatcgtatactatatcacattccaactaatacgttaagaaacattaaatatactctcaaaatataatattgcagatagagtatacgactgcattatatagatataaatggattgaaaaaatattattattctattttaattaatatatttctcaaataaataaaataataaaattaattgtgtgtccttattcatgtaggactttctccacatcacacatacattagtacacttttatattttgccaaaaaattcatttactttataaaaagtttcaagagttaataaattgagaaatgctaagtgaaagatgataatatattacttttaatattaaattttattattttaatttgataaataacataaaaatcactaattaattataaaatattgcatcagtgcgaactaatgttataggtgcatttaacatatgtccacacctctaaaaaaaacacatgtcctaaccactacatattaat

SEQ ID NO: 237269 - DNA, 1032 bp, Cannabis indica
atatgccaactctgcccatcgttccaccctggcaacatgaggattagatggtggggcactataatatgaccgcttagctttggccatagtgtatcactattagtccagagatcactttgaaggtggcaagaggatagattggatgctatctctcaaaattaagactgattggacctattacaaagcagttgtcaccttcccagatcgacactcaaaatcacatgcatagaatagacaaggggaggtgagcaacctgacaaagctacaagatacagacaaagttctggccaagcgtacctaagggtactcgccagataaatgacattgtacaagggaactgggtataagagcacagttcaatatgcctacttagacaaatggtgagtcctaagttgtaaatttaactataatagattcactaccaaatctcatataaagtttccaagggaaccatgtataagatcacagttgtatatgccttcaaatttgtcacgagaccctttccgatgtcaaaaaaggacaaattcttgggtgcccgcttggaaccttggccttggccggccagggttcccaagctgagagaggactagccaggtcccttgatccaaccaaaggccggctagggatcctacgcccaagcatgggccgactagagtttggggtacccacaatggccggccaaatcccatgatgaagacccatggccggccaggtcttgaacaagacccctatgaccggccagggtgcatgtcgaatctaaacgtgtgttttttaagaactccaacatgtctttcgtgttcttcgtgactcaaagagctaagaataacaatgaaggtaaaaatcagatctttttcgtcaataaatcacacattatacatcctaagagtatcatgctgatcaaaataccaaaaaaattacaatctaacgtgagaatcaaaaaataaagcaaagaaaaccttgtgcaaccatgcaaaaatcaactaaatcaagtaaaatagcgcaaataaaaagcttacccactacaagaaacat

SEQ ID NO: 237270 - DNA, 908 bp, Cannabis indica
caattgtcatctcggagtaacctcgtgagactcattctagaggatacagcaagaaagtttttttttttcttaaattaataaaatgatacttcgtcaactttttaagtactaatcatcctaatttctaaaaagtagtgtaaaattattgtttgaatgggacagaacaaagtcacatccaaacataaacttgtcaaaatactagtctaatatatatgcatagacatacacatccatttggaccatttactttttctgcaatcacatttggattggaagtgagaaatatcccctcaaatcctactattctcatcaacataatcatatcccccaatagcgcacaccatatatgcaaatggataacagtatgagtttatcaaacatagttgtgtgcatgtatttttgtagagattattcgttagcagagtttagattagatttagatagcacatggcatacatagagtggtggcaatcatgtcttctggaccccacattttacagatgacgacatcatcatcatcacaccgtccgttacattgactttttcctttagttttatttcgctcacgtgtttgaccagaccacgcatggaaggcacgtgcttccagatggctaggttttgatttgatcctctaacaacatgtgctgctgctgcctctgcgtccttaaaactctactattattattattattaaagttgtttgtggcataagtatagttaaggggtatttgaagtggagtgtttaatataaattaattgtaagaaaatctgtaaactgtgtttagatgtgtatagtaatatgtaattatatttctgttaattgaattacactatttggttgaatacaagaatcttatatattattttaaaaatttaaataattttttattatatttatttaatgttaa

SEQ ID NO: 237271 - DNA, 502 bp, Cannabis indica
ggaattaagtgttacaaaatgaactacttaagaaatttcgctgttattttcttttctatttttgagaatttagtgaacttatttatgagatttcataagaccatctcaaatgggatataaattttgtgttaaatttagcttaaaaaataaattaatgttatatttagtctaaattttacaatcgtgttcttatacataaaggtaaaataaaccttattttaataagacagtgtaaaaaaatcaacaaaaatattaaatttttatttaaaaaatataaaaatatattaaaaatataaataaaaacacataaatttattaattacgttaggaagtggcaagtgtgtaaataaaaaagtaatatttattgtggtgtaaaatttaatttatggtaacattatattatcttgtattaaatttattaaactacattatacactattattaaagtttaattctctaatcatggattaaaaatacatatatattaaatgggaaatttgaa

SEQ ID NO: 237272 - DNA, 1266 bp, Cannabis indica
gttatgttttatgttatgcttttcttacttgtagtctgttgactcaaagttgcttattttcatatagtgtatgtaagggcaaggttaaggagccgccgtaagagcgagcagatagagactgcacatgtcggggcggttaggcctggagcgtacgatctttaggacatcagggcttttgttgtatagtcactaggcgacaaacttttgtatatgtatagttaaacttttgtaaatgttttttttaaacgggattccagaattttatatgtaggctattttatgtttttaattaaataagcaaaattttaattaatcacgatttttaataacctcgttgattagcaacaagctgcacaataagttaaaaatcacgctaacatgcctaaaatagttggggtgttacaatttgatatcaaagttgtcaggtagtcttgcgaagattgtcacgacatgtacaatcatcatcagtgatcagctcgttccacggttcagtaagcttttattgctttagtagtttatttggatagtatgatttaagaaaaacctgttaggaagcatgatagtaccttgatagctgaatagacgtatgtttttaatttccaaataagtagtaattagtaagtatacttgatcacaatctgatcagattagctcttggttacataggctattctaatagtatggacggcaggcgaaacaccaggagctagtgtaactcggtcggattcagtggtggtcaaggagttcagattcctccaaatgttcgtggccgaggtagaggtcctagaggcagggcatgcgatcggggtgatgttaacacgccataggctgcccaagctgcccaagattgggaaaataggtttgcagaaatgcaagccagaattaatgagcaagatgaatagatcagacgcttgagatagtagggtgctcctgcaatccctgctctagaaatgtaggtagctcctgcccctactgtgcaggcaagaccagtcactgcagtataccgaatggaaccactgtatgaaaggttccgcaagccagcacctccagttttactgggaggtcccaatgctatgaaagccaaacaatggctaacagtgattaccagaattctaaactttatgggtgtcaccggcaatgatagagtggcctatgccacattccagttccaagaagacgctctagtgtggtgggacatggtgtccctgactcaaaaagaaatatgagtgttactgaatacacaactcagtttgatcgcttggcaag

SEQ ID NO: 237273 - DNA, 1219 bp, Cannabis indica
tccacgagtctgtgtatttatgatagtatttattacagagaatgttcttggtggtttttcctctctagttcttatggaacacagaattctcgaccctgccttaatgagtttgggggtatttatagtgtttttgtggggtgatccctagaattgaggtacatgtctttctgtaattctcagtaaagccacacattcccaatggatacatcataggaaatgcatggtctaatccctaggctttttaggggttttatggacgtagtcctttatcctttttgactgatgtgatttctcataaagtagtcgtcactaggctcattaatcatagcatagtagctgcagagagggggttacgccgtcagactttaagacatatggcagtttcaatacgccttctcccatgcggcattaaatgcaaggtgattgttcagatagggtctgacacctcccggagatgtttagttgtgactttactctccgggagtatgtgagactcacgtaccttctccgggaggcacgtctaaggctgatcccttgggccaaagagacttagctgaattatctaatcgttaagcccttacagcctacgtgtcatcatccggttggtccacgtattttggacaggggcaacatggttattattaagttttattttaacaaaaaaaaaatcaattcagagcactattttgaaaaatacaaattttaatttgtcatttaacaaaataaatagtttaatcaacaatttttgcaaaacagaaagttcaaaatagtatttatagaaatattattagtaaccaaatcactaaatgtgctgctaataatttataaaatagttttggtaaatatactcatatatgaatgactgtctctcacattaattaatatataattaatataaatttataaatcaacatagttagataacaatattttatatgactttactaaaaaattatatgtgggaacaaaaatattgggcattttaaattagccttatagggaaaaataattaaattaatataagtaaaaaatggtacataaaagattataaattgttacaaaatttaattaaattgtttaagaatgtctccattttgttacaaacattttaccattattaccacccttgagtactttctctataaaaaattattgaactttcataagtacttgttttaatgtataaacttaaaattttgaaactattggcaaaaatagt

SEQ ID NO: 237274 - DNA, 958 bp, Cannabis indica
acttcatcgctgattatcacatcagtgtaaatctagtgcactgatgaattagagactttgtcttttgaagcatatgatcacaatcacattccactgtgttgacatcactgtaattgtgaatgactatatgttcgggacttacaaattttatatatattaaaccataaacatgaaaagaacatgtaaacataaatgacttctaatcttttattgataattaatcagattagattgaaatgggttttatttagggcataaaatcccaacaaagccctccttaccttggattgtttttggggattttaatgccatgctctattttaatgatagaataggagggaatcatgtcaaagctaaagaagttgaggactcccaaaattggcttgctcaaggtcaattaatggagttcaagtgttcaggctcctatttcacttggaacaacaaacatgatgttggtaataaaattttctcaaagcttgatagagtgtttgtgaatgaagtatggctaagagttttccctaaaattgaagcttgttctaaatgggatccttgttctgaccatagctattgtctaatcaagcatcaagatcatagcaacatgggattcaaaccctttcgtttctgcaatcattggggccttcaactggggtacaagcaggctgttttagcttgctagaatcagacaaaaaaactgtcagatatggtgaaaaacttgtttagagctaaacatgtgcttaaaaaatttaacaaagagaatgttagggatattcactctatgtatcttgctggcagagaagaccttagcagagtccaggaggaccttgctagggacccattgaacctgattctgcaaaacaaagaaaaggataagttgctagagtattctaacttaaagaaaggttatgcttgctttgttagacaacatagtaaaattagttggatcaaacttagagatgag

SEQ ID NO: 237275 - DNA, 1084 bp, Cannabis indica
tacttataaatgaaggattggaagtgaaccatagcattaggagaaggccgattgctagtagatttatcattgatgtcaagataatcgttgaaatcaccaatgataatccaaggagtaaaagaagcaacatcatataatctattaagcaaggtataacaagccaatttaccagaaaaaataaggggaaccataataacaagaaagatggaaacttatattatcagtcatttttacaaagcagtcaatatgattgctagaataagataaaatactaatattaacaacatctttccaaaaatagaaaaagacctcctcccagaccctccctaggcacttcaaaagcaaaatcaaaagaaagttgagtcttaaatcgaccaatagaaccagccctaagcttggtctccataacaaaaagaacatgagggtgatgttgtttaaccaaaagggagaggtttcggaatgctcgaggactccccaaacctcgagcattccaacttaaaagactcatttttctgggcggggttgtagagcaacacccgcctgttcatctgaaattggaatggaaggaaccatagtaacatcttcatcgtcagcaactgcccgagcttgtttcagcatttccctaacataattcccaacctgaacattctgccttgtgaaggatctcttaacaccagacaggttcgtgggagagggagatagaatgatgcgagggcattcagaaaccatgacagctttgcctttgtccacactagaaataaccgagattgtcataataggggcaacaggcagggagcaagtgaggctaggaattccaacaaatgatggcgctgaaaaagtcatagaaagcccaagagtggagtggtcagactgaggaacattagttaaatcaaccaaagacaaggaagtgttaaccagattaggaaccagaaactggttgatagcatcctgaagactctgattagaaacagagcttcgtgaagaagattcttcaaacagagtggagttggagagatcgaaaatactctttttataaaacagatttttcaaggcgctcttaaaaacatctctatagcttaaaaga

SEQ ID NO: 237276 - DNA, 2355 bp, Cannabis indica
ccgagtgggagcgagtttcgtatcttgttttgattcttccttcttcatctaaggaaaatcctttttaaaatgtctgaccaagccacattgaaaacagattttctaattacatttcccaagatgatgtttcttacaacggggacactcaagataggaataaccctgacgacaacctctaccttggttcccacgaaaccttttattctgactcgagccaactgatgtcgggaaggtctttctcttttgatcaacattaaaatcaccaccatctctaccataaccagaagtaggaagagtagtggtcccaccaatagtgggagtcactcgagactcttgtagaaactcaatcgcacctttggctcgaagggccttctcaaccatctaagcataagttgttgtgtcatttatggtgataaccagatcatgcctaatctttgcattcaaacctgccaagtatttttccttcttactgaagttcgcaagcactatacatgaagccaaattggctagtcgatcaaactttgtagtatattccattactgacatattctctccctgaaccaaattgtaaattctttcctcttagcacggcagaccgccttattgtaatatttagcattaaacagatcccaaaactcttcccaggtcattatagtgatgtctcgggtgagggataccaactttcaccacacgagagcatcttcctagaattgaaacgtggcataggtcacccgattcccgttgacacccataaagttcacgattctttagattactattagccattgttctaccttgacaacatcaggacctcccaaaaaggatggagatgcctatttgcagaatctttcatacaaaggctccatacggtcgccatcaataagttgttttgttggcaccgctgaaaccaaagcaactggcacttgttatggaggcactacaaaaggaccctgttgtctgaatctcttaatctcctcatcttgttggttaattcaagcttacatttctgcaaccctttgctcccaatcttgaggagcttgtggtggattttcctgatcacccctttgaaacctttcacggcctctgccacgtccatggggatttggaggattttaaccttctcgactgtctctggtcttgaccatattaccttgacttcttgtgttgcgttggacgtccatattataggacttagcttgtgaatccataagtcaggtaggtcagacagcgatcacataaaattttaaatactgcattcatggattttaggcaacgtaaataaataacatattactaacatgctttctatcattattttcaaatcaaataacttactaaacaagtaaaggcttactaaaccgtgagtcaagtttgtctctgacgatgattatacatgttttgacggtcttcggtaaataacttggcggctcttgttatacccaaaattcgattggaggacacgtgtcaagataaagggaatgtgaatcagtgcaattgcttcttatggaataactcattaattacctaagtatcaaagtatatttataacccgctgactgtaaggtcttaggtgagggatcaatgtacaaaatgacacttagtatattagcgagaaaccatatgtcgctaaatgtgaatagcgaggtaccatagaaagcgacacgtatcaatcgtgaaagtccttagcgtacaatgaacaaactaagtgtaaaagtcggatcggctcaagaacaagtaagtgaggtgactgtcttgttatgggaagacttcatataacttcatccccttagcgtcatcgaggcttacaatcctggctcgtcagaagatagcattcaagtgagcctccaagaattctttgaggataagaaccgcgatcgacaccagacatatatcgttgacctcgaaaggaagaatggtcccagctcgctattgagatcactggaaccaagtttcagtcgagacatctccagatacaacaactaaagacatgtttaatacacgattattttgacccagtaaaagcaaaaaatcacagctatatgattttcaaatcataaattgcatttacactacgtgatatgtaatcaaatcccacgattttagggatgattgttgtaaacctattccggtcaactatgtaattaactgtccactatgtaattataaatagtgacaaacaagataaaaaaaggactaaaaaattcatacgagagagttcctaaaaaaatcagaaatctgaacaagattaactcgtggactatgcagaattttaactgcaaaaccacgtaaaaaaaccctatgttcatatttttatttctatagcttttattttttctgtgtgaaattactactgtg

SEQ ID NO: 237277 - DNA, 780 bp, Cannabis indica
aaccctcgcatcatagtcataagaaagctccactcaacccgatcatatgctttggacatgtctaactttaaagccattttcttcccattaccaaatcttctcgtcttcatacaatggaggctttcatacccgatgatagcattgtcttggattagccttccacctacaaacgcgctttaaacctcggagatggcttgatgaagactatgtttcatacgacccgctaaacacttcgccactatcttatagaccacattgcataaactaatgggtcgaaattctgacatctgggtaggctttgggagtttcgggataagacatatgagggtgtcattaatatcttcaacactcttcccctcattaagaattcccaaacatgctgtagtgacctcttctccaatgatcggccaaaactttctataaaatagacccggcatgccatcattgcctggggctttgtgaggatgaatagctctcatagcttgtaatacctcgtcctttgtaaaaggagcagtaaggtactcattggtttcccgagagattttgttcggcacaatgctttgaaactcctttaattcagcttcagaagcaggttgggcagtgaacaattgttggaagtatttgcaagccacccgtcccaccattctattttcggatacccaacgagcattttgatctagcaatcccgtaatcgaattcttcttcttccttgaatttgctttcctgtggaaaaactttgtatttcagtccccttcctttaaccataaagctcgacttctt

SEQ ID NO: 237278 - DNA, 958 bp, Cannabis indica
cccctgtgaaaactaccaacaaacaacccatcaatgaaaaaaaacccttttaaataaataatggatttactgtgtatcaagagaagatataaggattccagaaccaaatttcttaagaaaatacaagacagaatcgtttgtacttacctgtagtattcaggtgcagcagaaatttttcacttggaaggtttgggttaattaagagaaaagaggattagggtttaggttgaagagaagaacaacacttcactctgcttttttttttttcagggtaacatttcacatggcgttaaactatgatcaataacatagatatatttttggcatgttttatatcttctttgttatttatttattttattataattttgtgataaaggaagaaaatttaattatataatatatatatatatattaaataataatattttaataattttttaaagatgattattattggaatattttagtacaacaaaaataataaaaataagggatttttttatttttacattttaaaatattttcttttatttttacgaaattttacatataaattcctattgcaactagcactacaattaaaattgcaataaaaaattgtatgaaaacttctattgcaactagtgctgcaatcactttagaaacctaaaccgtaaatttgaaaaaaaaattaaaaaaaatagtatatggagtaatttccctaaaagtaatgtgtaagagtgataaaataaaatatattttaaatgatctagaagtttttgacacctttaaaaaatgttacgattgaagatgctcttattcgtaaaaataattattttacttggaagagttggtgtgtgtttttcacgtgttggatttacttgcattacatgcactttgagtttttttttcttttgaatagggagggtcagggtcggccttaagttgaaatatgccatatgtaaaaaaaaaaaaa

SEQ ID NO: 237279 - DNA, 630 bp, Cannabis indica
attttttcgtttttttttttttttctggatctgttaagtgtatttccacttttcataaaatagtttcaaaattgtattgtcttattttcttgattcgtttaattttaaaacttttatgttaaatgtgatgtaatgttcgatagggcaaagaaaagccacatagaaaaaatattttggtgtatcaaaagaatttaaatgatatttttgttacaagtttcgtcttttgaatagctagttgtcctttcagatagcagttctaaaaaattagttgtctttccagatagaggtttcaagaagctagttgtcttttcggaaagctagttactacaaaggaaagaattttaggaaagcttgtcgaccttccagaaagcttgttccattaagcttgttgctcatccgaaacgtccctccagaatgcttgttatcattgcggagaacttgttgcccttgctgacttggagatcttaaaatagatgttagttaagtcggttagtattgtcattagcctatatatacctatcacctactgtaatccaaagcttgatagatttaaccactaaatttttaagaggttagagagagagagagagagagagagagagagagagagagagagagagagagagagag

SEQ ID NO: 237280 - DNA, 884 bp, Cannabis indica
tagtgtgtaagactgtgaagaatccaaacatctgaaggagttttgggctcagatcttggtgatactctgtgacggaaaggatacaagggttagagatctgagcggaaggagtcatttaatttcgctacaaccaacgtaagatttgtcacaccttttatgtgtttattttcatcgttttagagatttatatttaggatgttaaaaacatacttgttagtaaatctatatcctagtaaaatatattccaacaattatgtcatagaacttgttagtcacattagagtggggatttcgtacattccaatagaagagcaactagcagatcttctcaccaaaccactaacgttgccaaagttcaattttcgatgtcacaagttatcattagagtaccctctttccagctcgagggggaatgttgaggatacacttgattagttgtaattagttgttagtggttgttatattttattatttttggttttttgttatgtcagtttgttagagttagtttatggtgtttttgatcttgttctcatgtctaactctataaataacactcactgtatgctttggaagattaatgaactcaatactaagattttctttcttgttcttattctcaagttaaaatatcactaatcataaagcactacctcaaagtaatgctagacagtaggggtggacatccgatccaattcaattttttcctcatccaattaatccaatatccgatctaatccaattagtaattggatttgaaaaatcatcatccgatctaatccaattagacctcaaaatccaatccaattactaattggattggattggttttttaattggatatcaaatacatagctaaattttaatattaacttaaaaatatg

SEQ ID NO: 237281 - DNA, 1150 bp, Cannabis indica
cagttacatgattgcttgccccactatccatgaaccatgcatcattgtcaatcacttctggtgttgctgtgtaggctgctgggggttggttagatttctgatttgtttgcccaccaatcttcggatcagatcccatgtatgcttcatcatatctgttgtaacagattgcagcagagtgaccgtaacgcccacagacttgacaagttggcttgggtccatttgttctaccaccacgacctcttccactattgttgtttcctccacgactgtagttgcctctgcctcctccttcctggtgttgattttgatgatgatttccttgattagagtaagagttgctgcttcttcctctgttgtttaggaaagaccgattagccagatttgcatttggtatgttggtgggttgagtggctttgttactgctgttgatgcttaagttctgaagtctttccatcttgttgtcaaaggcaagaaggattccttgcagctcttgccaggttgttgaggatcgggcttcgatctgaagtacaatgggtaaatactcaatatccaagccagaggtgacattggatatgagttggttttctgggtatgcctctccagctaaggcaagagaatcagaccaggccttcttttgtttcagataatcttccattcatgttgaacctttcctagttgtttgaatcaatgtacgcgtatcatccatccgagacttcgagtgagctccatagaggtttacgagagctttccacagagcagcagtagagtcgcatcccataacttcagtttctatcccttcagttatggagctgtacaaccagcccattagcaactgatcactgactatccaatttttgtactctggattgatgatgaaaccgaaaccagtctctccttctactattgttgatgctgcgatgagttcaactgggcagggatgactgccattaacaaagccgtcgagacgatgtcccctaataatagtggagaccattgttttccaaagaacatagttctttcgatctaatttcagaggaaagggctggttcagtgtattgaagggttgggtatatgttgactgtgagatgggcgccggtgagcttgcagcacctgctgcagcggtggtcgttccctgaggagtctgagaatg

SEQ ID NO: 237282 - DNA, 919 bp, Cannabis indica
attattattattattatgtatagtatattacgtgggtttatgaatatatatatttattttagggttaagcttatagttaggggatatttgtaggatatttatgagatgcttttagggtttagaacgcataaagaaattgaaaagaggaggctgtgcgtagcaagcattgccgagaaagagaaaagtgagattttgagtttttatattttgagagtttatgggctgctctatatcgtttctttaattctatatcctctcatggagcttttagaatatgattaagaggtttggaatcaattcgttcgaaatcaccattgcatacgttcgaaaataccgttcttaaaacgaactcagatttgaatgtgtttaagttgtttcggagatcaaaggaggttgtgtttaaatttatggggccccaatgatcagttttgacgtgaataaatggggtaaagagctctgaaacaaaaaattacagttttggctccatgtttggcagtgtaccgtgtaatgagaagacgatctcaaactggccatttcgagacgaaatatcaatggaatttggcttctttgaggttaagggatccttgggaaaaaatttcaatcaaaaagacgcattgaaatagactgtggaaagagtttggagctcgtcgtcgctggagaagacgactacgccggcgtaactccagcgaccacaatctaggcaaatctgaagtgtttcccatctttttttacagatttcgattctaattatcatttaagggtatttggtgaagtttgataattttctgaatttatttagaattattataattatttggtttatttcctaaataaattatgaaaaaatacttaggttgctcataaaaatctaaatttattttagatgattagttatggataataaactgttacaaaattg

SEQ ID NO: 237283 - DNA, 652 bp, Cannabis indica
tacttattaattttatttgaaaatttctcatgtcccttcgtaccaatatttattgttcttctaacactgaaaaaaaaaatacttgtttcttttttatttaaataacaattaagcccaaatatacattaaaaaataataaaataaaaactaaaaaaaatatatttatgaattgtaataaaaatttattgtgaacttgaatacttacaaaatgggtatgataaaatatttttaaaatatatattcttaaaacaataaaaagaaatacatgattaaagattcttaaaaataattaaaaaaaaaaacaaaaaagttaatatttaaaatattatatatttttgtagccatataacccaggcatatcaattttggagtttcttttagtagaatttacgtggggtatgggttttttaaaccttttatgataaatatggcataattgattatggacactttatatggctttttttatagtttaaccataatttatgggattttaaagcccatacggttggaatttatttgtcaaaagcccataatatgtgtattgtagtttatttaagttattttagtaattttagttcagttttttttaacattaaccattttttttttttgttagagtttttgctatgtaatcatcaggtttttgatg

SEQ ID NO: 237284 - DNA, 705 bp, Cannabis indica
taattaattaattaaattttttttagataagattaactaatttattttaatatacatattttttgtaatatataattcctttattcaacttcttcaaaccctaccttgcgaaaaaaaaaaatcttcaaaccctagaaactagaccagaaagaagaacacaaagcttcaggggaccctactaccttaccttatcgccttacaaggttagatttgatttgttttggtttgttttactaatatttcaattttattagctatatggatcgtatgttcatctttggtttgcataaaaatcgaataagttttctatggctttaaaatcgaaatcaaaatcaatatcaaaactttgatttgatgttttaagcttctatgatgatctttgctttgtgtgtatatatatatcgtttctgtacttttttgtgttgccgtaggacgaattgtgtatgctgcttttatagattgttgaaacttgaaaataaataaagaagtgatttttgattgttttctgaatcaaataatttcataacttgttagaacgatctctttctgggttatttcaatttgggtgatttttgtatgtatatgtatatgtatatttatgctgaagttaatggtgttatattagtttgtgattatctttttcagttataacatttgaacaatatttgactgaattgtcgtatttctgttccattgttgtattga

SEQ ID NO: 237285 - DNA, 561 bp, Cannabis indica
aattagaattctaaataagattgtgtctactgtcttgttttagaatttttcactaagcaagggcttatttgagaagaaaagaggatttagggtatttgttaattaagagactttgtaaggtctaataaataaataagttggattaaaattttatttgataattaattataattattaaattgatagaatttacatttatagagttagaattaaaatatggtatttgtgaaagaaaaagataagtctttaaataaaatagcaaaattaaaactagtggggtccataatgtggccagccacttgaggtaatttaagccattatttcatcttttctaattccatttaaaatctaaacctaaccctagaaagaatcctataaatagaatatgattgctcttattttcataacctacatcagtctcttttattagaagattaaaaaatagaaaagagcccccttctatttgaaattctcttcttcctcctctaaatattctgaagccatagtgagttgagagtatgcccactcatgtcaaagtaatacctagcatagtgaggaaga

SEQ ID NO: 237286 - DNA, 1266 bp, Cannabis indica
aactccgccatagcaccgcctaccaccctcaaagtgatggtcaatccgaggtggtcaatcgttgcctggagacttaccttcgttgtttggcttctgatcgacctaaggtatgggacaagtggttgtcttgggaagaatactggtacaatactactttccactcctcttgggttgtaccccattcaaggtgttatatgggcgtgatccgccagccttaatccggtattccgagggatccacttctgtcttggccctcaaacattatttggaagagcgagatgggtttttggatgacctaaaaatgcacttgttgcgtgctcaacataagatgaaggcagcagctgattcttctcgtcgccatgtggaatttgcggttggggaccgagttttccttaagctacgcccttaccgacagaagtccttagcccttcgcaagaatgagaagctagctgctcgtttctatggcccttttactgtcttgaaacggattggcgcggtggcttatcatttggaccttcccacatcctcagcggttcaccccgtcttctatgtgtcccaactccgtgctgcggttggtacggctcactcatctcctaccattcctcctacattgactgctgacctggagttgttggtcgaacctgctgaacttttgaatgtgcgtcaacggcctacacctacaggagctcttatggaagtgttgatccgttggaaagatttgcctctttttgaagctacttgggagaagttagacaccattacggcccagtttcaagatttcaaccttggggacaaggttcgggattttggagggggggtaatgatgtgaatcctaggcctccaattcggtttacctatgctagaaggggtaagcaagggaaggttagtgatgaattggcttaggcaggggtaagttggtaatttcagttagtggtgagctaccttttgtattgtgtgtgagtgtttgtttgaggtatgcattttgtaagagattactctatactgcatgaggagagagcttccttggctctctgccttgtgtagtgaagtatctcacttccatttcaattcaataatagctcccaattaatccatctgatggtgtttactggttttctgctatatttgctattgtgttgctgctgtatattgtgagagtgtactgcaggtactcatcaaaaaagaacgctcatgcaaattatctggctaagttagcttcagatagtgaaatcgaagggctgggggtagtaccagtggaacgcttgg

SEQ ID NO: 237287 - DNA, 2798 bp, Cannabis indica
tgagaatatacttatttagtatcatgatttttttcaaaaaacacatttagtatcttgtattttcaataatacttatttgatactttatattttgaaattgtacatatttggtatcctaaagtaaaatataataatataattttattaatttgatcaaacagtttttagttatatgtaatcaaataattaaatttgaattcaaaattataaaattgaagacagttttatagtattgataaaattttatcaaaaatttttgagtttatggtaccaaatatgtatgattttaaaacacaaaatatcacataagtattattaaaatataaggtgcaaacctgtatttagatgaaatataaggtatcaaatatgtatacacccttttttttttatatatataaagttgataatttcggatatttgagtatataaaacaaatggtatttttcttaattttagggctctttgtgtagggtcgggtctgatttgtaagattatgagtaatgctataatttgagtattttctcttgaaaattaaacatatcattaaaagctacataggttaaggcgtgaggtgcgattttctctcccaatgaagaagaaaaggtcgaaccagaagccagcaagattaggttcaatcgatcgacttccagctcgatttcacgatgcgcaagaagctgtgatgactgaagattcatcagctgagtttatggatgctatggatgggaattttctcctgttacaggaagaagaagatgctcgagttcctgcacagggatctctccaggtacctgcgactggtggttctggttcggaaactgcaatctgcaaggggttctcatcagccacctacgaatggagtttctggtttgaacctgcaagaagaggcatcgaatctctgggcaaagctggcgccaaaggccaattatgtgggtgctaagcttcacttcactcctccggcaaaacatgagggcaaggtaattgctaagcttgacctaactgaaattgaatatgaatctgagtactagaaaacagcaatgctatgtgttgttatgggtgctaatccacccataaaagtttttgagggttttgctagaagagtttggggagatttagggattgaaaaaattgccagaatgaataatggtgtaacattagtgaaattcaaggatgaagccaccagagattatgtccttgaggcaggggtagtgcacttcgataataaatatgttatcatgcgaccttggactcctgaggttaattctatgaaattgatcaattttgtgcctatttgggtgaagtttcctggtttgggtcttcaatattggggcaccaacagtcttagtgctcttgttagcactattggtactcctataatggtagacaacataaccaaagaaagatcccaggtgaagtttgcacgagttctagtggagatggagattaaagatgaagttcctgcagctatagaatttgaaaatgaatggggagttcttgatactgtccctgttgagtatgaatggttacccacaaaatgctccaagtgtggtgggtttggtcacagggctgatgtttgtcgatcaaacaaaggacattctaggatgtcccaaatccactatacaagttgaggaaaaagataataagaccctagaaggattaagggaccaagaggcattaccagtacatgagaagagccccagtatattggtagaaaaggatgtcattaatgaagtggggaattgtttgcaccaacagattgaccaaggaggagaaaaggatgttttgaataggtctgctaagttaattaagcaaccagaggagagtcaattaggagattgtattgtggagaattgggaacttccaaaaaggaaaagtaaccgtattcagaaaagaatggcaaggaagcagggaaatatgtttagtgctttgcaagacaacactgatcctcttattgttcatggatagatgcaacattttatgctggaacattaggggattcaacaggcaaaagaagcaagagaaagtaagggaaattcttaacagtaataaggtgggaattggagcaattttggagactaaagtcagaggcaataaaattaaggacattatggatacttccttgtatggatgggaccattacactagccccataatagaaggaagaattctaattttctggttaaataaatttgtcaatgttgagatattggcagagtccaaccaatttgtgcattgccaaataaggatgacaggactagatgagtctttttgtctctcgtttgtgtatggtagtaactcaataaccgaaagggtcctattatggcaaagattggctaacttatacatgccggtcaagccttggattctttgtggtgatttcaactcggtctttaactacagtgatagaactggtgggaaatcggttagtgctggggaattaaaagatgcaaaccaatggctggctcttgggttagctgatgaaatgaagagaagtggttctcaattcacatggactaataatcaagagaagggagagagaatctactcgaagattgattgggtctttaaaaatgaggaatggctagatctccatcctaacacggaagctttttttcagtgggaggatgtctcggatcattgtttctgtgtgattaagcagttaaatttgaggaagttgggatatatgccatttaaattttttaacatgtggtgccaccatagtgaatttaaagagaaggttcttgaatcttggaggaaagaagctaagggaggaaacttggcaaccttaagttacaagttaa

SEQ ID NO: 237288 - DNA, 2090 bp, Cannabis indica
aagtttgggcaaaaatattagtcatattttttttttaattattaagtgttaactgaaaaatatgtggaatacattattagattatgtattaaataagttaaaaaaaatatgtcatcacgtgtttttaagctaatacttaacagatttaattaacacttaattaccaaaaaaatgtatgactgcaataaaaatgaatccttaatttttcgaggaatccttcatcactagttgtgaatgattgatttttcttaatcttttcgaccttgattttgtaggagcaagtcagaaagattaatagacatgagaattatcttaaggtgactcttttgtcaaatgctcttattacactagtaaataaaataaaatacttttgtcgtcttttattctattagagtcatatgttaacaattataaatgttaaaagggtttaggtggaaatattctatagttttaattaattaattgaaagaaaataagttttgttgatttattttatttatttgttttgatgtgttgtgattgtaaagcatgggacatgcctaccatgttaaattatacacaaagttaagtcttgactaaggctttggtcttttcccctttttctctgttttattttctttctttctttcaaaaattgtaatagacttttttatgtcttcttgtttcttttttctaactctatttttggctctgtttccatatttatttaattttttctaaatgtcaaataaatggacatgaacgatagagattaatgtgcaagagttcaaaatcaaaacaagtgcctctgttgtaattaataattgatggtttattaatgagtttaacaagcttcttttcttttttactactattattttgtggtaggacaaataggtagatgtgtggcccaattgtacacttgtatttacttggttgtagtagacacacccaataggaatagaaatattcatttttgactttataaaaatatacaaaatatatatatagtctttaaaatagcttggaaattttaaaaaaatcattgcggcgaacagactatttccacggccaattcataatatatcacaaaaaagacaaaaactcttttttttttttttaatttggccaaggagatatcaaaccttgtaatcattagaaagaaagcctaaaaaaaagtcttttataataaggcttcatgaacaacaagtacattaattcatttgtttattataaatatacaagagaaaaactaaaaaaattaccccccaagaaaaagggtaagaagaaaaaaccttccatgcaaaggtagttatcattatttggtgaggaaatagaaaaaagggtagaatgttggtgaagttataataaggatatggatcttaattaatgtccaaacccaaagtttaaattacttaaacctagctactactacatgtattttggggtgaggtggggcataccttttttaatctttcagtaaacgaaattggattatttttcaacatctgttattttgtacagtacagaaaacgcagtcgtatctacaaccaactactttgattatatatattatattgggtaaatataattttggactctgtgttttgcaaaagttactaattggaccatctgttttggtaaatgacaaaatagacttgtattttctaaaataatacaaataggatcctgaactttttttttaatataaccaacttacaaatataaatagatacagaaaatgtatacagttttgtcataacactttagatctaattttaaattttattttgaccaaaaaacagttcagggtcttatatttactattttggaaaatacatggtccattttatcatttaacaaaatagagagtccaatcagtaacttttgcaaaagacaaaatctaaaatagtatttacccatttatatataaaagctgtacttgtataaatttatgtcaaggctccatgaatttgtcaatataacaacacagtagtaacagctatcgaaaattgactggggtcatatgtatgtacatatatgtattcttatattcaagaatatacgtatatacatttcttatatataattacatatgttttataatgtga

SEQ ID NO: 237289 - DNA, 866 bp, Cannabis indica
tgaaacattatgtcctatgtgacctgaggccttttttagaacattactttcatgtcctatgtggcctggagccttttcagaaaattactttattatcagccccacggatcttcatgttcgtgtctttggccataagccttctgtttttgtaacactactagtatttggatcggatttactttgccaagctgaagtatgcctgcacgaattagaggtaggtttagtagcttatactaagcattaaaatttctcttcataagttctttgtgttagttcgatgtgttgtatagtatgggtgctcccaagtgaccatgcaaacaaggctcttggtcacttgctattcaccaagtttcatagactttgcatgggtattgtcttgcgagggtatcatagtacgcatgttgaactaagaaaataactttgaaaagttaatctgtaagcaagcgtttcatagacacaataaatagaatataaatattgtaattattcattaattggtctttgttgctatgcaacttacataattgaatctacaaccctatattacacaaaattagcttctagatgtcaagtggctgcccctgctctcctactgaagctgaggccactattgaagaacagtgggagaccatgcccaaaaaggtccgtgggtgccagcgctttttgtactctaatattgagtacatagaaccgctactttggagtagagttcagtaagctggttattggtagtacttacgaaggtgttctccattccagtatcttggtaggagatgagatccatgttctcgttgtattatcctagcttgtaggcccccttactagttttttctgtagcttgataagggcattcccagttaggtcca

SEQ ID NO: 237290 - DNA, 935 bp, Cannabis indica
aattagaaaaacgagtcaaataaccagacgcctaattttcaaatcgtttggcaaaaaaattaaaataaaatcagataaaaaagaacaattaaccttaagaacatctatattatgttttatccaccgcgcataagatacaatagtagaaactgctgcagcaagttcattcaatctcgttgctagcttaagcactcaactattatgtaagatatgtaattgcattactaataactcattcagtcgtagaaaacttgttattactaaccaataacaatggtttgatagcaagctattgaagaacaaagaagaattaacaatgaaaccaaaacaaaacaaaaccatatcacacatacaagactaaaatactcaaaattatgtcgtggggacaagactaatcgcagtaataaaatatatagatttaatcacaccaaagtagcattaatttatccaattactaaaattttatcatggcgttaagacttgatagctagaatacatgcatgcatctttgttggaacacaattatgaattattaaaaaatgaagatctgcattttgaagtctttagataactagtcccatattgcttgagaacacttatttatgagtgtatatatatattgtagacacgaacaattgggttggaccccaaagggtacccacttttgtaaaaaaggggaggagtcacataaaggttcacccgaatatcacgtgctctaccgtccgaccgagttggtggtgtgtaccttatttttggggaaatactatttattaagttattagttttacttatttatttaattaattaaaattatttttaaacgtgtttaattaattggtaatcatgcaatagatatctgatacagtggttcaactgagttgttttatcttgaggacgacgagattgagagtctgcttaccgttgagagagaggag

SEQ ID NO: 237291 - DNA, 1533 bp, Cannabis indica
gctcgcacttcaagcatctctatgacttccttctttacacgttgaaacctatcgttttgcctcctgtttagctgacaaacccatactaaccataactttcaaatttctcttcaatgttctcagctgaattaagtgaccaagaatactcataagacggttgagtagttctttagaaacttttccatggctagccgctaatcgcgcaactttggcaagcttcatttttatttctctaggcagtctccttttaatagcctgtgacgaattatctgcctcttgattttccacattaggcggccttgattctgctaccattttctctaactctcttatagccttttcaagtattgaacctttcggccttgcattagaaccatcctgctttttgtgcatgtgtggtgtttttgttgttggtgcagagtactttccctcaaaggtgttaacatcagaaagttcacggtttgaatccaattcatcagcgccactagatggtctcccagattgggatttggattgtgcatagacatttttattagaatgtgaagaatcagaggatacagccatttctttgaacttgctacttggatctccatttgaaactttcagaacagaaggatctattattgtttttgaatctgaaattgtagaattcaactgactttggaactgtatattttcaccattaccctttgccaaatcctttcttcgccttttctttggttgctggctaggtagtgcagtggatgaattcaatgcgttctaattgtcctctgttaacaaaaaatccgccatgctttatggctgaattatcaacttcaaagtattcatccaactcagcatcatcgatgaaagagtcttgtgtatcatactgatcatcatcaggtatgtcattgtgatcttcatcgtcactactgtctttccccatataaagtcgttcaatcttctcaataacagcactaaaacgactcggtgcagtctcatctttaacttcttcaccatccggttgcgccgccacaggagcaacggtagtagaagaagacccattcaccttattagcgtccttgatgagcttcttccacgagactatagtagtctcaccgggacgaagctccatcgtgaacatttgacggtcaccgccgcacttgtcttcctccatttgaattgaaagtttcagggctacagagaattctagggtatttggggatcgaagattcgagaattaagatgcgagcaacataaaattcgtataaaccccagcccagccctagaaaaacgaagaaaaacgaactaggtgttgaactgggtaatggatataggcaaattttgtgtttcgtttcaaatatttaaataaaacttggtaaaataacataaaaaaatcttatattatattatgtatacatatctatttgttttatttgtttgtcaagaaaatatatggaaactaatattttggtctataatttataaaatttagtaataaaatatcttatgtaatatatatattccttttctctcaaaaaaaaaaatatatat

SEQ ID NO: 237292 - DNA, 978 bp, Cannabis indica
atatataagcataaaaaatcaaatttccctacaaatatcataaagcattctagtacgatgggatccaattaaacagcttttgtatactaatatgtgattaccataggaaacgaagacaatatttcaattcacaacaaaatctagtactacgattaagaaagacttttttgtacagtctcattgcttcattgggtcaagctttgcaatagtgaataacaactaacggtgtcatttcaattcacaacaaaattagtactaaatatacattaatttccttcaaaaaagaaatataaattaatttgacagacttccagaaacgttgattacactaccccgttatgattataattatcactaacgtcatgagaaattagctattcctagaaaatccgaggccgacctggccataacggtggcaaactcattgaagctaataacgccgtcaccgtccacatcagcctctctaatcatctccgttaactccttgtacgtcaatggctggcccatcttagccatggccccagccagttcagccgccgttatgtatccgttaccgtctcgatcaaacgaccgaaaaacctccatgagttggtcctggttgaccaaaatctcgtcgctgagatgatcatcatcgggcattatagcgctgaccaactcctcaaactcaatggctccatttccgttggagtccacattggagagaagcgtgtgtatttgatcgccggagggctttaggccaagggatcggagcagagcggcaagctcgaggatggttaggctgccgtcggcgtccatgtcaaaccttgtgaatatggccctgagttgattgagttgatcaactttacgtgcacgcattttctcggaagattattagtgataactatatttggaggaggccagggattgggatatgtggtattgtggagatagaatattgaaagaatggtttgatttgcaataatacgtgttgggtttttt

SEQ ID NO: 237293 - DNA, 1216 bp, Cannabis indica
ggtaaacccaatgtctaacatcccttgaagttgaactttcaattctctaagttccgatggagccatcctataggtgctttagaaacaggctctgctcctagtatcagatcaataataaaatctatttcatgttcgggtggtaaactaagtaattccttaggaatcacatctagaaactctttaaccaccctcacatatttaggcccaactgtttcgagtctactggtatcaatcactactaccaaataacctatatgcccattttataataaatctctagctctcaatactgatacgagtggaatttgagagccttaaactcttcccacaaatacaaatggttcctcacctaccggttgaaaagtaccatctttctcatgcagtcaatactagttgcatacttggataagaagtccatccccaaaattatatcaaagtctactaaagataactcgataagatcagtatttaactccctatcatccactgtgattggtagagccctaatccacctcctggagataactaactccccactaggtaaaagggttccaaaacctaattcataaccataacagggtctacccagtttatcaattactcttgatgccatgtaagagggtgtagccccagagtcaaacaatacagtaaaataggagttatttataaaaagctgacctgtaacaactgatggactagcctcagcatctgtatgtgcaatggaaaatacccgagcaggagtgaatatgaactccttctttggctcaccccttgtcaattgagggcactcactcttaaagtgtcccatcttaccacactagaagcaggaatcttgttacattctcccaagtgatgtttcttacaacaaggactgggtacgtaaatccaccttgatgaccaccactccgaccatggttcccgcggaacctcttgttttgcctagaatttcttggtgtgaaaggagtcttcctttttgaatcaaaaattgaatcactactactcctacccaaactagaaagaggcggagtagtgactcgacaagaaccctgagtccttcaaggctcatgcaaaaactgtactgcaccttcagctcaaagagccttctataccatcattgcatatggggtagcatcatcgctcgtaattgtcaaatcatgacggatcttggcattaagcccacccaagcacttttccttcttagtgtaatctgtaggta

SEQ ID NO: 237294 - DNA, 1021 bp, Cannabis indica
ttattatttattttattatatatgtttgatttatacattggttgatggtgagaactcgtcaaccaattagtggccggaaaactaacttatgcttcaagctcagaaatgagataaagaggaagatgaaatatgaacttaaatttctctcttggaatggagagaataatggagaaatttatattaatctcaatatggccttttcagtataattttccaaccccctcacatctaggctctaatagccttgtgtacaaagtggttccatggggacacaatatcactttctcgctacaggctgcaggtgctagtgtggcactttgcacctttgtctggtgtcaggtggtccccagttgcaggttgtaggagggtgtttgcagtgtgtggcctttgggtacacgcctgtggtcctcggttgcatgcggggtggtccccaggtacaggctataggagggtggtttcagcgtacccttggtcgggtcatcaggcctcgcaagtgcgttgtcaccactacttgtacctccatgctctcagtcttcagaaagcgtggttgtacgctcttcccttgcccgccttctcctttgacttcctctcccaatcccattcttttcatcatgcattcacctctctccttatgctcacacaccaacccccccccctccccgcaaaacaccttcacccaatgcacacaacggctcgcatttgaggcccccctgttggaaaattgttgtgctccaatagaaatatcaaaccaacaagattacaactctatgataaataatacaaaggacaaaaatatagataaataatgttacaacactaaacaaaatatacacataaaataagaataaatgaattgcaacttaaagcaataagctacacatgagacacaatatataaatagcatatatatatatattagacatgtgagagcaatctcaacaccacatacaccacaagtgtataataggggaatgacaaaacttgaacaaggtcttacacctttgtccaaaagcttatttcc

SEQ ID NO: 237295 - DNA, 902 bp, Cannabis indica
cctaccctcgcccagccagctagttggccagttagcatgcccgcacccagcctgcccgcgcgcctagccagccctacacccgtgtacacagtctcagggctccgcccatctgcctttcctctctgacatcggcagaattactgagaaggtgtcagggggataacgacagttcaacttgcttatataacaagaacaaattttggttcattcgaggtacaaaatgaaatgagcttttttagtgtaatttaggattctagacacggcaggttgattaggggacaatgtaataataggtgaaagtgactggtcatagagtgcatgggggaagctgaaggggtaaagaaaaggagctggctataaattagactctctcatccattgtagggggattttctggaggaaaaaacttgtatcattgaaagaaaatttatgagatacaactttaaaacactttaaagattctaaattcttttcttggcattaaagtcaaagttccattaaagtttatcaatattattagttgaaatagttatctatatcgttaacgagttctgaccgtgaacagttatgttgttaaaattttaattattttttcttttgtattgttaaaaatttattagattgatttttgaatttttattataatatttgataataatgatagtgtaaactgttaaaatctcactacaccatattatatttttatggtgtattttttacaattttaaaatctcttaatacaattgcagtttttttttatgcaatttcgtttggttgttaacactgggcaaactaacttaacaaacaaggaaagtgaaacagcaacaggactgcccagatttaagatgagaaatgaaagaatggccctatttctaactttatagatagttaatgtccctttt

SEQ ID NO: 237296 - DNA, 2408 bp, Cannabis indica
ggtggagcaagccaagcctccgaatgagaatgaagttgttgtaagaaggggacattgaagtccaaaaaattgaggactagggcgaggtttgctgccttgtcagtccatttgaggtcaagggagaggaagaagaagaagaggaggaggttcacgaatttccttttggtggctataatgaggtcggagagcctatttgtgaggagggagatgtcttagtggcaccaagattacatcgaggaggaatacacagaagctcttcctttaaacaatcgagcttcgaggggtgcctagtgggtctcaccactatccgtgctaactttcaagagattgactaatctctatgaagaaggtcttcttgggaatgtggaggcatttcttcctagtcccaaatagctaacaataaatcccagaggcaaattttgtgcatggttaaggccacatgccaaacatgttgcaatgctgcctttgcattcctatttgaaagaaatagccaactactatcacatatgttcgacctagctcaagggcctaaagtaccttgccgcactgtttgtgctatatgctacccaaagatggggttagccatctgcccacgataacaactaatattttgacctgaagtcaacctaaacaaaatagatttgggtacttctacttttcccaaaatcaatgtaaatggctgaccgacaccacaaacacggatgtgtcaaagatttgcaggtttgtagaagacatcggtactaaccacatcacctctagcatattccatattattacaatcctcctttcactctgggtcttagatcaagagcccaaaaaatactccaacttataaagtcggctcggaatatttcacactcgaccattgaggctaatttcattaagtatgggctctacccatccgatgaagtccaggagcctgagcaagtgactgaggaggttataactgagtaagaggctccaaagaagaagagaaagaaggcctcctagagtgataaagtaacgattgagtggcccataaggattagggatgacatcgaggaggttgctcgtccttctgtccaggtggtaggaaaggaaaatgtcatggtggtggaggaagaagaggaggactcttctgatgaggataccccttcattacttgtttgagaaagtgctcttgtcgacgtacagtgtttatcattctattttaaccttatttgattacgattttaacaagtattcattcttttaaatgcaatcaacacctagaggagtttggctgctgactccacagatgttcctgatattgctcttgaagttattcctccgacccacaagaatgcaaagtctaaggcctccactacctcggccaaaaactctaaagagactaacactaagggggccaggctgccaaggtcattggctactctgcccatactctagctagaaactaaaaaggttaaagaaatgcttaacttctattaggatagcgtgatgcctgaagtaaatgagcaacttacaggggcagaggagattcctgtggagctgctggttggtggagttctgaaggaggtcacctgagtgagtgctttgctttttattgtttttatataggtttcgctatgtgtgagatttaactctgttttatcatgcaggttaatatgaagttggcatacacctattcttgagcaaaatttgctgctctaaaagccataacaactaccagtgaattaaagaaggcactaaaagatgctaaaaaagaggctgagcaaaacagttttcagttgggtgaagtaaacaagcaaattgttgttgcgaacaagcttattgaagatcttaggaaagagattaaggacatgccgtccacaaccaagcttgaggaggaccttaaggcgctgaccaaagaggtaaatactctgaaggatgaaagaaaaagtcttcgtactctccttcaaaaccaagaagccaaggttatagagctgactggggagaaaacttccttgcaggaaactcttgatgttgtgcgggtaattttggtgccgagtgggaagcacacagaaggatgttgagagcttggaaatagtttccttggatgttttctatgagttctggaaggcaaatcctgagaccaactttgactatctcaaagaagatctctgtactagctttcttagcttgtttgaggcacaaaaagtttaggaagaagcaggctggccaaaaaaacactcgtttaccgtcgaagagcatgagaaccttgatgtcgctcaagtttcatccgatcaatacaaagaacctgggactcttttggagtaatattttgaaacttcttttatctatttggcctacaagcctttcctttagtacaatatggccgaccaatcagcttttaaacttgggaaaatattttcattttgtttaggacaact

SEQ ID NO: 237297 - DNA, 783 bp, Cannabis indica
ataataataaaaataatataagttattttatgaagagggtgatgtcaattcatagagaaaataaaggaaaaagggtagttgcacatttatgttgtgtcaaccaatttttgttatttttctttaaatgctaaaaagtgtaatttgaagaattcaaaatatcaccattgtgagcaaattaaaggtctttatttttatagagttctccatcacttttgaactttaaatttactctgaatttggggtagaagaatttttttcttcataaaaattaaaatattaagaaattataaatttctttgtacctttttcttcggccttgttgtacttactatttagggcattccaaatctttttcgcaaatattgtattgatatagaagtcataaaggcttagaatatgacctctacgtaagtattagaaaacagtgtctcacataaagtaaataataaagtattggaccatatataatatcccataattctcaataatattttttttcttcattataaacttacataggataataataaaaaataacaaaatttataaatacaaaataaatatatatacatagataaagaaatattaacttatggaggacaatataaaatttttgtaaaaatttatatatcaaatgttaattcataaaaaattgacaagagcaaatgactcataagccctcctaaatggactcaagaatgtagctaggcaatattgagtgtagagaagatgagaaatgtatgtataacattctcatgcaataatgccaatcaaaataagtag

SEQ ID NO: 237298 - DNA, 627 bp, Cannabis indica
catgtttattacaccaatctttggtttggagattttgaatctattttattggtttggagagtaatagcttggcactccaaaacataagtttatagcttggcttgtaattcttgacaatattaggctgcaaactaggactagactacacaaatttggtatttatcaaagaaaatttgttttatttcattggacttgggtctattaaagattggttgggttggaaagtaaaatctgatgatttagtatggttgttgaggtggatattgagcggggttccgtcgtgggtgtttttgcagttgcgttagtagctatagtttatcacatttgaaagattcgcaatatttctttgtaggagcataaagtgtgtagaatcaacatattgagaattaacatacaatttccaaaaggagtaagtgagataaataaaatgtgattgtggagagatttaattgtatagctttactagagtagtgaggggtttgtgttgttcatgagtggctttttttatttttgccctattagttttgtagtgattgtttgaaaattgaatatagaattttaaacttacctatcaaacaaaagagagaaaatgaagaaacaaaagttggaggcatgtgcaccctgttg

SEQ ID NO: 237299 - DNA, 3844 bp, Cannabis indica
aactttaaagacccgaaacataggctaattataacctaacaaatatacatatatgttgagatttatatgtcttagcccaaatataatttttttagtaaattcgctatcaaataaaaattaatttttttctgaaagaataaaaattaaaattttagaattaaattatgtaaaccagataaaattaattaccttaaactttaattattgttaaatttttctttaattatttgcaagctttgatcattgttaaatttaactttaattatttgtttcactttaattaactacattcctttgttaaattgatgttactaaacatagtgataagtcaatattttatcttattaatatagttaatttatgtattaatatttttaaattaatttttttaaaattattgattagtatgattataatttgttaggttattttaaagactaaacatgcatttagagttatttaaagaaatgttagcatattttagtagaaaatagtggaagccaccgagttcgtttttacaagacagaacttaattacaaattatgacgatcttgaaagcagaattggacttggagctcagcatgaaagttgtatatctcgttctctagctttcttaaacatcttgaatcgtccaattggaagtgatttctagcaaaatttgaattttttttttttaagagatatttttaagaattataaatatgacttctaggatacgagttctatcacttttgaaatatatgtttttgagagaaaaattcaaagaaagagcaataataagacggagattgcgacatcaattatttaaaagaagttaaaagagagactagacaatttcttttgtacacataacacatgttttcctctgtggaatcacagtcgactaggagaggaaagggttcggttgttgatttgtctagctcaggtaggctaaaacaccaagtccaaaaataagtgggctttcatatttggacgtggagctgaggaggtggaacgactacctttcagctggctagaacaccatgccaaaattaatgggcttttatattccaatgggagacggatcgtgggctgtagcctgtagcccatattcaccaagtcgtggtgatggtggtgattaacactcactcatcaactataaaatgtttgactcattactttactaacgtggttgagtttactgacatgggaaatttaccgataacaaattgaatcatactacttttcataaaattaataataaataaataaataagcaattggtataatacagtgttttactgttttgtatgttctttgtaatagttcgtctcattctctaatatcatttcatattaaatttaactccaaatattatctttggattttagtttaaagatttttatggtttaataattctctagatataatttattaaggtttcaattggcaatctcccattaagtaatgggtcataatagagaaaatttcatggaatgaattacaatacatacatataatccataattataatctccataaattcaaatcataaccctgcatccggagccggcgttggagcctggaactcatcaaaaatccctgtatatacaaaaacacaaaatatttatttatatatattatatggttcgtgggcactgcactagatagagtatgttttaattagcaataataataataataataataataattaccacaaagaagaagattttgagggggtgggcgctccttggcaggattaggatcagcatcaaaaacccttaggtagagttgttgacccaaaaaccagttgttcaagagttgtgatctcaaattccacattccaggattgtccaaaaatgcataaaccacactccatcctcctggatacacttgcactgttgatctaactattgggtcatagatgttgtacgtactacgtgactctgctgtccactctccactcccaaacctaaatatatttatattaattactatgcatatcaaatcataataagttaattgcaatctttatagtaataacactttcttacccaacaacatggaacccgaaaccatccaaatgccaagagtcaatcacatccaaactgttctgaaatacaatctccaaccaccctttgtgggttcccgaaacgacagagattccatatgcagcgaagtcgtttacagattgggtggggaaggcatcaagttggtagacgcctgagccattcacaaattgatcagctagttttaatggggtgctcactgtgtaatacgacacattgttcactgtgtagcgaggtagccctctaatttgagcctttaggccttggaggacgaaagtttgtgacaatgtaatatttgacacattgaatgtgccttggggatttggcctcgcagctcctgctgttaagttccacctattttttccaaagaccaacgacacaacaactttcagttaacaattcacacttttcgaaggacatcatgacataaaagcttgttcttgagcagtatttatttttgttgtacctaatggattttgcttgatttaatgatgagtcgagatcaaatgggtcaggcccaacagggagaggcccaccaacagatgatacagaattggagtagtgtaaaactccaatgcccgtcatgctactactcatctgggtggtgttgaccaacatgggacttgccacaatgtagtaatcagactcgttttgattggctgtaactagaactgagtaagattgacccacgtgtacatcaagagaatccaatgtgatctgattggagtaagatccttctgtctcaactaacaccatttgatggttttgaatcctgaagttgaaactcacagtagaccccacatttgaaattctaaacctgtaagttttccctgttggacacaaacacatccctcactaatctatttttataaatatcaaaacagtacacgctttataataataataaaaaaaattaacttctttgaaattcactattattgaattttttatttattttttcgaggggagtttgtttgttggatgaaatctgtaattaagatcttgaattaagtagtattgttggatcaaatttaacaacaatgactcataagggcccataccttgtgtaacggtgaaagtttcgtggagctttgtcatttggtggccataagggcctttaccattcatcaaaatgatatcgggaagaccctgaaaacccataggcggctgctgctgctgcactgacgaccgactccactgtttttcaagttcatatataaaattattatacgatattataattagtcttattcattaaatgaaattggttacaaatggaaaataaacatggagagagtgagagatagaaaatagaaaatagagatgaccttgtaactatcatagctccaatcaccaataaggaggtcgaattcagcttcgggcttagggaaagggacagcaatgacattgcgattgttgactcgaatgggtccaaatccacctgcagccttctggtaatggagtgaaggaaagtagaagaagctgcctatctggtccttggtttggaacacataagtccagttactccctgcttttattgggcaatttgtgcctgataccccatcttgccatgagtttaatctttgttgaataccattcctaccaaaaaaataaaataaattatctttctcatcacaacttctcgttttctttccaacaaagatgaaaatattgaacatatttatatattagtaccaagtgaaaaggagtggttcatccatgttgttgaagacattgacatggataaaatcattggtggtggcattaataaggggtcctgggaacattccatt

SEQ ID NO: 237300 - DNA, 743 bp, Cannabis indica
ccagcgagttcttcttctccttgtttcctgctatgatggttgttaaaatgtttctttcaaattgttttaatgaaatttccttctaaaataagattttatatgtattgtatatgaccaaaggtccgcaatctattttcaaggtggtctattcgtaggtaacttttcccattttattatgagccaatttgattgggtaggtcttttgatgttccattctgaacacacaactttaatttttgtgcatttaatttaggtaaatcctgatggaatgaaattaaatagtaattttaaaaacaaaatatcatttgggcccaaaaatccttcaatcggatctggcccattaaaatctgaatccgccctacagaacctagtgcacctgacccgaaacccacatgaactcgaaaatcgagaaactgggttcggtaagacattttaaatattcgacacccgaaaacctgaactgaccacccgaaaacccgaaccggaccacccaaaaacctgatccgtgtgcagccctagttttagttacaatataaatttttatgactaaatgtggattttaatcacaataaaaaattatttatgactaaaatatagtatttagatacaaattgttgctaatttagttttagtaacaataaatattgtggctaaaaatatttagtcacaacaaattataatttttatgacttatatatatacctttaactatagacctttaatcacaacataataataataat

SEQ ID NO: 237301 - DNA, 839 bp, Cannabis indica
aatcttggtctttgtttaaaaagatggcttttgaagatgactcacaagagctggattactctagcattgtgcaaaggaaatttattgtatggtaaaaggttggaattagagtggtcttctttgaataaggaattttcaaaaataccaaatcaacatgaagatgatatcttacccactctcaaattgagttatgatcatcttccctcccatttgaaactttgctttgcctattgtactttatttcctaaagaccataaaattgaggtgagaactttaattaacctttggatggggcaaggatttctcaagttaacagatccaagtcaagatcaatatttggaagacgtgggttatgaatggtttatgattctgttagaaggatcattctttcaagatgttgaagtagatgaatgtggaattgtagagaaatgcaaaatgcatgatttgatgcatgatcttgctgttcaagtagcaggagaggaatgtactacttttgcaatttcaaatggtcaaggaaatatcaaggaaactactcttcatgtgtcttttgaagacgttgcttactcaggaagtgaactttcagcttcgttggctcatgcaaaaaatattcgaacatttcttagtatctccaagtctaaggaggagtcattttttgatgccataacatcaaactgtaaggttatacgttgtttggatttgaaccgttcaagtatgaagctattaccaaattctatcgacaaattgaaacacctgagatatttagacctttcacgaaattttgatctcaagtcacttcccaattctattacgaatttagtgaatttgcaaacgttgaagct

SEQ ID NO: 237302 - DNA, 1198 bp, Cannabis indica
ctcaacctatatgaaaactttctgcatttctgtgataaatttaaacatatagaaggcattaaacatgaaaatcctaaatgctacacagatcatacatatactcttgtccaataatgaaattggtgtctatttcactatagccaaatcaatactccttagatttttcattaaaatcataaacaattaactagtgacaagacagttaaaagaaattaaataggaatgaaatagatgcacatagaaaataggaaagaactaaatcatattaaaaccataataaagtgtcaaacaatctccattaacaaccctaattaaaagtctagatgctcatagtcattgtaaacaattgataacaattaattaagagcataaaaataaagtagaagaaagaactcgtagaaaaaataatgtgaaaagtctccaaagccgccttctgcctctaatttttgtctctcaaaaatattgttctcaaaaagtatcaaaaggtcccttttattctcaaaattagggtttaaaaatcctgattttgtctaaaacaccatagcgggccgcgacattggtccttcatgccgcaggtcctgaaggaggtttttgggcagcaagcttcctagtgcaatgactgataatattttggccataactctttcaatattacttagaattgaacgattcaatatgttttgaaaagataaaagagatatctagaacttttattcacaatacttttcctagaaatgaacgaattatagtaataatgggcttaaagcttcagacttgattttcaatcacaaataagttgagcatccaaaacttagaatcttacacaccatcatatcttagaactccaaattccataatgaattcaaaaaattcatctcatttaacatttttcttctcattttcaatttatattatgaattttaccatttaaactttaaacaagtagaaaacaagcgtaattttgcactaaaataaatataatcaattgaaacacacctctaaaacactttataaaatgcatccaagctacccaataaaactccccctaacttaacctttactccttcttgagtaaagatcgacactaaaatgaaaataaatgaacaaagataaataaattaggccttaacttttaatcacaccacactaccatcacttgcaagactcaattgttgcaaaaccaaattttcaatccaat

SEQ ID NO: 237303 - DNA, 1104 bp, Cannabis indica
catattattattttgtacttatacacgatttacaaaaaaaaattatattttttgttagtaactcaaacctttactgggggagtttgttccttagctcttaatatatttaagcaactctatattttcaactccattgatgtcccctttttactatcgaatagctaagagaataaggagatcttaaatttataattttataatatttttattattttaatggtttactgttttgttaaattatttttattttagtataatatgtgtagagaaatactgtacagtaacatacttagtattaaaattattcaataaaatatttaaaagaacaaatgtgagataaagtcaagagtttggttggagtgacgtgtatataaagaaacttatattttatagggtattgggaactgatattttatggagaactagcttcatttataaatacaataaaataatctacaaatgacactaaaaacaataatttaattaaacacgtcattgttatcatcaaagactgacacaaggatcaagaaatttacatagagtgggtaaaaaaagtagcattaattatattatgtataccatgttggaatggtaactcaaaattttctatgttgatttctaagggttatctcgttttactcaatgtaatcattccaaaatacacatgcctaatctaaacatttccatggtataaatatgatttacatgtgtgattaggtcacccaaatccaaccattataacgtgttcttatagtgaaagagatgatgatcaacaatagaaaattagagttgcaaatgaagcataatatcatgcatgacaaagccacggttaggattgttaatcaattttctatttcaaaaaacaaaacacaattcctgactggagaattacatgctttgcgtaaagatatcaaaggtcgactcatgcaaactcaacatgaaagaacgactttaagaatgagcttcgtagaccatacaactcggccgtataagggaatatccgactatgttgatttcatgatacaagttcaacatgatttagctacagcttttctcgacgcttcagaggaggaagactctctgtggaggaaacaacttttcgat

SEQ ID NO: 237304 - DNA, 805 bp, Cannabis indica
actcttttaattacttttttgaatttgtaatttttgctttttatttttttagatttgtgtaatttttgcggctcataatgtcactaagtgggtgtttgtccaaaacttaactgatatggttgatgtgccaactattccaacaaatattatttgtaatgatcatgaagtctaattttcttttataaataatcgctaattctaaaaaaaaaaaagaagtaaagcttatgtatcatcttacaaattaagtatttaggactaagaaacatagtatacatatggaccctagtgttataaatatgggtcagactttttgacacaatacgaaactggtacgagcccaagaggcatgagcacgaccccaacacgaaaattatttggttgagcatgacatgacacagataactatgggcttaggcatgacacgacacgatgttgcgaatcagtacaacacggcacgaaaaatataggcttaggcatgacacgacacaacatgacaagtctaaaagtatgagacgtaagcacgaatagattagctcaaaatcacgacacattaaaaagcccgataatataataattgtataaatattattgttttaattgataaatagcaacaatgataaatagtaataaaataatattactttatttatcaattaagtagtaaaaatatttaaattctaataattataattattttttatatacacaaaaatctctatttaagaatactctattcaagaatagcctctaatttgttctaaaaaaaaattaaatccaaattcgggccaattattaataagaataa

SEQ ID NO: 237305 - DNA, 698 bp, Cannabis indica
ttgatgaaaattattgattttttttaattaaaaatgagttttaatcacaatattttattttaacttttttttttccttttgtttcaaaaaatacatgttaaattattttttttattattaatataacaatatttattataattacaatattttaaaaaattaattgtatgacaaacataatttatctagagcataataaaatcttaacccatgtaaatcctatttatatatatatataactattaatttgaaaaagcattgttagaaaacactctgaagtatttaatattttaaagataacatattattattagtgtaatttagtattattttatatatatttttctatatattagaagtggattcgaactttgaaacctctttttcaaaccgtgaaaaataaatgtgaaactactaaatcataccgtaaaattaaaattaaattttgatgcccattcaacaattctttaaattaaaaaatacagtatctattatttcaaaatgtattatgtatagtattcatgagcaagtgaagactcctaactttaactagtgaaatatataactgtagtcttgtaaacttaactgtttatatatttttcaaacaaaaaataattaaaaaataattttaagtgtgtatttttttttttttttgtataattttgtatttttttcttatgtagtactacaagttggtg

SEQ ID NO: 237306 - DNA, 1441 bp, Cannabis indica
tattttagtatgcttgagttgtcgggttatttggggtagatagctttgaccaaaataagcctaagttataaacttggttatttgtagaattaagggtagaatagtccttttattaggtttttaatcttatcttatttagttttctaaaaaaatcttaggctgatgtaaaggacttaattcaattaagttttattagataattagagatttatttaaataagaaaaatcaaatcatatagttaaataatttggtaattgcattataaattataagtttattttttttttcttttacttattattacaagtgattttgcttgtaaggagaatggtgagctggtatgcgaaggaatatatgtagtacaaagtggtgacaattgtgttggaatacttaaaatgttcggcttggattttgagaccttcaccttcatcaatcctaatcttgtttgcaacaacatctttttcgatcaatggtcgattagttttcacctgagtgaattccattttcttagagacaatggaaattttttgatatcttgtagattatagtgaatgatttaggaactaacatagctagagcttgtcattcccatagatggcaccaaattattgacggtaagaactcttcaattaaacattaagagccaaaattgacattcaaagatcttaatagaagaacattcaaggaaaaattttagactcttaaactttcctcttaaaaactattgtctcattgatattttctccaaaagaagtccccttacaatgacatcaaaggccctatttatagtgagttctctataattttgaatttcatcaaattcccaagttttagaatattaggtcactttcacagtaggtaaactagtacctcaggtagcctgttgtctcagagatcctcagtttcaccaaaactccctcttttacttgcaccttatatgagataaactttgtctccattatccatactcattgtgtagtcactatcgtgtcagtaattttgttgcttaaatgaccctagcctcaatatttcctccttatttctatttgtatgaggaggctgagggagctgggcactgaaggctaaggctgagggtgagttgggcgctgtaggctgaggctgggagagttgggcgctgtaggctaaggctaggagagagctaggaatagcaggctaaggtacggggagcagggcgctacaggctaagactgggggacagctgggcactacaagctaaggctgggggaaagttgggtgctgtaggctgaggctgggggagttgggtgcttcaggctgaggttgggggagttgggttcttcaagctgaggctgggagagttaggtgcttcagaataaggcagggggagctaggcgttgcaagctaaggctgggggatttgagcattgcaggctgaggccaggggagctgggcgctacaagct

SEQ ID NO: 237307 - DNA, 1490 bp, Cannabis indica
tctttaacaaattcatatgttctggacttaaatagaattcatacaatttatatacaatcatgaaataaatcatgtgaaccatgcagcgtaaaatgttatctctgatctttattaataagtaaatttgattatattgaaatgggttttatttagggcacaaaacccaacaaaatgttgtcccaattttagtcctcgtgatgtggcatgcttacgtggacaaaatcagtgccacgtggtagtatatctcacaaagaggaaggccaagtcagcacttgaataaatgaagaccctggcactcaaacgggcatcaagtgatagaccagctctctctcagggactgaccggccacccctggctggctctatggccgggttgcttggcctcctcagggacttgaccaaccaagaggtgcactgtaggctttcctggacatttctaccgtggacaacaggttgtgggctacgaattgggcccttaaagcctaacaaaatggcttaataatatctagaaactaggacactttggtcttttgtaaatatctaacaaactatgcaagtatcgagggatttgaactgtaaacttagggctttaggcctccaatataaaggccttaaccttagtttagaaacctaagttgcctctaagtccaaaacttgcctaagctctgagtgtttgataaactctctttctcttcctcatttcctctctcacacgcctaccctagcattatctcaacacttaagttttgccattactgattcataccttgtaaccctaagggtgctattgcagatcccatctatagtgatctgaataatatttcccttggtataaatacaactaaaaggggagtagatcattacccgttatcacaagggggtcgaacctctataacaaattttgttgtttatttcttttccttcttatttgtgcaaacacgtggcaaacattagatctatacaaccctattgtcggtttatcactttctgaggtcaacatatattaattagttaaatataatattatttttaaataatattaaagagataaatatattagtttagaaaaaataatatttattttaatctttgtgaaatatgagattcatgagaattaatcaattgttatttattagtgaataaataataaatcttatttatggcaaaattaaaaaaaataattctggatcttaaaataagacccacacgtgtagggtgacatataaaggtccatgattaatctagtttaattattttattagttaaaataacttaaactaaattaagtctattatcttttaattattaattaaatgaattattgaatagttatttaattaaatttataataattaaaataaaaaatctactgataattgttattaagttatggatatttatgtttgaatttagattttaattcaaattatattagatatttactcaaacaaatctatattttttgataaaacaaaatatattcaagttttt

SEQ ID NO: 237308 - DNA, 718 bp, Cannabis indica
cttctaatgaggagccaaaaaacattaacattataacatttccaagtactttaaactagaatgttcttcaaaattttgaagagataaagagtaaaggtgcatccagatgatgtaaacttcaatgttcatttttcatcaataatgttggacacgtcacaccagaagtccatatatacgtcacacacacgtgtcccatgtctcattgctcccataacattatagtgaaactattattaggtgtctctctagtgagaacataaaaataaccaagatgcttgtcgattatataaggggcctatcatattatttggctttgcccagttgactataatgattatatgcatggatcaccaccaaacgagtggttatagttaccgcaagtctgaactcgatatgtatgggtgcgtatggtgtcaataggtataggcctaatatggccagaaatgtctactgagctatctgtaagtcaaaattttgcaattttctattctttggtcggcctaatactagtctatatgggatccagcccgttttctaggaatgataaactcttgtgcaacgagaacaaataatttccatccattttttttttctttttttttttgtgtgtttcgttatctagtaatgaaaaacagattacatatattgactccgaaaattttgaacaagatatgaattgtaaaatttaacatattttatagtagttcgacctttgtaa

SEQ ID NO: 237309 - DNA, 617 bp, Cannabis indica
gggctagagatcttaacggaatgggtcattgtattccgctgccaccaatgtatagtttatttaacccttatgtgtttatttcattgttttagagatattcataattaggatgttaatcaacatacttgttagtaaatctagatcctggtaaaatattccctagttgttgttgcaggtcaaccactatttggttaagttgttcaacccgaggattggcctcctcggggtcttttaaatctaaacgtgattccacatgtgaaattttctcattagtttattactaggagctgttggtggccttaggggacgagctgtggagctggtttcaagacctcacatcatctacgatgtaggtgtagtcccatcaccagtttaagtgactggcgtgcccccaatttgctggccagttgttttgattattctttcaacacttgaggactgtgttgccaccatgtagaaagtgatttgtagacacaaatatctttccacacccacttgctagattggcgagaatgtattatgagttaagtataaataagagagacacaacaatttatagtagttcactccctgtgtcacgacaataatggagatacatctactttgacttttatttc

SEQ ID NO: 237310 - DNA, 1767 bp, Cannabis indica
gacactctcgttatgtctttttggaggatagcaagctcagctaggattccttcatttaggatattttacttttaaatcgactgaagggtccctcctcacaaactctcttcttccctgggttcctgatgtacataaacacttcgacaatccccacggtcatgtgggccagttctccctttgggaaacctgtccccttgcagacctttcccttttgggagattagagcgtactcttcgtggattacgagtgtctctctagtccccttaggtactgttgtagggttcgccttaagagatggaggtcctttagaagggtacctgatggggctaggctccctacctttctttcttttttttcttttttttctgtaggccgtgagggtccttctcctaccctctcctgcataggtggtacaatatatgggtccacattgatacatgcggttgccattgcctgcttcatagcagtcaatgctttttgcatccttctattcacttttctttgctctgccaactcagcatcatgttcagcgactcgttgtgtaatgccttaatccttagggtcgccacgtgtgtgcgtttataaactaatttataatcataaactagcagtttaaataatatgtgatttaataaaaaatttaccaactaaattaaatcataaaatcatgacatagtccctttttacgattagagatcccctattaaaatattacaagacatgccattacaataatattataaaatacatttaaaagttcagaacatttgaaatacagttcttgacaactcaacaccaattgtcggatcagctgatatgtacatttactggagaagattcttgactcatggttgtccaaatgtctctacctattacctgcaccatatagcacatgtgagtcccaaggactcagcaagaaaagtaataacagaaatcatataatttatttttcaaatattatcatttatactcaggcaatcagaatcaaacaatcacatattactcataagatgaaatccaaatcgctactgatatttttcacaattaaacgtcagtatatagatatgtgataatataaaatcatcatattaataatagaagttatattcatttaataatataaattatatatgttatcttataaaggaaccatctttattacatcacattgcctaatcaggaaagtcgatgtgttaatctaataatcatgtattgcattgctaatcaggcatgcccgtgccatagcctggcacccatatatcgcatcacctaattaggcgagcccgtaccataacttagtacccatgtatcgcatcgcctaatcagacgagcctgtgccctatcatggcaccaatatattttatcacctaatcagatgagcttgtgccataacttagcacccatgtatcacattgcctaatcagacgagcatgtaccttatcttggcaccaatatatcacatcacataatcaagcgagcccgtgctattacctagcacccgtgtattgaatctcctaaccagacgagcccgtgccctatcctagcaccaatatatcgtattacctaataaggtgagcccatgtcataacctagcacccatatattgcatcacctaattagacgagctcgtaccctatcctaacaccaatatattgcattacctaatcaggtgagcccgtgtcatagcctaacacccatatgtcaatgtcgctacctaaagaggattgccgacaagtgagaaccctaataacggtttcagtttgcagt

SEQ ID NO: 237311 - DNA, 683 bp, Cannabis indica
atcaatttgtagatttatactttaataaaatattaaaattaagagaattaaagagagaagaaaaaaatagttttggaatgattttaaaatggcatgtcaccgcctcatacttttcttatatataatcaaataaaacaaaaacatatataatatttatataatttaatataataatttttataaaatatcacaatcataattagagtcggtcttagattaaagtaggttaaacctgtactttgaacccattcttattcagagtttaaatgaaaaaaaaaaacttttaataaatatgtatattttttaataatttaaaaatattatttattgttataaagagattaaaaaaatatttttttttgacccaaattaactcaaaatctacctgctgcttgataacttataacaatacaaatataatattaatatcaattacacaattttgtttttgtaaaaaaaaaaacataattgtaattgtacttgaatatattttattttattttttttttttgaaagaatacttgaatatattttaaattcttcaaagattgcattatacttttgttgattttccaaaatagacaagaaaatatattgtttaataaatttcggttcaaaaccaaaaatattctccattttaaagaaaaaaaaatagttatttatatcgtaaaagaattttgtca

SEQ ID NO: 237312 - DNA, 2160 bp, Cannabis indica
aataattttcataattaaacataattaactgctaatttccaaattaaaataagcggtctttacaatatagttctctcatataaagaaagtgtgacaatgcacattctatttagaaagagttgtaattatcaaattttgtgatttttttctaaatttttttattcaatatttattattattaattaaaagagagaataaaataaataaattctaattactttttaattaatattataaacaactaaaaaaatcacaactcgggaataatttattaaaatatttaaaatcaagattaattttaaaggcaatgacttttttttattatttttttgtaataatttaaggaaaaaaatacttagttataaattacatcaaaaccataaatttaatcatgaatttaaactgagtaatcattttaaataatagtaatgagagattgagaaattttttaaaaactatatatcgcttacaataagaatataaaataattttgatatttaccattctcaaatgttattccctagtatatatataaagaaattttttaagagagttgaggtggctttctataaagatagtattatcatcttttttattttatggtggttttaaattttttaatttttttttatataataacactaaattaaaactaactaattaaaagaaattaatcatcaatggcttatagaattttaaaacatggcttatagtattctaaaataaaaaccatttatatatgataattacaatattataacatatgtattgactatttgaattcaaccattaaaaaaaaaatttgtatttttttgtatttatttatgagaattttcatctcttcataattcttgccatactatatatatgtatatcttactattgttcaataacataaaaaaaaaacttaaagactatcacatatataccataaaaatatatattttagagcttgaattttttttttaaaaaaaatataattctatgagattaggaagagagtcaaactattggtatggttatgattaataaggtatgcattttctattttctattagtatttttaaattatgtcatataaattttagaactggaaggttctttagaaaattatcatatgggattagaaaggaagctattggtatgattatgattaataaagtatgtattcttcattttcaattattattgttgaatgtacctattttttgtatacaatctcatatatatatatatatatatatttgtatatattaactatttataagtaatcacattatatataaaatggattttagggaaaagcttaagcaatcaccttatatatatatgaaattaattttgaaattatagatccaacaaggcttatcatattcaaatgcaatgtcatttataaagtcttgatctctacatagtgatgagagcattaatggtgatatgaagagctaacttacactattacaggtgaatgtggttataaaatgatagatcaacaacatttaaaatttgaatatttcaaaaattagtcggacaaattacaatcgatattttagtccaaaagaaagccatgtttttgctaagatatattaatttgttttttctcttttaagtttcatatgttaccctttattatttttgttacattttatcaaattttaatatagttctttatttatatgttgttttgttttttttatttcttttttaaagatcgtatatatatattgtaaataaaaatatattaatgtactatgtagttagatcaatataaagaatggtaaagattaatatacatatcattcttttattttagtgaggacatcacatttggtcccaaaaaaaagagagaagaagaagcaacttatttacatcaattttggtaatagaaaaaaaatcacatacattaattttgtaactgaaaattgttggcattcttttattaatatttattgttatagtaatattaataacaatctatttatctatccatatatattttatatgtatatgagataaatatatttaaaaaaaaatgatttgacattatgtttatatttcaatttattatattattatgtgagaattttacatttttatcaaaaaataaaaatgcatgaaaaaaaattataattaactatctattaatagatcaaatggatt

SEQ ID NO: 237313 - DNA, 1210 bp, Cannabis indica
gtgagtttacaaaaatggggagtaggactaggagggatgtaattgatttttttttggtcaagtgaaaattttattttttttaattaattattaataaatcaaaatattctatttagaataattagtaattttgtctcttgaattttcgacaatactgattctgtcttaaaaatatagggtttggtaagaatctcttcaactttatatttacaaaaatttagtaatttgtctcctaaattttgataactattaatcgtacccctcaaaataaaaataagaaagattaaatattttttttagtaaatcttaaaaaattaatttagattttaaaaaattatttttgaaaatttaaaaaagaaattaaaattttaaaactaattaagcgattcaaaaaattatttattttttttatcaaaaattcatttaaataaaaaaaaatgtatattaaaaattcaattttcaataaggatttgaggagaaaccttgagccaagatcaaagataaaccttagatactttattccttgttgtttttaaagttttaaacttgattctcgtatttgggaatttgggagtttaatttatttgaggttaaaataatattacaaactattttgaagcttgattttagttgtctatagcttgtttttggaagttatagcagctatagcagatttgaggaagtttgggttttgaaaactcaagctttgctcaactatggtgaatttcattgcatgttgttttagatgcttttgagttgtgaattatgtttagattaccccaaattgttgttcttgaaagtttggtagcttttggttcaggtaggagcgagttttgggggcctaaaaatggaaatttctgtgccattgctgcccagtttttgccgaacgttagcttccttgaaggttagcttccctaaaggttggttttctaaaggttagcttccctgaaaattggttccctgaaggttaacttccctgaaggttagcttccctgaagattggttccctgaaggttaacttccctgaagggtagcttccctgaaggttagcttccctaaaggttagcttccccgaaggttaccttccctgaaggttagcttcccgaaggttacctccctgaaggtcaactttagtattttagctataactttttactcgagtgtccgttttagatgctctatataccgtttcaaagctttatagcatgtg

SEQ ID NO: 237314 - DNA, 1143 bp, Cannabis indica
tccaaccgttactactcggtcaaaatcataagtcccatagtacataattcataactatgtctttctactccttctatgagatctcctaagctgatctacggacttaacttagtaacaagttaagtattcatttctgatagatattcaattagagcatttcttatttccacccacttacttatctcaataccttgtaaatttctgcttattaacacatcacttcctcttgataatctctggaacgactatcgattctgcatcctaatatgaatcattctagcgtactttgtcctcactcatacgctttccgggatgactccccgaaagattcccatcttgagattacccaagttaagtatgcttaactccaaggtaagctcatggtggattatcagaaagtagatgcttttttttgtcgttcttaattgtatttctttctttcattctttcgtaagaaagaaaaaaaatcagttcccttcactcccttcattaacctcttgcaattcctcattggttttgttcacttaaacttgaggaattcccatctcatcgtcaacttaaatcttgttcatttctacttattttaacttgtatcaatttctcttaaactgacacaactttataatttctcaatcacttatggttaactaccattataaagtgaattgatgtaacctacacgataaaggcaacattgctcataccaagtatccataactaaattggaaatacccctttcccaaattctcaaatgataacaattaatcaaagatcattccttgatcgtgaagtttcttttttgtgtttggtagaaatcttgataatcttttcaaacacatccagaaatatacatatctccagtatattctttattttattgataaccccttggtacaaatgaccataccaacttatagtgagtctcccattgatgatgatgattcatcaacatctaagactctcgtgttctttttttccatcattaccactaaggtttcactccctgtacatatgctaccattgcttccttgcaatcatcactatctccagacttggttaaccactttaaaacttattttacactcaattatatagctcgttgtttaataaacaacctactttgtgatccaacattcaccaatc

SEQ ID NO: 237315 - DNA, 875 bp, Cannabis indica
aaaaaaaaataataatactaatgtattaagttttctctacatagttatttcatgttcaatttgatggcgatatttatttatttatttgccaaatttaaaggtctttaaatttagataataaattagtagaaaaaaaaaacaatttcaatattctttttttttttgctaaattaccatttcaatatttgattatagtatatttcaatgattttttctttcgttttttttttttattaaaaaaattaatatcttcatctactcggatgaaaattcttatctccgtctgtacataataaaaattttatttatttattttttcttttccaatcttgctttgggtgcaatgttatattttctttttttttctaacaaataaagaaatttatatgaaggattaaacgacaacgtttctttaattactcttattattattattattattattattattattatctcatggtgaccagatagatatatcttaggaggatcaaatatgcatgtgggtctttcaattaaaaagtgtcactactctagagtctagtatccttaaattaaatatgagatttggttttcaacaataatattctttttttttttcagaaaagattttcaacaatataatatcacattcacatcaaataaaacgtgttcttttataacatgaatacaataatttctaaactagctaactcagctaatcatgcatagacaccatgtgttgttggagcaagtaattattttattttagtgatacataaaataaaaaagatactaacttgtggtaaaatctttctaatcattttatattgttacaacttaattgacttcaataacattttcacgtcatttttgctgttaaatgccagttaatt

SEQ ID NO: 237316 - DNA, 9628 bp, Cannabis indica
tactaccaccctcccccccccaacccccccccccaacgaatttgtgttgtactataattttcaatatagctgggctttgagccattcttgttagaattaaatttccttaaaaaaataaaaattgaaaatgatatgtgcaggacaggagctaataagttacatcctttccactatagtattcagttcttgtcatattacaaaattagtattttgactttgacaatgcaaaacaaaatgaaaaaaaaaaacgtcaaagaaaagattttctctaaagcagaattatctaagacaagtccggggaaaaggtaagatttttgcagacattagtaatacattattggtatataataatttgaatgcccagaagtaatttaaaataaagctttatcaatgactgactaaaataacagtcacgaacaaaaaaagaacattgtccgttaaaatgaacgcaaataacatagctggcctacagagagataatcaagttttatccacatcctataacatccacaaagatgaagtttgtaacgtgagaaccaaatacgttgatttcatactagatatcctgtgtttcaaaataacaaattaatcatattgaattctactgtctaaatgcttgttcacaaaacaggttgtctagttcctatcagctataaataagaatcgaggcactcgtataactagatacaacttacttgcactttcgaagagtttgaactagctttctttgaaaagccactatccataccaaaatctgcaaaaaagcttgaagcttttggtggaagaacatgactaatgacatgggcaccactagaatttgtctcagcagatggaacactttctacatactcaaaccgagacgcaaaagatgatcctgcacctgcggtaggcgtgctgttacttgaagtggaaacaggagcaacaactggctcttctggcttctgatcatagagattttcacttggctgcattgtaatataaacattgtcaggccaaagtccaaacatcatctcaaaatagtctgcatataaaaaatatctttagaaaaaaaaatgaaataacttaaacctttgtagtaagttttcgagcgccaagacccccagtcttcccagtttttctggcaccaagaggcttcttcacagtgctaacaactgtatgagaaacttttggtgaaacagaaacctcaggtggctcctgctttggtaaggagttcactttcggagcttcactagtcttaatgctggaaagtccatttgatacttgtgctgattgagaagcaacaggcgatgaaggtaagcctgcctcatctgccatacttttagcaacttcttttgtaagtagctgtctgtataaatcagcagctcttgatgtatactttgcctcaatttttccaccatcagtccagccatgctgcttaaagaaaacatgtgcccgattgtttcctccaaacatcatcattttcaactgctcgggagtccatgagtctaaatttgttgacctacatatattgaacaaatgaaaatggtgaatctacatcttacatgaatattcaaataataggtcaatcctcatattttcaaaatcaactcagttcctaacaaaaccacaaaataaaatacatatgccatatactctattaaattattaggggaactgcgaaggtatgagcaaacaagaacaatgtagtgaataagcacccgattaattatgctgatgtcttagtctaaagatgataaacttcattaaagtcacaaaaaagaaaaccatcaatctatcagttccatgtaataaaaaataggatgggatcttaaaatacatttcccggataaataataaaatggagaaacacctccttccttacaaaatcagctcaatattgaaaacttccacgtgaattttaaataaattccaaaaatgagatcatagtccctgcattttgtgttcacgtgcagcgtaccgctaattttagcagacccctagctaattcaaccaaaattgtataatagaaattaaaaaaagaaaacagaccacaggttagccttttctgctggcattgtcttttggcatctcttttcttagtcaatataccttaatggttaaaaataatctaaagattcagtttaacaatcctcgaacaatgcaaaactatgcacattccataccttcaactaggttatacattgataaacaactacataacaaccactttaaaatcaacaactttcttaatggaatgcaaaactaattacatttccaccaaaacccaccaaaatatttcaaaatgctacacatttccacctttttgtatgtttaatggtaaagaaaatgcataaacaggcaacacccaatgtatacatagataattacatacagaaacacgaaaaatagatctattgttataagccacccaaggattctgatcagccactcaaattaaaattccaaacacccaaaatatgaaactcacctaacgaagctgatatgaacaccgagattccgatgagcagcggagcaatcaatgcagaggaatatcccataagtaaccgatgcccaagttgggttctttgcgttacaatcgaaacaaatctggaaaacccaagaaaaacaaaatcaaaaattacgatagccacgttcataatcaccagatctgaaccagatctcagaaacccaaatcgagcttcacgactataaaccaaaagcaacacaaaaacataccaaaaaataacaaaaaagattgaaccttaccttgttatcagactttgatttcagctttttgaaaacagcattcttatcagtaaaagcatcggacgccatgagaaaaaaactttgggtagagagaattaaggaaggtaagagaaaaatccgaagaggtgctaagaagaacacctcctcagaattattattattattattatatatatggatggacagagaaatctgagtgaaaccgtagatttgattgatatttggttctctcttttattttctttgattttctttcttagtttgctaattttctcatactttattttctgaaaatcaaagcttttattagttgggattttgggaggaagatgatcggaaattacagaattaccctcctctggtttttgtatttattatttgtatttattttttaaattttgaatttttttgtttggtgttaaaagtcggtggtttgttgctatcttcatcaatcatcttcctaggtaggaataacattacttaaaaataaataaacaaataaataaataaaatcttactaggaaaacatatatataaaaaaaaaaaacggtaaaaacaaaagtttaaatttgagtttttggcttaatgtatcatccaatcagggccggccctgaaaatatatgggcccaagacgaattaaattttggggctctcgaaaatatataaaaaaataatcaaaagaagagtgttatgggattagaacccatgaccttggacattataccatccacctcaaccaactaagctatgaatatgtgttgcttataatacacttaaattttactaaaataaaaacctaaataatttttttatttttttatttcgggcccccgaaaagtgtgggccctaggcgcgggcctagcccgcctatgcctagggccggccctgcatccaattatgtatatatattagtattacatgcgatacatgctattgttttatttcaggtttcttattatgagttttttaaaaaaatcaaaataaatgatgttttatgtagaggactttctgaaaaataaatttaaattaaattattatgtttactaatgttggtaaaatatattagaagcaacagtttggattttgagggaaaaggcaaatgtaaatctcagctcattttgggtatgagccagagcaattcatttatagagaagttcataatacaaatcagccattaggcatgacacctggcagtgaatacaaaaatacagatatggaatattcaacccaaatattcccttaatgattacccaatgactaggcataacagaatgtactcaagacaaattacaccaatgaaatatacaaattctgttatgaaacaggggacaactgactgatgtagaaatactctgctgattgctggtgtagagatgttctgctgtaatcctattccttgacatcccctctcaaacgaaagggtgagtttctcacaccgagtttgtcaacaaggaaagcaaaccgagaaggagataagccctttgttaagcaatcggctatttggtcatgtgagggaatgtaccgaatctcaagctgtttttgcaacactttgtcacgaacatagtgagcatcaatctcgatatgttttgttcgagcatgaaagacgggatttgcagcaagtgcacttgcactgagattgtcacaccatgtcactgatggacttgagaaagggaagtgaagttctttcaataatgactcaatccaagatatttcagcagctacatgagctaaggcacgatattccgattcagtgcttgatctcgaaacaacgacttgcttcttggatgaccaagacacaagagtgtctcccaaataaacacaatagcctgcaacggatcttctgtcatctgggcagcaagcccagtcggcgtctgaaaaaccagtgatactgagtctgtcactacagctgatgtgaagccctttagttttagtaccctgcagatatcgtaacacccgtttcactccactccagtgagtatcagttggagcttgcaagaattggctcaacttgttgacggcgtaggctatattaggccgcgtgtgacacaaatattggagtgcaccaacagtgcttctgtaaagagtaggattctccatttgtttcccatcagtgagtgataatggtttgcctacagtcattggtgtgggacaggtcttaatcttgaccatgttgactctttttagaatatcttcaatgtatctagtttgtgtcaagtaaagacctgaagcatctcggtaagcctcaatgccgagaaagtattgtaagggtccaatatctttcaaggtgaatttcttattcagttcatcaatgaatctgtgcagcttgctcttgtcatttctcgtaataataatgtcgtctacatagattaggacaagaataattacctttgcatcttggtagaagaacaacgatgtgtctgcctttgagccatgaaacttccaagctgtcaatgtctcttttagtttatcaaaccaagctcttggtgcttgtttcaaaccataaattgattttttcaatttgcagacataattttccttccctttctcctcaaagccctgaggttgagccatgtaaacttcttcttccaattcaccgtttagaaaggcattgttgatatcgagttgccttatttcccatcctcttgaaacagctatagttaggataattcgcacggttgctgccttgataaccgggctgaaagtttcaccataatcaatttcaggcctttggtggaatcctttagctacgagtctagctttgagccgatttactgtaccatcagcattcaacttgactctataaacccatttattcccaactaagttgtaggcttctgaaggaggtacaagaatccatgttcctttagacttgagagcatagaactccacattcatggctttaaaccagcctggatgtttgatggcttctgcaacactaaccggttcagtaatgatgggttctgattgcatttgactcataaaagttcgaggtttgaatataccggctttgcctcttgtgatcataggatgtgaaggtaagagggcactgtgttcagcaggtagatcatgaacaatttcagcaccagtaggttcagcacactctgaaaattgttgcattctgtgttcatgttgcaggtcaggagcattaggataattatcactagcatgagcagaattattattgtccctggcatgacctgaaacagaactaggtgagtcatagtgaacactgggagacggatcacaagggctgctggaagatgctgcaggagatggctcggacgatgtatcagtcgaggaacaggtgacagagacagatgagggagaagggcaatgtataggaagagtagaccatgaagtggaatgaatgattacaggtggtggtgtggtatagttgttcagaaacccggctttgaaagggaactccatttcgttgaaaacaacatctcgagagatgtatatacggccagtgggactaaggcacttgtagcctttgtaggaatcatgatatccgagattaacacacttgatagaatggaactggaacttgtgagactgatacggacgaagacacggaaaacacgcaacaccaaaggtttttaggaatgcataatcaggtttgcgagcatacagtatttcgtatggtgatttttggttcaacaagggtgtgggaagtcgattgattaaatagactgaagtgtgaaaggcatcacaccaatatttgagtggcatacttgcttgagcaagcaaggtgagtcccatctcgacaatgtgacggtgcttgcgttcagcacgtccattttggggtgaggtatgtggacaggggtgttgaaactcaataccgtgagtttgaaccagatcaacgaaaggcttgtattcacccccagagtcagatcgaaggctctttattttcttgtcaaattggttttctaccaaagccttaaattggataaatgcagcaagagcatcagactttagcttgagagggtacagccatgtatagcggctgtaatcatccacaaagtgaatgtaatagtggtgatttatgttagaagcaatgggtgcaggaccccataaatcggtgtggataagatccaacacagatttggcacgagtattagatgaacggaaaggaagagcatgtgccttaccatattgacaagcatcacaaaatgatttcattgcattttttgacacacttacattgacagactctagaacatggtttaaaaccttgattgaggggtgacctaacctcctatgccacacatccatttgggaaattaaacgactatcagtctgagactggtttacattggaatcgatagaaatgataaaagctgaaaggaaattagactgctggtgggaatgactggatttggtgaaaggtgaatccaactgatacaatccgtccttaagcactccgtgaagcagcaccttctttgttgacttgtccttcaccaaacaaaaatttgagtaaaactcaattagcacattgttgtcagtggcaagtttagatacactaacaagatttttagcaatcttaggcacaagaagcatatctttgagcagtagataattcccagattcagtatttaatttaccattaccagtgtgtgtgattcgaagcttactgccgttaccaatcacaacagactccttaccattgtaatcttgttttctgagtcagatttgctggatcagatgttatgtgattgctagctccgctatcggcaaaccaagcatcggactcaagaacttcaggagtggcaacaaaggcgctgtgattgctgtttgagtgtcctgctttgttctgattgtgtgggttatttgggtcagaccccatatagctttcgtcgaaccggttgtagcagacagcggcggtatgaccatacttgccacagacttggcaagttggtcgagaaccagaactaggaccacgtcctcttcctctgaatctacccgaagttccacgaccattagaaaaacgaccaccactgttggttgatgcattctgagattggaagcctcgaccgcgaccattattgctggttttggctgccatgttggcttgtggtgaagggttagcagccttgttgctgttgagagtaagattgtggagcctttcgattttactatcgaagctaagcaataagtcttgtagttcctgccaggttgtgttagatctagcctctatctgcacaacaatagagaggtattcagcatcaagtccagataatacgttagcaacaagatgggcctctggatagggatccccagccaaagccaacaattctttttctgcctcaagtattcactcatcggtgttgacccttttcttgtagtttggatcaaagtacgcgtattgtccatctttgattttgagtaggctccgtataaactctcaagattcctccatagatttgatgcagaaagcgatcccatgacctctgtagcgattccttcggtcatggagctgtataaccagcccatgagtaactggtcgcttattatccagttctcatattcagggttagtaacctgagtatctccagccatgacgaactccggtgggcacataacagtgccgttaagatacccatgaagtctatgacctctcactatggttgaaaccatggttttccatagtgtataattgttacggtcaagtttaagtgaaaagggctggtttagggttggctgggcaaaggcgtttgggagctgagatggctggttggtgttgttactcgaaccagccccgacaacaccagagttggccggtgagcttgctgctgaaacgggttggttgtcttggggtgtagacatggcagaggccagcaatggctctgataccgagtttggattttgagggaaaaggcaaatgtaaatctcagctcattttgggtatgagccagagcaattcatttatagagaagttcagaatacaaatcagccattaggcatgacacctggcagtgaatacaaaaatacagatatggaatattcaacccaaatattcccttaatgattacccaatgactaggcataacagaatgtactcaagacaaattacaccaatgaaatatacaaattctgttatgaaacaggggaccactgactgatgtagaaatactctgctgattgctggtgtagagatgttctgctgtaatcctattccttgacagcaacaataataaagttattatattgaaagtaaaataatgtataaagttttgataattgcttaaactttaaatattattaaataaaagatttattattttaaattttgaaagttaatataaatgattgtacgatgtataaaaatataaattgaaaggatatgataagttcaattaaactaagaatataacttaagaaaatctgaaaggaaatatttatgaagaatatttaattttttattggtatagaagatagaatgattaaatgtttgtatttcacacttttctttttttttctgttttttttttttgatcggcatataatgcagagtatttcattagttgtaatgcagtacaaaatattatgttcaccacaaatgaaaattaatatgaaactacaaaaattctatattttcatatactcctctagaagtttaaatattttccaaacatgatcttccatattattattatttttttttttgaatttattatactagttgcaacaacacgtgctacgcacgtgtaatctttttggaagtaaatataaaatttttattaatgtgctaaatcagttaaaagataagatttttccttaatagcttgtactgctactaagcaatttgactccaactccactttctgtcaaggttgagttttaattcagtatagcatgcgtcatgtacaaattaaagtgtttg

SEQ ID NO: 237317 - DNA, 605 bp, Cannabis indica
tacggtcttttgggacaactgagcctattttgtttagtcggtaggcaacaacttttgtactatgcactatgaagcttttataaatatttttgtaaacgggatcccgattatgtatatatgttattatttttgtatttatttgtaattaaataaagttttaaataatcacgattttctaaaaactcattgattagcaacgatctgcacaattaagttaaaatcacgataacacacctaaactagtagggtgttacactgcgagacataaatttaaatttaaattttataagggaattgagacttcgatagacgactatggcaacaagtttaacaattatatcaagtttcttgttcacaataccatttctttgaacaagtttgagtttgagaacgttgaggaaacaatcgttcaaactatttgggacaaaatattggtgacatttaaatttttattgtaatagatcaaacaatactattatacaaaactatatattagtttaatgtttatttttcttagtccaagtttgaattctcactgacaatcttatcttcgagaattacatttttaaatcaatgtcaaaagggctacgtgactggagagcaga

SEQ ID NO: 237318 - DNA, 1065 bp, Cannabis indica
taatcccagttcttaattaatcataaacacaacatacattatgagcgccactgcgcttaactctatgtgcataccactatcttacctgttgtcccgcaatagcagagattctgaatccccgggtgctcctgaccaggtgccggtaatccttgccacacaatctgggattttcacaactagggttaacccctaatttcaaactcataaaatatattgatggcatttaaaattcaaataatcacatagagctcggaacaagctttccaacgatataacgaactcccaaatcggagttcagaatcaaaagttatgaaattttaaagttggaaatccaatccgcccaaaaatttgagggcgggccgcggcatgcccaagccatgccgcggcacctcggaccaactcccaggttccacttaagggggcgggtcgcggcatgctcagaccatgccgcagcacctgggttccaaacctagaaatcagccaacattaacacgaatttcagcaacccaattctaaccaaatcatcgaaattcacaattaaactcccaaatcacaatacaaggttgctaccaattattaaagagttaaaaacacatagttcacacatcaaattccagcataaaaccctcaatttcagattgtacaacaatccataaaccccaattttcaagctcttgagctataacttacaagctagctctaatcatcaatttccaacaaacaattaatatatacaaccaagaatttcacaagaagaaaaccctagaactcatccaaggctcaaacatacataaattccaaaaactcaagtaataacatgcttaaatcaatcaaggatctctatcatgcaacctaagatcaaactattaatttcatgcttttaatcacttatattcagcaaccataacttgaaatcaaagttgtaaaactacctcaaattacaccaaaagcaagctcaaactccacccacaacaagcttcaaagatggaaccaaatcaagctaatcctcttcaatccaaggttgaaattaaagaaaaggatgggcttgagagagagagagagaga

SEQ ID NO: 237319 - DNA, 1295 bp, Cannabis indica
gaaaaaatattaataataaaaatctaataaaaacaataaatgaggagtgaaacgagttatataaaattgaaaaaaaaaaaagttgaaacactccatgtcaaaaaaaacctattatgcaacttttaaaaacaatatgtttggaacccttatagtaaagtatttataacatgtcaaaaaactgtgttgaaattgttatacaacttataagaaaaaccatttccaatatgagaaagtaatagcaatctatcaaggtaactttttatgttgtaaaagttcacatggaaatttaaagaattcaaattaatctcgtgtctctattttattgtttggttgtggcatgtctttcgattatgacctttttggccacatttgctgcacctattcagttttttttttttgtttctcatccacctataaatcttcttttccttagtcttccaaatctcactttctcgtttggtggcagaacaatgatatctttgatattttgaggtacatctcatgttgtgtgatcgtgtacagaatatattgacccactatatgtttgaagccatgttttgattgtgtaatactgtgaacaataattgtaaacatttaagttcatctctttcatcacagcaagagcatgagcacatgagagtttgtcttgttagaatctgttgcaactgcacattttttcttttagattgaccgtccgtgaccttgtttgttgtactacctcaaacatgttagcaaaaactaaaaataaacttcgatgccactattatgcaacttgtcgtttaatgaactcttacattttctgtcgatgagtccataaagttgttgattaactttttctcagcagtaggcgtcaaaattgttgttttttctgtgttttttttttcctatttgtgtatgtcaattgttgtatcaaagctcttaatgactccattagtgtagtgattggtagttctctagctactaagtttgctaagtttaaagattcagcaatgttagaagtcatagttgtatacatattgtgtttgatgtggtaccttgaccatttgtggtatctaacttgttgaagatagggtccaacacgcttgtccaatctatcaagctcgctcatatggtatttaaattttctctctgtgtatgcttttgctactgcaaagaatgatatatcgagtttgcttacattcttcttgaaggttgctttaaggttgcttaaggtggtatacacagtagtcgtgagtggtgtctagaaatacatgagccgcaacattaattatgctctcatgtctgtctgagatcaa

SEQ ID NO: 237320 - DNA, 641 bp, Cannabis indica
cccctcagacggggctgcttgaccactaacacacgcctcgcccccagagcgagagcggggaataacagagacactacccagacactcaacctctgagtcatcggggacttcaacattctcagcctccataggaggagtatcagagactaacaacgactcaactaatccaggagcgatactcgaagagagagagtcagaaactgaaggagagacacttggacaatccgcatttgacattataccacagccaaacgacaatcaaaacccgaagcctacccacgagaaaagaggctaaccctgaaaaagaaactgccttttcaatctaatcataacagggaaaaggcaagaccgccaccctgagaaggccgtagaagggggagtgccaaagctaaataggcggaggagagaaagggggcctagaaatagggatcgtatcccaaatgccggaaagccctaagcatctcaatgataaggaaagtaagagaataagggggaagaaaggcgaagatctcaaaagaaaaagaggagggaagatagtgggaaagtgaaaatacaaaaatatacaaaataattaaaacaacacatataaaaggggtagaaataaataaaaaggggacgaggacgaaaggaagataaaaaaa

SEQ ID NO: 237321 - DNA, 690 bp, Cannabis indica
cgagtgccttctcgaaaagccaggctgatattgggcttggcccaatctttgtcttctagggcccactgatgggctttaataatccatcttgtgtccacgtgtcttgccaaaaacataaataacattcatccataagcttccagaatgttgtggattgtggaagcttgcttcagtctacatagacagataagtgggagctaaaggtgaaacgtttattgttttctaaattaaatcgaatatgaaagacaaattctatttacttggtaacgtggcattgtttctttagcttgcgagatctccattcaattgacgaaacatatgtggcaactcaaacgttttgatggcttttacttcagcacgagcttcaaggagcatattaccgtgcaattttacatcgattctaagcaatgcattaaatgctggatggagggctttctaaaccgttggatctattttgtgcttttggaagatttatctcgtctgtgaatttagaatttatacggatcgtgttttgcaattataaatatttgtaagtgccattttttaccaccttttcctaaaattcgatttttttgtttcaaaatcaaactccctaagagtgaaaactcagaacttatattatactcaaatcgaaccatactggagtgtgactttgacttatgtattttccttcttctacaaattagggct

SEQ ID NO: 237322 - DNA, 1126 bp, Cannabis indica
ttaattttaattaaaatcaataaaaaaaaaataaagtatcaagttacaagttatttattatttatttttatttttaaattaatcacaaccccattcaacaataatctaataattaaaaataaatgtaaccatgatagttatatatttgatgtaactattgatacctccccctattttatataccttttttgttattttgaaagctaattagttatcgtttaatataatataatctaattaactaaattataaaatgaatgttaattaaaatttaaaaaaattataaaacaataactaattactatattagtaactaaatgatttttgttatttgtgtttttgaaagagggacatgtggcattcccaattcaagattaatcatctaaggcctggtcaaaagccctaccaagaagacaagctcagtgtgtacggaaggatgggtgcaaacccattcgagccccagggtatatacctctgagaccgaatttatccggattcgaaagggcatcctacccttacaagaaagagcaacaaatacccttcagatgagcattttggatacatccgaagggcattcgaagaggcaccccgggaacctagtacatgatgatgtggcagaagaactccattgtaatacatcaaggtgacttagccaaatacgattgactcgtggactagggttcattaatacccgaaccacgtaaaaatctccatttttacttttattttattttatttaatctttcaactcttattataatcggtttctgaaaatctcggtaaacagtttcttttctagaaatagtgagaaaacatatgattttcacatcttgaaatgttcacaatgatatttttttttaggatcaaccgagtaacgatgtgaacagaaattattttaaaaattaaagaaaagagagagaaagatgaagagagaaaagaatatatatatatatatagagagagagagagagagaagagggtcatgttagttactaaaactgtaagagaatgaaggaaaaacgttattaaattagatggggcaacattatttttaaaattagatatataaagtgtggctatataactgaaatttttggtttatgagaaattcatgggtgatttttta

SEQ ID NO: 237323 - DNA, 1009 bp, Cannabis indica
ccaagcttgagaaagacctggaatttgcccgatctgctcctgtttgggatgacaatactatcaggaatataaaggagctccaatccaggcttgactctcttctgtacaaagaagaaacttattggaaacagcgagcgaggacccagtggttagcccagggtgataagaacaccaaattctttcatcgacatgcctctcacagaaagaaaataaagaaaatcaataagctccacctagccaatggaggtattgtctctgacgatgagggcatcacccgtgaaatggaatcccactttaaccagctcttctcgtccacgaacccctcggaggaggacatcaacaaggccctacaaggcattacagtctctctctcagaattggacaaatctttccttgctgaggagttttccttggacgaaattgaaaaagcttttttccaacttccttctgataaagcccctggtcctgatggtttcaattctaatttctacaaagccaactggatatctgtcaggcatgatgttctcaaagcagcaaccagctttctcaatgggaacggggacatcacccctctaaataccactcccatcacccttatccccaaagtcaaacgtcctacttccctgtctgattttcggccgattagtctctgcaacatcatttacaaagttatttccaagactcttgcaaattggcttaaacttgttcttaacactttgatttcccccaatcaaagtgcttttcttccggatagacttatttcggataacatcattattgcccaggaagttgcgcattccatcaagctgaaaactaggggcaaaaaaggttggatggcggtcaagctcgatatggcaaaagcttttgacagagtggagtggcctttcattgacgctattcttcgaaaattccaatttcccctcagattcactaatctggtgctctcttgtatctccacgactacctttcaattcaacttaaatggtaaagttactggccgtgtttcccc

SEQ ID NO: 237324 - DNA, 814 bp, Cannabis indica
gggcataaaacccaacagcccactcctttgaatcccaacttttctgttgtttcctcacaatctgttagacccaactttgacatttccctgcgaccatcggcttttacagcctactccactgattctttaattgtggctgacaagcctgttgaccaaatgcatgtttcttctgctggccctgctaatcttgtgtctctatctgatatttcctcttctgttggtgattctgctacgggtgctaactcttctcaaggtcttcctgaccctgctgttcgtgagaagggcttagcttctgcctccggtgttaagagaccttctttccagccacaccatgttgtggttggaagctctgtgaggtcccaactgaaacgcgctcgtgctggtgacagagaagaggaatcttctcttgctgctgataacttggaatagcacacccgcccagaaaaatgagtgtgttaagttggaatgcacgtggtttggggagtacacgtgcattcaggaggctctccctgctggtcaaggatcactgccctgatattgtttttttgatggaaactcgattgcctgttatggctgtggatcgtgttagagtagctttaggttttgataatggctttgaagtccctaggaagtattttggaggaggacttcttcttttgtggaaagctactgtatatgtaaatattttatcctattctagtaatcatatagactgtaatattaactttaatgataatgaaatgtttcattttactggttattatggttctcctactgcttctaatcgtttgtttacttggaatctcttggaaaa

SEQ ID NO: 237325 - DNA, 620 bp, Cannabis indica
gctttaggtttttgtaaaacttgtcgtaatggcaggtcagtgtacacccttacagggtgagcttggaactacgaccttagctttcttgatgctaagagtaaatagtatgttagcttctccatgagtgggtatcgactttcaacgtcgattagccttttgttgatggactatactggatgctggataccgtcttcttcccttattaggataacactcacaacgtactctatgacggctaagtatacacctaattcctcgttgtgtagaggttttgataggataggaggttgagcaaattgcttcttcagctcttagaatgctttttcacactcccctgtccactcaagttttttgtttccttttagtatgttgaagaaaggaacgcacttgtccatggatttggacatgaatttgcttagtacatcaatacgtcccgtcaggctttgtacttctttgattgttgtgggcgacttcatgtttaaaggggcttagatcttgtccatgtttgctattattcccctggaattgactatgaagctaaggaacttgcccaatcctactctgaatgagcacttgaggaggttgagcatcatgttatactctcggaggatcttaaagca

SEQ ID NO: 237326 - DNA, 1489 bp, Cannabis indica
tctttatttattaagatgagtaggtgaaacacttattgtgtgataggtggcgtgagatgccataaagagttgtttgagaggtcatgtcaaggtactatggtgctagatggtatatatacatataagagattttacttgcttggatacattttgtcatagatagatattatagagtgttatgtactcttccatacctattcacatcaaagccaaaagaaagtgagattcacccatacttattagtcacatcaatgccaaaaagataatttattggatgtgtggccaataaatgggtccaaatagtttgctctctaactcctacacatatatcaattgacatatatatattattataaccaagggagcaccaccatcaacgaattgtatgtcaagtgaacatacattaagtatagatgaatatactatttgacaattaaagatagtaccttgtacccaatatttaattttaccctcatatatattactattactatcactttctagatgagtgacatttatcattcatccactatttttttggctataaatatggagagttagtatcattcttgctcacatttgttggagctcctggtaaagtgaggcttgaagtcttagaaggagactttcaagaggtaagttttctaaatcctctcccttgaatgttcttgagtttgttcttcatgttcttgtgcatgctcatacttattttagtgatgtagatgagtaaatatattttacttgttgtatggttgtgtttgatctttctgggtagtaaaaatctatgtttttactatttgtctttgcatagtagtaagtgtgatttgagttatgattgtttggctagctagaatatgatcttcctttagttaattagaggaccataactggtggtttatatagaacacgtatatccagttggtgagcattattatggctctacatttttttgtctagttatttttagcaccttgagcttcgatatatatatttttgttttgtctagctgacatttttctttctaaatgtttttgtttttggtgaacttgctcttagtccaatacttttgttctaggtggggtttttgttatgcctatcacaaccatggtatctaataagacgacaagttcatctaataaaacttcatacattactactggtgtggtacgttatgtattggatgattagtgtgaggatatggatgtccataactatgcatctggggttggagtagacaccaattgccctatgagtgatagtgagtcgggcaatattcttttgggtattattcctaggtcagaaataaccttgaacgacttgccaaaattcgtcctcattacaatattcccatacacattagtttgtatgctccgactagtggggaacgggctgactggaagatatcgggttggacgtgtttgtacgagcttccattcaagtatggttttagatttcctcttcctagtttaatgtctgaactatgctccta

SEQ ID NO: 237327 - DNA, 3643 bp, Cannabis indica
tcttcatcttccccatcaccattactgaaaaaaccttgaaaaatggatgttaagtctcttgccaacaagtctaaaggaaaacgacccattgttgaagatgatgatttagactttgctccgcttaccaagaaaagtgattgtcgccctgttaagaagacatcgaaggttaatgctgctgaaaacatttttgtaacgccttgatacttaggcgcgttacaatgattttttaattacagtccacctttgctattcaaaggatttttcttgaaaatcgtgtcaaattaaaacttttagtttaattgctaaacgttacaaactttcatacaattatttacaaaagtcgggatcctgtatttaaacttttacaatattatcaaaatatattttaatctggtcgtacagggactacaaaataaaatcccaaatgtcccgagaccgaaaactccaggtcgtgtcgccatgacatgtacaaacaccatcctagctcagagctcactcctcttcaactttcgcctttcatttacctacacatggaagtagcaactgtgagtcgacagactcagtaagaaaagcataattaataacataactgaaaccttattataattaagtgcccatacacccaaccataaccctatccctgtgtctaacacgataatgagtctaaaacgttcataggataatattatctaccataatatcagcctatacttagtacgctagtcatactctagctgtagtgatgtgatagcatcgatcagtatcttagccaaacatacatatactagtatcaaatataactctacgcatattgataccgctatcgatgtaatctaacaggcttaataaacatgtatactaaacatgtgaacacatatgaatatcattatactaatcttacctcatttctaaattcaagtgagttggccgacctaaatggaaaacttcgtgctagatggatgccctagtcacatacgggtaaatgacatgtcaaaaccctaatctaggaaactcaaactccaactaagggttctgctattggtcactactataacaataccctaaccatcaaaaaattagccaaccaaggctttgaatacaacatgaatcgacaaaatggattgcacgggaaacttgtcccaaaaccagttaactgattttacaggacctggaaagccggttaactggtttgcatcaggtttgcctaagtaatcaaaatcttgcccaaaacgcattcaaacttagccaaactttccagaactcctaaaataacatccaacaataattttcaagcactaaaaacaacatacaatcgtagaatccaattccaccattaatgagccaagtatgagttctcaagctcaaacatgctcattccacaaataaaccagcaaaaccaacgataaataatcaattcaaacttaaaacaacctctagaaatgccctagagtaaatcctaaccaaaacaaccactatatctcaaaataaaaagctaaactcaactaaaagcttaaataacacaaagataatgatctagggtttaccttgactttgagcaacttccaatcttgctgataccttgctgaattccagaaaaataaagagcttggctgggttgttttctggttgtgtggaagtcgagcaagaaagatggagaaaaaaggtgaaattctaaggttctctttatttttcttaatttctttctaaaagaataatgtataagaccatttacttcagctgagataaaacaaagtggtcagctgccactctcccaagcagccaccaaatccctttttcaaattaccaaaatacccttcgtaataaaacttaagcaattattaagcatatgggtaaaatggtcaaaaacaataatcccgctcaaattttcattgttattcattatttgatatgaataaattcaccattgaaaatttggaaaataatgttaatgcaacgagagaaacattggctatgtattgatactgtcgtatagttcctccaaataaaaatgtctccgtaaacgtcatttctaaaaaattgttcacttgcggttgccaatcccggaaggagtcttgtagaatgatagtcgagttcgaaagggagttcccgtatgactatcatgtccactccagatctagtactcaggatagctagcctcagtccatgatggaattctggttggctagttgtccctcctggaatggtagtttcggatagtcgactctagcatactcaatcctatgcggaagcatcttcagtgagtgtctcatagtctttgggtttgggagctcacttatgttcccggaggccctgatacttaagctagcgtggagacttcgctcaaagaggagttggttaagttagttataactaacttaacaacctcaaaactggcagccactgactttagaatcttgatcctaagcctataaataccaccttcacttaccatttgagaagagacggaatttcggagtttcgagaactcagagagaagagattgagagtctaagagagaaaagattcaaaggtatagagagaggtgcagagaaaagagagagattgagtttgaattttataagaagaatcacgtaagaactcaaacaaagaatctcatctcgactgtattgtatctattcttgctcaatcaataaatgaggattatagtggtgttccagaactagagtagagtcatagatcacgtcgatctatcgatcttgaaccagtatatatcttgttgtgttttttttttttgaaaagaagaatgaaactttttattaaaagcaacaatcagcagccaataacggcaacaaatcagagggacaattgtcctctctaataatacggtcagggagataacaagacgctcttgcaagccaatgagcgactacgttagcggaccgttttacataacaaatagacacatttcttaaagacgccaacagatgacggcagtcatgaataacattaccatatgcagaaaacatttcaacagagctatgaatagctttaacaacattaacacaatcggtttctacatcagcttgaatctgaggatgtttcttgagccagctaagggcttctttcacgccaatcgcctctgccagttcagctcgcaccagtccattgacacagcagacatgagcctcaaccagagcaccagcagagtcccgagccacgaaagaaaaaccaaactcagaggtgctgtcaaatattgcagcatcagtgttaattttgatcctattttgcataggtttagtccaatgctcacccactctattagcaccatcagcatttattgttaatttctttatttccaacatttattgtttctggtttttacatattctgtttgcctctatttttcatttgaatggtgttctcaattttattaatcttatcattgctaattagttaattgtttaaagtttatttgttttgattttgtactattaatcgtaatttttctatagtaattagttactttaaaaaatatataaggtaattgattgccttaaattatttatatatatattttaaactttttttaaaaaaagaaaattacacaacatacattattttatgaaaaagccatatttttgtaaatttgccaaatgtatatatcatgaaaatgaaaattccc

SEQ ID NO: 237328 - DNA, 909 bp, Cannabis indica
gagagattattttagatcaaaataaggtggaacaaatgtcatttccccaacatcaaaatggaggagctgctatgacatgcacaaaatagttttccctcattttaatagggatatcacgaagcatatgtatcgaggaaattatagaggaacaactaaaagtagacaacatggtagagccgttgttaaaaactaaattgtttcgtaatttcttcgattgcttagaatttggtcaagatgcaagaactgaggctatagaagttttgcttaaaatttcctaacaacatggcccttcttgtcataacttataaaggtagggcacccaatgcataatattgcaaaaaaatctgaatgagcgactttcattaccaatgctgacatacaaacatctttgttccttcacaactgaccattatatgccgaggcaaaaatcagtggcctaaaagtgaaacgtgctttagtagataatggagcttcagtaaaactcatgccaattggagtatattctgctatgaaagaggtcaaaggggggttaattccgcaaccaatcacactcactggatttgctgccatgtttgtaaaaactatagggtatgtgactgttgaactagaggttggactaatcagaggacccgctcagttccatgtgatagtagcagatacttcgtaccatctcttattgggacgatagtggattcatacacatcattgtgtgttatcgacgttgcatcaatgtgtgaaggcacacattcgggaaaaagatgttcatatcacaactaccaaatcactgtttgctagagaggaagctcacatggtggaagcaatgttctttgacgagcttttagaaaataacatgaaaatggtcacaagaccacgtgcggtgcgcttaggggcgaatgtacttgatagggt

SEQ ID NO: 237329 - DNA, 2936 bp, Cannabis indica
aaataatatataaagtgattcctcctaattatattaattaattaccttatattggcttgtaagagattgaatataatcaaaagaccaaatggagggctcaaagttggcagatcgtcgatcaataattgcattagaactattgaccacagcacatatgatggggtagcatgcacttgataatcttgattttgtaccaccattaataatattatagttagtatatatttttggtctataaaatacaccaaaattagtactactgcaaatattagggagtaatgaagaaaaatggtgttgaacagttatgcaagccatttttgtttgtgttattgagatgagaaatttaggaatgttcgaccttgtatttatatatataaatatatattaattattgttattattattattattattattattattatatttatatatataaacaaaaaattcaaatcaccccatgcaccattaattaattaatgtctctgcttcataaagtgatcttacagtctttaaattgaatattaattaatatactatatgtgtcgaatattataattgaatattagccaattatatatgtgaattgatgatgaggttaatctctaatttactaggagatttgcctaatctttgtaacggttgaatgaaaggacttcagattttatttaatttttttaaaaaaaaaacgaaataatagatttgaattttggaagttagtgtcattagaaaatgtttaaaaacagatctttagatgatatttgttcattgaaacgtgcgttaacaagaagtagtataattatagtgaatgatatctttaataatttcacctgccccactattttagagtgttgcttttggtatttagtgattgagactctctactagaaaaaaatactatactttggttgaaattacactatattttggttgaaaattgaaatgataaataaaagtgaaaaggtaacaataccttaaaggtacttttattatacaatattcagaatcggaataaagtaatgaagatttataacgaaataaatgaaaaatagttggaattaatatttgtaatatgttatttactaattttttttggaaatagaatagtctgtgatttatcttgtttactttattagaaaacgtaatcggagtgtttaaattgactaaattctctttttgagttaaactatattatatggtagttattttgtaagacatattttaaaggataaaattgtcattatatatttaatattaaaaaataaaataaaaataattaaaatttattacttaatagcattatttataaaattagtggaggaatttttctctttcttttctcccttatttaatcatgttctttattttttaatttcaataaaataaacaaatgtaagagaataattattttatcattgattcccattattacttattagtaaatcactcaaatatagaaatgttcccactttatatataaatatctatattaaaatatattatatattcactcatctatatctagactaaatctagactaataaagaaaaagatgaactatgtggtagactagatctgacaaaagtttataaaactttttcctataccgctaatctccaattataattttttagtcaatttctgtacttaaaaatacacattgaaatatttttttcaaattttttttgatagtggtgtagtttgttatagttaaaaaattattcctataaaattttgaaaaatttgaatagtttacaataccaaaaataagtagtaaactaaaatatcataaactctattttcagtattgtaaattattcaaaaaaattcaaaaataatttacagaaatgatattataactataacaattactgttatacaaaaatattccaacatgtgatttcgaatgtagaagttgactaaaaaattataataagagattgtaattagcacttattttaaaatcataacttacatatgtgcgagaaaataaggtattgcatgcccggtagagtagggaagttcaccctatcatagacgctccatatatacataaatatataaatttatatatatgggtgcttttataatgtattattttaaaaagggtgcacactgatgcacctttttgagaattttttagtcaaattttttattagtttttagttatagttacttgaggcattttgtaaaattttgcaaaataatttataatataaaaagtcgtgttcaaacaatcgatttgataagtgtataaaataaaagagacaagtgtgcaatagactatttgaattttattttaaacgtgttaaatttttcgaatttcccataagtttatataatatcttaaataattaaataattacaacgtacaataaaaaaaattagactaaaaagttctctcggatattaaaacagataaaggtgcatcaatatatctcttttaggaggatgtatcgtaaaattttcctatatattagtttaaaatttgtgaaataattagtagctttaaaaaattataacggggcttgtttatgtcatgttctgtaattaatgaataaaattttgaaaaaatttaaaacaatttacgatagaaaaagtaaagttcaaattacatgtggataaataaaagagtagcacatatattaactgtttaaattttattttcgatacaaattattcttcctttttaaaaatcttataagataactgaaataactaaagtatacattgtgatgtaaaaaaattaaaattaaaaccatctgaatattaaaaacacgaaaagggtgtatcggtacacctatttgtaagagattccacgctataaaatttatttatatatattaactatttgggtgtttgttcattgttcaaaaaaaaaaaaatattaagtgcttttaaaatacacctaattaaaatagatgtattgatgcaac

SEQ ID NO: 237330 - DNA, 738 bp, Cannabis indica
aatgacattattggcagtacccttcggtacgattgccaagagtttttgcgatggcttggaacttgcaaggaactctaccttttagcttggaacctttcaagaactctaccttaccttagatatttagcctggtatgtggttcctataggaactctatccagttcttctctagttgtccggttcttgttatgcttggccttatgaatttgaatcgatttttcattcatattcagccttgaggctttcatgttcttgcttttggcttacaggaactctatttttgagcactgctattatttagccttaaaccatttcactatggacatatgactatcctgactatcttcttatttccttgacatgtaagtatctagatttacttttctttatgccaagttgaagtacgcccgcacttgacatagtggaaatttagtagcttttactaagcattaaaatttctttgcataagttctccgtgctagtttgatgcattgtacggtgcgagtatccctcaagtgagcacgcagacatatggtctcttggtcacttgaagttcaccaagtttcatagaccttgcctgagaattttcttgtgggtgctaccgggtgtacgcatgtggaactgaaaaagaataacattgagaagtaatctttgtcaggaagtggtttagacataattggtcttatgtgtaacaaaagcttacaacttaatgtaaacttttgaaatcatgttttggct

SEQ ID NO: 237331 - DNA, 984 bp, Cannabis indica
taggattggtttcaagttgcagaaaagcaattgtttttgtttaacacaacaaagaagcaaaattgtaataagggctcctgagttttcttctataataaaatttttatgttaattatacatattttttcaatgatcaaatgaaaggagcccacactatccaccccactggtatttttatctttattttctctcaattaatttagcagatccatatgagaaatgttaattaaagtaaattgtacatggaagagccaagtagtcagatgcgattaattttataattaatatatgtaatacaaaatagaatgcagggagcataggagcaatggcggctaaggtgaaaagactctaggatagtgtttaaaaactgaaattataaatatctgattgaacttaatatgtctatgtacctaactgttaagattatgacatttaacttttaaattttatgaaagattaaagtatagatgatgatagtgatgagaattatgctagcatttagaaatttatgtttgctgtcaaaatagagcccaattttgattttgcttttccaaaatatggacatggtatcttaggtgtgtaaggtattattaattctcagatgtctttttcattgattgttgatactaaattgccctaatattagcactttctttaatttagtaggagaagaattttcattaaaaatcaatagaaataaaagagatcttgaattagagttaataagagtattaatacttgttgcagtgatagaaataattagattttggaaataaagtgtcaatttacatatagagttaattgatatactaaattactgaggtatcactcacaattctccaaactctctttctaccaccatcttagtagttggaaatcattccattaaatctccctctttcgaaaggacctgctttagtattttttttttctttgtgttatgtataaatatattaaagtaagagattaccacacaataaatat

SEQ ID NO: 237332 - DNA, 764 bp, Cannabis indica
atttgtagcgggaacagtggaagtaagagttgtacgattcagaggatcgatttgtgtgccagaggttgatgtgtttatcagttgaagccatcagagacactagttaaaggcgacggataccatataaaaacttagcaatgatagagaaaattttagagagaaaagaggtagagctaagagaagagtaactaaagaaaagcttaaccaatcggttagctgtgtcactttatttatactaatcaaagagacaagaggtttcaaaaaataaaaaaaattaatttttgtaactaattatctaactactattaacttacaaaataaacagttaattttattagcttacaaaatggttgaaactatttagttaataaaatttcattctattaaaaaaaattaagaaagaataaaatagcaaaataaaataaataaatcttatctaaattcaaaatcaatagacttttttgggttgtttgacactgcaataaagttgtggattgtttggatgttacctttttaaacctagatagagaaaacgacaaatacaaatcaaaatttccaaactatgatcaacatccaaatatatcaaaatattattcatatatttcaaattgttttgaaatttcattttgtatgagcttaaaataaattgttttgaaactttttttttttttgttgggtaaccgataaaggttaagataacaacagtaacaaaagttacacagaaagaggggatttcttccctccaagaaagttcattgtctatc

SEQ ID NO: 237333 - DNA, 925 bp, Cannabis indica
tcatcttactcttctacttctactcgcgaagccacatcctctttgtctagccccctagggccttgaggtggacttggttgcgtgtatgatttctagtttccaccatcgtaccaagaatttacttttgatattccttccacatacaactttctacatctctcaatgaaagtaccaaaaggttgactgaaatttttaataactaattaattagagttgtttaaatgattaaaagagatttaatgcaagtatttttacatggttggggcattaatgtgccttagttcacgagtcactactatttaatatagtagtttttcttacagagggtgtttacaccattttttctgaccccttcttaagaatatagttggaatatttatagcctcataaagaaggcaaaaatgttactattgtcacaagtgtcgaaggatggcttgcataagttcccagattaagataatagggtatgtatgtatgtttgtctggtaggttgtataaacttttcctaggtgtttggtaaaataagcccttaaccttctttgattgacgcgatagtacactatgcatccgtcataagactcatagattagagtgtaatcgtcgaataatgggtttaatgcctctaacacatcttttcagaaccattcacaaacatttcccccatgctaaatttaatgcgcctatgcaattcacgtctgggatctaacgaccggacctggatgttttatctagctactggaagcaagcataattcctaactacatggtatgattgaagcaccctaagggacctcctgaacatgactatcaggtctcgaagcgttctcttacggaatttattttaagtattcttgacctttagactttcttgttgcttgcctgacttcgagactgccacgtatattgggaaaattagggacaacaac

SEQ ID NO: 237334 - DNA, 702 bp, Cannabis indica
ttcttatacgagctcaaattcgttttccatatttttatatttttataacaattgatgagctaaatactaaaatgtacctgtattttatatttttaattacttttatattattttttaataattgttacacacaatcatataaaaatataattatataatttaaatattactattattttaattgataaataaatatttatcactgttattattatcatattattagattttttaatgtgtcatgtttttcgaactaatctattcgtgtttatgtgttatattttcgagcttgttgtgtcgttcttgagctcatatttttcatgttgtattgtgtctaagtttatattttttttgtttcgtgtcgtgctcatactttttgagctcgtgttgattttatttcgtgtcaaaagttcggcccaactagaatatggtggttagctatgctagaggaataagatttaaaagtgtaaacatattataatagcaaggctaatgatgtaatttagaagtatgaggtaaaatataagtaaaattttggtcaaacattttgagggagagagtagagaagtattatagaatatatattagctagaaaatggtttcttagtgttttaagaatggagttacaccattctcgtgaattgcaaaccaggaaatatataataaaaaaaaaaaaaaaaaaaaaaaaaaaaaaaaaaaaag

SEQ ID NO: 237335 - DNA, 1391 bp, Cannabis indica
tgtataaatgtttaatgggccggcccatagtatttttgtaatttttttttcttttttgtatttttatgtttttttccctgttatattttatataatcaaatttcgatccttaaattcgaattcaacaaacttggtttgattatatataatatataattataattataatcttaatgaataataaattatatattatatttaaatttttattcaattttcaataatataaattaaaatttaaatataacaatttattaatttgacaagaattagtcataattaacaattgagtctatatttctcttatcttctcactttgacccaatttaataaaaaacttgaaatttgacatagtcaattttcgaattctaattgatttaaataattaattaattgagtctacaagatgatattatctttgacaatttggaaaccacggtcctatataaccaagctctcaataagtaaatctaaactttaccaagtaaattttctcaattattaatacatcctgactctactatagattttgaattgcactcttatttacatagaatgttcgatataccaaatataaatatgctataactatctattatttcaatcacattaatcattgatcctctatagactgattacattgagtagggacaaaaactatcgttttatccttaaaatatatagctccttgtaaatgatatttcaagaaactaacactactaaaaaattgggttttcctaaatagtttttaaacaatcggctaatgtattgtcgtcggtctctaaaactgtcacctattcaaccgttacaaaacaggtagaataggcaatagtggaaaattgtcggcaaaaactataagctacggtgtaaaatcatcgcctagactataggctacggtttaaaactgtctctcatagcataggggacaattttaaactgtcccctatagttttacaattacaccatccaatttctcaaacttctcttgtggaacaaccaaaatattatcaataactttaatattaccaaacccgaaatcaaactccatgtttttatcctaaaatacatcttcatcgtcactacaaatccaagttcacattaagcaataatatatttcttaaacttacaacatatattaatgtaacgccctgtcgcacaaagatgccacgtgtgtggttttacaaaattattttttttctaattatataaatatacaaaaagtgtgattaattaaaatttggcaatctaaaacaaacacattaaatttctttttataaaagataagtattattacttacggggacccctgtttctaaaatatttacattcacgaacaaaagtttttttacaaaataagtttatgctccaaagtacattcaaaatagaatatc

SEQ ID NO: 237336 - DNA, 1020 bp, Cannabis indica
cagaggaaaatcaccccaattcttcctttttttttggaatcaagctaagtatcaagtgttcttgaggttaaggtaatccctagttcttttgctctttgttttttgaagcattgaactagtttgagtatgtgattttgaaaattaagagttgttagggtttaaaggttgtgtaatttgatttctaagctgattttgagttgattctaagttctggatgttagttttggtgtattgtgttgagattgagcaagtttcagctttgaaactcaaacttgggtctctaatggcatgtttgaattcagtgaattttttttgggatttgttggttggaatatgttatgtataccctgtttcggtactctggaaagtttggtggcaatttggcaagttttgagcaagttttggagtggttggggaaacctggtgcaaaccgattaaccggtgtgccaggtcctgtaaaaccagttaactagttttgacagattcctcgaacaactcattttctcaattcttgcccatctcagtgcccttagttgggtgttttcctatttcctaggctagtgtaattcctagtgatgacaacagagccttgagttgtagattcgtgttctcggattagggttttggaacatgtgatttaccgattttatatgtgattagggcgattttaatatgtgattagggcatccatccagcacgagactttccgttcaggtcggcctactcacttgagtgtatgtgtaatatcaatatgtgagtgtatgtatatgttaagtgtatgtgcatgcctatatgttagttacactaccaacacttgtacggttatggtacagagtgtattggtatagtgtatattgttaaagagtacattacggtgataccagcagaagtacgggagagtgcagggtgtgtgtggtatatcactcagtggtactcagggtacgaaacaaactctaccaacactcgtacagtgaggtacatagtgtatgtggtatagtggttgtgttgggttttatgccc

SEQ ID NO: 237337 - DNA, 2484 bp, Cannabis indica
acaaaataaaatgcacatatatacatcaaaaaaattatcaagaataaactaaataaatacacaataacaaatgcacataaataaaaaaacaattgtacaacaacaaacaatacataaaaataaatgaaaaacaactacaacacaactatagaacacataaacaacaacatgaaagcaactataaaataacaagaagacagctataaagtaacagaaaaatagcaagacatcaatctcgttgcaatgtgcatatcattcatagatcaactccgaataaactacaaaacatctaaaaaaagtattacttttattagccaaatattaattactctatacaaaaataaagaacaaataaaatacatgtttattgtacaataaaaataataaaataacgataaaataacttaattaacaacaactcaactttaatcctatatacttagtataaaggagaagaaaaataagaagatagaaatattttttttttattgtttggaaagaaggaaggataggaaaaaataaacatgtaattacatcatgacaaatacaaataaataaataagaaataattaaataaataaatgtataacaaaaaaaacctaaaaactctataaaaataactacaaaataacttttttttttaaaataaaagcgtttatataaataaaggaagttagacctcacagtcgttacaaaataagttcataggtatggaaaaaatatctaaaaaaccatatcaattgtgagtaaaagcccatttaatcaaattatgagtcaaaaaatgactgagcaatattaaaaaaaaaacacaaccaacaaaaaaagaagaagtacttttacattgattcgagtagttctcaatctcccaatgagagtccacatcagtgagagttgttaccaccttagaatcgctttctacaataacaaaattacacctcttctcagctgccgtctctaaagctaagcaacaggcctcgacctcaccacaaagtgcgtcagagaaatctaatcttatcgtaatcacccaacacaccacactctgattatgtctagcaacaacaataatgcacatgttgtccatccccactctaacattaaagttcagcttgatccaattaatttggagggggatgccagacatccaatcgagtcagagagtgaataggagaaagagaagccctataatttgtataataaaaagaaatagaatcaatataatgtttaatgttacctaaattattattgtgtaccttatcattctgagctcgctaaatagtatccacacgcataaagaaacacctcatctacattaaggcccttgtcatgtaaactccagttgaacttgattcagtcccacatacaaatgtcagtgtcagtgataggaaagatcccccacggggatgaccttcacaaataaaaagccagattgcaccgaagaaataggtgctccatactatcatcttaaaccccacaaataggatagagggagttgtcaatacagaacctcttgttcatgattttgcaaactggaagcgtgttagaaaggatactccaccataagatcttgtgacgctctaggtatttactattaattctagagcttgttccaaagggagggagaaatatcacaatgaggggatcaatggagagcttgaattaagtagacagacttactagagaacctgccactgctgtttttagtccaaacccatgagtcactacccctaccagaaggatttcccccttttaagatgacaacgatggtttcctgatcaaataaataatgaagcttctggagatcccatttctcaccatcagtcagaaggtccgcaataaaattaaggccaagagaaggattgtctttggatttagggaaaaaatctcggccatgagtaatccaaggatcctcccaaattctagtatccttaccattagaaatccttttgcatgctccttcccgaagtgtcttgttagctttaaccacatttttccaaaactagaaattcgagtccttatagtgacagtgaaagagttattttccctaaaggtacttggtctctaaaatcttgcaacaaagagattggctctcagtaaacgaattccatccccatttagccagaaaggcttgattcatttctctggttttttgaaagcccaaccctccacaacattttggaaggcacaatttgtcccacaccttgaggtgcacccatggttccctttctcacaaccccaccaaaaattacgcaccaaaccatcagttctaatcaccataagattggaaagtttggtttatggtagtttgcatggaatactgttgtgaaaattatgtacgcaagtacacgcagtcaaacaagtaataaagtgataagtaagatcgtctccacaaggattgcaaacaaaatacgatgtaaaaccaactaattacaacttaaagaaaaaaagaaaaaaaaatatatgagaatggttgagcaatgattcaaa

SEQ ID NO: 237338 - DNA, 1332 bp, Cannabis indica
ttcttatatacaactgacatttgcaaaaacacggtttttcacgaaccaacccttgagactccaaaacacttctccaaatgtagcttgggttactccctaatgttgtcataaggaaattaccattggcaaaataccttgctttaaagattttcccgaccaaactatgctcataagtaagaaacctccatccttgcttagcaagtaaagcaaggttaaaatcacagaaatctcaaaagcccattccacccgtactcttgtgcttcgagagcttatcccaactcaacctatgtatacctttattgttgtttgatcgccaccaaaacttgcttatcgatcgttcaatatcttgacaaataccaacaggaattaggaagacattcatagtgtaagcagggagagcttgaaccaccgatttaataagaacttctttacccgctcttgagagaaacttgttatcccaactttgaattctgtttgaactttatctgtcaaatagctaaaaattgccttcttatttcttcaaataatacttggcagccccaagtacttgctactctcatcagcctcatgaatacccaaccgttggcaaatagcttatgtcattgtggatgtagtactgctgctataaaaaacagtggatttggcaaaattcacccgttgccccaaagccttagcaaagctctccaaaagactaataatgtaagacacttcctcatttgttgctttacaatacaaatttacaatacaaaaagctatcatatgagaaaccaacggagcaccattcgccactctacacccatgaatccattttctttcttcataccgtctaatgagagttgagaaaccttcagcacagatcaagaaaaaataaggtgagattggatcaccttgccgaagtcctctacttggaacaataggaccaagagtgtagccactgcttacaatattgtattgcactgtggaacgacaaccataaatgagacggacccatttttcatcgaaccccaatcgagaaagcattgcacaaagaaagttctaatccactctatcatatgctttactcatgtctaatttcaaagccatataaccatctttaccaacctgtttccttttatagtgcaaaatctcaaaagaaaccattatattatctgtaataagcctccccggaaagaacgcacattggttatttgaaataacctctgaaagaagacccttcatcctatttgctaggactttggtgataattttggcgacaacattacacaaagaaatgggtcgtaacttgctcatctgatcaggtttctttttcttaggaatcaacactatattagt

SEQ ID NO: 237339 - DNA, 1335 bp, Cannabis indica
atatcctcatttattgtataaatcatttccactgatagacaccatgttaaattggcatgtccaactattactactcggtcaaaatcataagatcccacagtatataattcatgattatgtctttctattcctcgtattggatctcctaagctggtgtactggtttaactttttaacaagctaaatatttgtttttttgatagatattcaattagaatatttcttatttccatcgactactatgtagtcctatcgatgccttgtaaatctttacttattaacacattccttccccttgataatctctggaacaaccactgattctgcatcctaatatgaatctttgtagcatactttgtcctcactgacgcttttgagatgactccccgaaagatttgccatcttaagattactcaaagttaagtatgcctaagtccaaagtaagctcatggtgggttaccagaaagtagatgcttctttgtcattcctaattgtatttcgtactttcatttcgttacttaaatctaatttgcatcacttccttaactaacatcttacaattcctcataagttttattcacttaaacttgaataatttctattttattgtcaacttcaatcttgttcatctttacttattttaacttgtatcaatttcccttgaactaacacaacttttaaatttcctaaacatttacggttaaccactattataaagaaaattgatgtaacctatatggtagaggcaacattgctcataccgagcaccgataactgaactagaaataccaatttcttgaattctcacctgatcacaattaattagagatcattcctttttctcggagtttcatttctttgtgtaaagtactatttttggcaatttagatgcgaaaacattttttattttatggtgagatttctttgcattcatagccgattttctcacctttattattcggtttttattggtcttttctatcttaggaaagaaagattttcagctggtctttccttgtatggaaacttcttgtaagagaagaaattctcttatgcaaagttggtttttaaaggaaactttgattattattattttccttaaaaagttcgattgtgtcttgataagattatatcaaacacactatttatggcaactatcaagacacaatacaagatcagactagtttttggcaagtttccttttcttgtctaatttgttgcgatagaatttgtttctcatgctataaatcagcattttatttaggaaagttttgtacagctgtagattcgactttgtagatgtctttagggtttctatattctataaatagaacct

SEQ ID NO: 237340 - DNA, 879 bp, Cannabis indica
cagtatcaaataaacgattaagtaaagtccaataacagatttttgatcagcataaggagaaccataataaccagaaaagtgccagtctttaccattaaaattatttataatacaatcaacatggttaagggaataagtaacaacattaacatcaacagagtctttcaaaaaagtaaaatccctcccccaagaccttgcctaggcacttctaaaacactatcaaaacgaagcttgtgtttgaggtgcattccacgtccagccggcaacttagtctccataacaaacaacaccaagggctgatgctgtttgacaagcagggagagattacggaatgctcgagggctccctaaacctcgagcattccaactgcagagacgcggggccgcgtagcagcacccaccgttggctcgtcatcggacatagaggggaccacagcatcatcagaagcaatagctctagcgcgcttaagcatgctacgcacagagtctccaacttgggtattttgacgcgtgaaggtcggcctggtaacaggggaagtggcagtgagagtagggggcaaggttcattgataacgactaccttaccacctctggacagagagggatgactaggagtagatatcgcaatagctttcccttttccttttgcagtatgggtggaaacagaattagtcataataggaacagggattgaagttgatattggtggcattacaggacctgaactggagtgtgagacaggcaaaggagaggtagataggacaggctgaggaaactggacagaaacatgagcatgcagggaattaggacttgaatggggagagtccacatggaggaattgatcaacagctcgctgcaaatcttgagcatcaggtctggg

SEQ ID NO: 237341 - DNA, 1169 bp, Cannabis indica
cattaatgtacctcttttgtgcactgctgctgtttcctgcgaggtgtggccctccagaaataactaagatatcctcgccctctacggggggaggttgtaatctcgagttatttgggttattgggctgattaggctcatttccctatgttctcacgtattgcctaaaatatcctcgcgagattagactttcaatttcatcttttaattgttggcattcctcagtggtatgcccaatgtctttatggaaatgacagtactttgttgaatctcgcttattcctttcatgcctcatcagttttggtctgcaaaatgcgacccaattttcattggcaaggtagacgttctcgtgagtttcattcaattcagtatacactgaataaatggatacatacttctcatgcttcttttgtttctttttatccttggatgagtctcttgactcatccttcctcttggtatttgatccattgggaattctacctttgtagtcacggtgctcgtcgttactgtgctagtgctgggtttatctctcgagcatgactttaacagcttcatctcattctgtgcttcttctttctgcacaaaaaatttgcgctctttcattaaattcattaatatttctcacaagacgcccttgcaagtcatcccataattcttcccttgtagtggataaatcagttgcgattctagcttgaaaggatgttaattgaataatatcattcaagtttctgacttttgctgttgttgtattgaagcaactcaagtacactttaagggactctcctaattatagtttgatgttagttgatgaggatgcgccaggtcgacgatctctagtagcctgaaattgccttttgaaatccttcgacaattgttcctaggagcttatggaatggttggtgaatttgtcaaaccaactacttgcggctcctgtcaaggaagttggaaacaatatgcaacacaagttgtttgaaacatttcttgctcacattatggtgttaaaattgtttaagtgggcgaccagatcagtggttccgtcatattgcgagacatgcagatttttaaatccctgaggaaattatgagttcaagatatcaaggtggaatggttcagtttcttcatctgaatcatatccaggcagtttgacatatttttcatcttaatatttc

SEQ ID NO: 237342 - DNA, 1449 bp, Cannabis indica
tgaaggatcttggtgcgttaaagtacttccttgggattgaaattgctcagactaagcaaggcatttttatatctcaaaggcactatgctttacaattgttggaagatttgggccatttaggatgtaaacctgccaacaccccaatggaagttaacttgaaactcagtcaagatggagaagagaagttcgccgatccaaagttgtatagaaggatcattgggaaattgcaatacttgacaattactagacctgatttagcttacactgtaaataagctaagtcagtatctagttactcccaaaatcacacacatgaatgttgctcaaagggccctttagtacattaaaggaacccctagacaggggctgttctatccagttgaatctgaagttaaacttgaagcttataccaatgctaattgggcaacatgtgtaaatactagaaggtcaacaaccggtttttgtgtgtttcttggaaagtcattgatttcttggaagagtaagaaacaacacacaatttcgagatcctcagctgaagctgattacagagcaatgtctaataccacttgtgaactagtttggctactttcattgctgcaagaaattaaagttgaacacaagaggcctgctgctctatattgtgatactaaagctgcacaacaaattgctgccaaccctgtgttccataaaagaaccaaacacattgagatagattgccatctagtgagagagaaggtccaagaagggatcataagaacagttcacacatctagcaaagaacaaattgcagatatttgtacaaaggctgtactgcctagccagtttcaaactctcaaaagtaaaataggaatatgtaatatctacagtccaccttaagggagagtattgcgatatgtaagatggagtgtcagttgaaatcggttaggagttagttagaggtttgttatgtttgttgctagctgtcttgagtggtttggtttagtcctgaattatataaaaccagattgtatttctttgtttttaattaatgaagaatcaatttctggtgttcatcttttctctcttcacctattagatctgaagattaagcaatggaaaaaccagttgcatgaatatagcttcaaagtctctaaacaattatagggtgagaaaaatgccaaatgcaatggagcaattataacagatttagtgaaagaaaaaagaagaagagaacacaaatacaagaattttactgaggttgaccgccaatctggagttatgacctcgttgagctagactcagaatatagttcaagtactccgctatacaagaatcaagttacacactaatagaaaattgggttttagtgacacacattgagtaactctaaaagtgtatagtgacagttcaacgcgcgtcactaatgagggtgactggaaacacagtttttagtgacacttcacacgtgtca

SEQ ID NO: 237343 - DNA, 1657 bp, Cannabis indica
agcgaagaaccaacaactaattcggactgaagggccattaacttcatgtcatcgctgactttagtttttggcagcaacctccatcatcctctagataaaaagccttcaggctttcattttgtgctgcttgaaattggtgagagagccaactccatgcctaatcctgcgcaacaatgaactatttgcggaaggctgactataagtctctccagctatcaatcaatccaggagccagatgcttccaccagtcctctacgaaattggtcaatgtttaggaaaaacacaagcatttggcatgtcactcacacgtgccacttgcatcatctttttgtattttgccaaatgtgcccgcggatctgtcctatcctcatataactcaatgtgtggcattttaaagttttctggaagtagggtctctgtgatcctccccacacaaggttctaagtcctcatcttcagaatttgagagggccccactctactttttgactagctttggttagagctgctatctgctcctctaacctttttgtgtcactttcgggaagatcacgtcctcccattttatcacttaagtggtttttgaggtaacctccacatggcctcactttttcacttttgtacctttcatacttggcgtccaatcggcgtcgaaggtctatggtggaccaactatcctcagaatgttcatcagttgtttttctgtcctggttgacagaatcactagggtggttttttcgccctttggacttaggtacttttgtactttgccattttggcatagttttgcctctagaagaagaagggcatctaggctcgaaagcactggtggccttctacgtccttgagggctgcccggccagactcatgtctttttgaggaggtttaggagcaaacttttatacaggctcacctaccttgcctttacctttatccttacggagattcgaggtttcgaccttggtttgcctaggagcatgttattcagccatttctttccctgaggggtcatcatcaaactctgccaagtcctcaaacttattctcagtgagttttctctaatttgctaactccatctgagtagcttctagttctttagtaactcgcaacaagtttgggtcatggtcacagtattaaccatatttgtaatacacgtccttcacatagccatcttcatcatcctcattttcccggtcttcagggttttggtcatcatcgatgccatcatacaatttttcaacatcctctctcctattctcaacattagcaacactctcttctcttacaccacctggttggagaagcgcgtgggagtttgcctcctccataatagtatccaacgcccaggttgacatattatcaacgtaggcccttttccaataagtttctcaataaagtgttctaggcattttttcgtcataaaaaataatgaagatttaagcaaactcggggagaaaaccacaaatatgagggcctcaaagcttagcttagtgcccaggttgagctagtgttaggcctagagcccaagtggacaatcaacctggtgtgttggtttcgatcattcaaattccaaatctgatccaagcattctctccataatggtaaaaaatgggttagataccttgtcctcaagttcaagaaccttgaaagtatcaaaa

SEQ ID NO: 237344 - DNA, 901 bp, Cannabis indica
attggtccatgccattaaatttttatttttatttaaaaattaatttaaatataccaattaaaaaatgacacgtgaataacaacttgacactcaacggtcaggtctctacagaaattttaaaaatataacttaggtgttattacaataaaaaattgaacttaggtatttatctgcaactgagagttaaatttaagtattaatttacgccataaattacttattttcatatagaaaatttaagttatacttttttgtgtactgctaaagggtacccatgttaaatatcaggtctcacatattttattttaataaagattataaagaatcgttaactaattgtaaagtatcacatcatagacaggtttgatcctaggctaaggcgagctaggcccgtgcctagcgcccacccaaattcagggcccaaatttttatatagtatatttttttgtattgaaaaaatagtatttttgtaaaaatttgtgaaaaaaagacccaatattacttacactttactttagatataacacacacaaaaatttctaagatccatttatcaggggtgcataaatcaatccaatctaataataactgactgatccaattacaatcgaccgcaaaacattaaatatctgattgtgatcaaatcagattgaatattatcatactactactatgagttctatattttagataataacttttaaaagatatcgcatacccaataaaaatgctggtacttctgatagcagaaaatgaaatcctattcaaaacaaacaattctttcatttttaatagtaatgtttaggaaggaagaataggagcgctatacgtctctaacatatgctttagtaccactctccaccaaactgactaattataataaataataaatattaatatt

SEQ ID NO: 237345 - DNA, 2179 bp, Cannabis indica
accttgaacaaacctcacaaacagccaccaaaacatatcaatctaacttagataatctcaaattaacttcagaaacaaacttaaacaacagcaataactacagacttaaacttacaatttcatgcaaaaatcacaacttaaagctctttaaaccaaagaatgagaagctagaaaccttaccatgacttggatacacttaaagcttgctaaaacctccttgaattgatgaagaacaacctcaaaccctagctgttctagggagctcgagagaaagagaattggagagagaaaggtgggtttttcctttattttgatttttaatgtaaaatgaataaaaaggtttggttttatctaattaaattacacctaatatcagaatattaaactccattaaagtccactaaaggacaaaaatctcattaggcaaaaagaccataatgcccttgcccacactaaaagtcatccaaatcacttagggttattttgataaattctaaaatctcgactaatcccgacattcccaatgtctaactataacgccccgctatactaaaaatactaggatgtaattctaatagccaaacaccgcattccaatgttgtcggacacaaaacatgcaaaattatgaaatttctacatatgacatataaaatgcattctgaatttaaatacatcatcataatttaataatttaaaattaataaataatttctataattaaaccctaattatctgctaatttccaaatttaagctaagcgctatttacacttcccaccaaaactaagccatcatagattcaatcttgtaaagaaaagaacacaagaagcttgaaacaagccataacataagagggtatggcttgaactaccgacttcaagagaacttctttgcccccttttgaaaataaagaggagttctatttgttcagatagggccaaaccaagtctttaaggtcgttgaaagcttccttcttggatcgcccaaaggtttgggataagcccaggtatttttcaattgaatcccaaataggaatgcccatgagtgatgtgatttaccttttgattttagcattggtgttgggagagaaatagagggactaatttccacaattgatcatttggctagaagcaagactatagttaggcgagatctccttgatggtagcagcaatagtaagggaagcaacactaaaagggggactatcatcagcaaagaaatggtgtgaaataatcaaagttgattgagcaatcttaataccaagagcatgtttatatgggctacgctgatgagctttctaattaaagagtgaggaaagtccttctgaagataaaagaaataggtatggggagagcaggtcaccttggcggattcctctggtgggttgaacaaatctcagtgcatgttgattaatggaaaaggagaatgatgttgtagagacacaacccataataaggtttatgaatcgagttggaaaggcaaatttttccatgactttttgaataaaaatccattctgctctgttaaaagcctttaccatatcaagcttaagggccattgaacctactcgatttgtcttacgatgagtaagggagtggataacctcctaaccaataatgatgttatttgatatgagatggttgggcgaggaagtgctttgggtgggtgatattatacgacataggatgggctttagccaattaaccataactctcgagatgactttgtagtgagtagaataaagacttatagggcagtagttagtgacttgctaggggtgggcccattgggaataagaatgataacaatggtatttattgtggcaataccattattcccattcaaaaactctttggttctcgaatgatatcatcacccacaatatttcaattttcctgaaagaaaactccattaaactatcaattataggtgctttatcactgcctaattgaaaggcaactatctatatctctctcgtagtatatgaagcttggaggctaccaactttggcctatgtaatacgctttgtgattcccgctaaaactttatcaataatattgttttcaagattttgactcgtaaacaaataggaaaaatattgttcaataatagttaggattaaagcggtatcagtagcaagagttctatcagagagcaagagagagcaaatttggttagta

SEQ ID NO: 237346 - DNA, 1265 bp, Cannabis indica
gactgacatgagatcccaacaactgccgtttttctggccattcttcatatcacaagggctacttgtgtgaaaatagcaaaggccgaagtttatatttcacgccatgttgtgttcaatgagacttgctttcctggaaattggtcatctacatctcaaacttctgctcaggtacattctactgttacaagttcaaatttacctactgctattttttccacttctgacagtaacctaatttctgttcctgtgttgaatgaaaatgtaaatgttactactgaggttgtacctgcacaacatccctcaagtccagatgttagtatggctacacctgggatttctccagcaatcacagcccctaccaattccatgccacctgccccagacattgcaaatgtgttgccacctgcccctgcctatatcagtaccctgccacctgccccattaccattttctgtgccaaatactacacacacagaaactacaaataaccttccaaccattcccacatcacaacctaccactcgatctcactccatgattaccagatcacaaaatggtattcgaaaaccaaaaatctatctagctactaagcaccccttaccaaagtccttacttccctctgagcccaaatctgtcaaggctgcactaaaagatcccaggtggtatgtctcaatggatacagaaaataaagcactaaagaaagccaagacgtggactttggttcctcgaacagatgatatgcaagtcataacaaataagtggattttttgtgtgaagctgaatgcagatggatctctggacagatgcaaatccagacttgttgcacggggttatcttccacttccaggaatcgattatgcagaaacgttctctccagttgtcaagccagtaacagttcgtatagtactttctttggccgtgtctaacaactggattgtcacacagcttgatgtgagtaatgcctttttgaatggcacattggatgaagtggtaggttttgaagatgctgagtatcctgatcatgtgtgcctattgcacaaagccatttatggcttgaagcaggctccccgagcctggaacgacaaattgaaacaaagcttgattcactggggttttcaagcttccaggaccgatagctcgctgtttatttttggctcaggagatacacagattatccttctggtatatgtcgatgacatattggtgacaggccccaataaacagttaatttccaagctcattcatgatttaaacatggtgttctc

SEQ ID NO: 237347 - DNA, 663 bp, Cannabis indica
gttatgaactctctgtttggcagttgcatacaagaatgcaggaggctttttttttgtttgaacaatattagtttatgttttgttaaacgatctgctaattgtgtagctcatggcttagcctgagtctcatggttatatactgattgtagttactcggatacctttattccgagtaatatttctgatgtaattgctcaagaattgatttaataaagtcacatctttcatttaaaaaaaaaatattgattaattatagaggaattactctatatattattttttaacatttttttattacggtttgggttgcctggtaatttttatgtgagttgttatgtggattttagttgtgatttaaattacccattgattgttacgtgggttgctatatggatttccgtaaaaatacaaaaaaaaaaatatgctttgaagtgttaaaatggaaaaatcctttaattatattttaatatatcattaccatataaaaacaagtatgatcaaaattttagtctaataatgatatcatattctttcttttaattattaaaagagtattattattaagcatgagtgatgtctagtactttctataggtagtatcttacgattagttagcaatatttcgtacaaataatttttctaagttatataaaacttaatact

SEQ ID NO: 237348 - DNA, 3668 bp, Cannabis indica
ttttccgacaccgacagcaaacctcacaaaaattcgtcaaaattaacattgttgtcagaaaaatcaccaagaaactaatttctttcttgatgaaaaaaccacaataaaccagtttcttggtgatttttcggcgacaataccaatttcgacgactttttcgaagtttggtgtcagtgccggaaaagtcacggaagttgttgccggtgtaggaaaaatcacaaagaaattgctttcttcatcaagaagaaactagtttcttagtgatttttccggcgacaataccaattctaatgactttttcaacgccggcaacaactccaacgacttttctgacgacgatcgctactccggtgacttttccggcgccgacagcaaactcctttttccggtaccagtgacaaataaaactgtctaaataaataaaaactttaaatatgtactttgaaaacttaatttatatatatatatatatatatcatatcaaatattataaaaatatttaaaattaaaaaaaaaccaaataaattagtcaaacttaaaaataatatttaagtaaacaacttttaaaatctctataatttccactttattgttaatgagtgcaaatagttagggtccattgtaaattagtacagatccatttttggggctttaagaaatatgtgaagacacaattgagattcataaagagaatttggtagtttattacagcaagttctaactagtaaacaacatattcatcttcatcttccgaactaatgtcatcttcaaaaccgtactctttggctgttttttccgctgctaccctactcaattcatcttcttctttaaacttaaaacaaggtccaactgtcatatagccacttaatggatttctttttgcgctatcagctagtgcttttaggtcatcatcaacaacttgcttagatagttcaaatgcttttacaatatgaggagcatatcttgaatcttccttagagataaacgttatggcaccacctttagggccaaattgacttgttcggccaacatggtgaacgtatacctcataattaattggcacatcatagttaatcaccagttcaagctcctttacatctaatcctctagcagcaacactggttgtaatcaacacattgcaaacaccactttccaggtctaatatagttgactcacgatccttttggttcttggcaccgtaaagtgataagcaatgataactatgtttgagtagatcccttagcaaagcatcacacttttccggggaattaacaaaaattataattttcccttttttttcccattctccaagtatttctaacaatctagaaaacttctcattttcaggtctcacttcaacaagttgcaaaatgtccttattcacaacattcctttcacccacctgtatttcgacagggttgtgtagtgagtttcgcgccaagatttccacttcacgaggcaaagtagcacaaaagagtaccgtttgtttatcagggcgagtattctgaataatcgaacggatttgaggttcaaaacccatgtcaatcattcggtcagcttcatctatgaccaaataagtgactctaaggagatttgtaatgtcaccactgcttgtgcaaagcatgtcaatcatcttgctaggtgtgcaaacaacaatttcagcacccttcttcaactcactaatttgttgggcaaaattggatcctccatatacagctacacacctgagacctagaaccttagagaacatttctataccactgtgaatctgttggacaagctcccttgtaggtgccataataagttctataggcccatctcctgcaaccaaaggcaactggtccttgatatgcttaagcattggaagcacaaatgtcagcatcttgcctgagccagtttgtccaatgccaatgcaatctctgccactcataattgtaggcagtccctgagcttgaattggggttggcttttcatatttgagttgttttactgtctccaatatattacttgtaagccccatttggtcccatgtcttgactggcttcggcacattcttaccaaatatagtcaaatccaattctttacggtaaacaaaaacctcttctggagtcattttcgagatttctttcacttcaacatagaaattcttcttaaatggcttataatcaattttggaatgattaataaaagatagctttgtcttctttacctttttcagcagctcatcatcttcgtcttctattatctccccattattctcaaggtcctccccacaataggagtgagaatccccaccaggaatgaatctaccagaagatctatttaaacctttcttcaacttatccttatttttcaagtatggactcttatgatcgacaattaaatagtgtaaatcattatttagttttccaacttcagccaaagatgtagaatttatataagaacctaatgattcctcaattccagaatcccaatcaacatcagtatgcaaaacaggtggagaagaactattctcagaatgtgttgtcattccatccctaacatcacaattaatttggtcaatttctttctcatgttctttgtctcgcttctccctaccccttttattgtctcttgtttcgtctctggttaaatccatatccaaagcttccataactaaaattcctgcgcaagcaaacactaaagaattatctaaagtaaaaatccaagcttaaacagattcatgaaaccaaattatcttttcgattgagaatatggcgattgaagtggtgaacctgctatggcgattgaagtggcgaacagattgagaatataacgatccattctatttcagcgatcgaaaatgtgattaaatctatcaagaattttttttttgttgtactgaattgaatggtgagactaatttatagagctttttataaaggctttggaggaacaatgtagacggttcgtggttgaatattattggtacggcttacggcagtgtcgcccattccgaaaacttcgtttcctatttctacttcttttaagatatatcaatttttactaaccaaaaaaaaaaaaaaaaacaaaacaaaacaaaaaaacaggaatatattcattttttttttttatttcgtgtggcaacacatatcatttttcttgatattgttatacaagtaaactagtaaagaggcagtcaaactattatataaactataggtaatatagccctagctaagttaatttttttagttttataataaaaaataattatttattaatataataaatatttatcttgaaaaaaataataattctaatatataataaaaataaaattatattatttaatttcatattattattaacaaatttttttatcaaaaaataaaactccataaaaagaataaaaaactttggacacttctagagtacacacccctaaaacggatatattggtgtgaccccttaatattgcagtataatttgtcgaagtgttaggatacactgtatttttgtggggtgtagaacattaaaatgtaattactattttcagatttatttattttttttttttagaaaaaaaatgaaaatgctgaaatctaagaatcatggaaattgtttcatttcacttaattaactaatcaacttgaattttaaaaaataaaataaaagtgtaacttttt

SEQ ID NO: 237349 - DNA, 7545 bp, Cannabis indica
agcccatataatataaaaataagaaatttttctaattaaatagaaaaattaataatgttctaatattaccccttcatagaaaagtacaccaatatgtatacatataaatattaatggaaggaagcattaaagttttgccgttcgcagtcagtacaaaaattcatactcattttatattatattggtctctcgctttgctattttccatactattaagaataataaaataagggaaatttacatggtatactaatttttgccatttttttacaaaaatactgctaggcggtattatttacttttttattgtatttttttataagtttcatactgcagtatactgtgttaagtttcactggtgttctactagtgttttactagtgttctattgttgttttgaattatactgctttgtgttttactggtgttttataaaaacacagtatttttgaaaaaatttccgtgtgacagtatttttgtaaaagttaaccaaaattccagtatttttgtaagtgtccctaaaataataataagagctaaatagggtcaataaggcaccttatttatttatttattttttaagaaagattgcatttcattaaaaaatagcatcaactacaaaatatgacttcaattaaaaaatatataagaatacttacagtaaaattcccttaattttttcaattagtacatatattactccaataaaaaaaatatgatagcaaaagtcttttctctgaccattttgttgtagaaaactttgttttggtgttaagtgctaattaaatatgttaactgccaactaaaaatcgtgtgaccacatgttaaaagatttaaatttttataagaaaaaatgaagtttaatgattaaatgagacaaaaaaattaaagcctctaaaatttaatttcaaagcaataactaattaaatttagtaaactgttaaaattctaatttaattaaaaagataaccctataatttcgtatatatatatatttatatattttcactgtctaacgagattttcataaacaaattaataagagcttaaagaattacaaaatattaaataataatcaaatagattttttacgtggttcagacattaatgatccttagtccacgagtcagttatattagcttctttggcaagtttttgagtattacaagtgtttacaatgacaatctctgtattcctcttgtgtctctcaaagaagaaagctttttagaaattttagcaaaagttttgtaagtaaaaattgtttacccttttttcataaaaaatagaggtatttataagcacacatggggtaggggcacatcctttacccacctacgatttcgtactcttcactgcaagggctggtactaaaacaggatgatctaacaattggttgataagaagtttctccatcgtgtggcgtttagctacagtgggagatttcgtacaaaccaggacacatgtcgtacaaaggtttttcctttgcaaaatatctccaaccaggctattgggcaaaaggcttgtccagatgtgcgtacacgcactaccatggcctggcatgtggaacaagatttgatcttgtgccagaaaaaggtgtaactgcctatagagcaatttccatatgaaattgatgtggttattggccttgacactactgtcacgtcctgacaccattacaggggaggtctccacctggagaccatttacatcagccatcctccagggtccgaagatgttacctgtttgcagatggctcttcccatcaggagttcgatgcatatctcctggattatctatatatccaagcgggagatcttataagttatctcgattaatcctctcagttaatacatcttttcccctaatcatgcgacgtgtctttttcctaaaagggtagataatatttaccccctaagctttcaggactctctaagttatgggagcttgccatatttccctggaactgaccattgacacgtgctgacgatcaaggtcatagatgaatgttttgtataatctgtaatctgctaaatgtcgataaggtgttagtatctgcttgcgtggcaatcatacgacgcgttaaagatcttggttaattggttcctttggcacgtgatgaggcgcattcgtcaaaaaggggaggtgcaaccgatgactgaatgatgtgaagagagtcatctttatggtttggtgggccctagggaaatcatgctggcccttttagctccacaaccatttgatcttttacaaatctaaaccattgatcctaaaggccgattttatttttgatgtataaatcatcaccaacgacattctttttacttttcccacactaaacttcgagtttttcccctgtaacttttctcttctttagcccacttcattgcattcaagaacagtgtaaaagtttaatccaacgactacttaatatccgcacaaagcttttcgcaaataatcaacccctccaactcaatcaattagattttccgtcagacgaaactttcaatttttaggttatctgagactactacatcaactaggtttgaagctttcaggcaagtcttctcggcacccatctctgctctccctattggacagtaagtacgttaaccctttgattaaacttttggcatttcatgtctagggtagaaattttttgttaaggttaaggcttggtatgtttcgtgttgaatatcaagatagagtatgtgacagaaattttccaatactagggtattgtctggggtctattgagtgtgcatgtgtttgttggtcatgagatttgatggagtgtagtgttagtctagtgatcattttccttttatccatcagctacttcaagaggtttgcttttctcttcatttttgtgttagtagaaatggacttgaactaggatcttccaacaggagcggttgtacccactgagaatacctccatcccttccgttgaagaaactatggtggggaatgattaggtcatgctcttgcggtggtacctcaatcaagggaaactttggaggccattcctgagaatgaacctgctattggggaggatttccttgcaaaagccaaaaggaggaagagggcagagaaaccccctatctcccaagccaataatgactctgttcggaaaatggatcaaaaagccaactgctttcgatcttatgggatgttgcaagcttacaccaacgtcgctagcctctgtaacgtcctagattaatgtggcataggccctctatcatgggagaatctacttccaccaatatagagggatttagcgcatggagttggtctcatatttccaatggtgctcatctacctttgagaacttactttgcatgtctatttgcaaatattggaatcgcccctttccagctaatcctttcgtcatatagacttcttgctgggtggtatgtgctgtgcaagatgaacgagctagaattatcctattcggaggaggtcctttacttctacagagtgaaggctaaccccatgaggacaaataaaatgaatttggggttctttagattggacaagcgtccagattcttattatcctattagccaaacggatcgtacccacaacctccacgaaacctagttcttctccttcagatttctttcaaaaggggtgccttctcttcgcctaaacttccatcttccaggtactccaatcacttaacttgaatcttgtttgttcctgagtttattgcatttttaaagatctactaatgtgtgtgatatttcagcagaacttccttcccaaagtgctaggaccgtggagatagcaaagaaggaagctcaatacaaggcattcttcgaggaacagctaaaggttgggacatagtgacaaccgagcgtcttcgtagctttggcttgatcacaaaattttaaagcatcgatactgtcaacctctgaggacaacatcaagcccctaaggaggttaaggaagccatcgcaaccgacatggctgtcatcattactaaggcagcaaaatatgataaggtcttgcatcctgactgactatcacgtcatcctgatcctttgtctgaagtaaacaaaattttagagaggtttgctaccacgtaccccaatgtggggacttcgagagccaatactttagaaagacgttatagacccttccgtgtctttcgtaacccaagcctgtattgcacgtcctagggaaatcagtgaggatttgataaatacttcttaagtatagaccaccgtaggtaccccatgaaggactacatagacaaagttgaccaaatcgttaggagacctagaaatccaggggcacctcagacactattaaaatggatcctttgatggctatgtctttgcccgattttaaggaatatggaagcatccttgctcatggagacatagcttctttttctcgtgggcaaccttatattagctcaatgaatggttgcacccacgcacaagtcttttcactggattttactttttgttacaattattccattagttgcaccagctggatctacagcttttacttgcttatgttgctattacgtgtgcagatactccagagtccctgaggctgaaatccctgagtagtaagatcacgaccacttttgccaaagctgagtagacctaggagaaaggcaagggaaaagctaagacttgggctttcaggaaccgagaagcaacgttctccctcaacttcctcgtcatcgaatgtacgagagattactcctcccacaaaggccgggtctatggtcttaggctcttcggctccagtaggtggggagaaaaactctgccaccctccgtgagacatccaaagcacccgttgctatgggagagcaaagccttaagggaagtcccacctaggggttggagcaatccctgacatagcactgaatgtaggggctctgacaacagcttggatgggcttgtttatctcccaaaggagactcctgcaaattctaaatgcaacaggtcgacaacctttccaagcaatagcactaaaaaatcctacccttcaactccaaatctagctgcatctgatctatcatctactacaccaccatcattgcatcaacaacaacaatagcagcaacagcaacaacaacaacaatgcccacaacaacaacaaccgcaatagcagcaacaacagctgactttattgcccaatcaatggcaaatagtcccatcccaatctgctccactctcattctagctgcatgcgccccaacatccaacagggcaccaacttcctaggcctaccactactgatctgcctcatcccatgtccttcaataggattcccctcttgggcttcttgtctccataaggcctactattcttagtcatgactacctaaccaaggcaagcgaatcgaatgctaccctcaaaaaatatcatgagagggagcaagtgattctccgaaaacgggctacgtggctatcctctattaagacagtagagattgttgaagggatttgctgtcccttctcacctggcccaataatggacattgccacagtgagccaggccttggttcctaaggttggtagagccgtaccccttatgctgcagagatgttgaacaatgtgggccttagcatgagtgagcttacatcaaaaaaaatgggctgtgagtagcagtctagacctgtacatgatatcggtggccaccaaaaaacaagcagcatgaccatctagctaaggcaactttgcatcaaagatcagtctttgacaaccgagaatgggaccttaagcactgaagttgagtgattcaaaacccaagttgtcctctacatcaaaaaggcccaggacaattgtgatgccaatctagccttggaagaaaaagttataatttccaactactggaaactctatgagaaccacaaggccgaagctgagaaggttgtctaggtgactataatctctcttcgagaaaacataagcaaaacctaagaagaccttaacttttcttaggaggagaatgataaagctgaggcccgagtaacgctctaggctatagctctatccactcaaacacaaagagttggcaccatccaagaggaagcccgcatgaaggacatgatcatcgagggtgtaacatcctactagtttaggcgtgttaacgtgatttttaatttaattgtgcagctcgttgctaatcaacgagtttattgaaaatcgtgattaaataaaacgttatttaaatatttataaatatcaaacattatacttatatatagtactgggatcccgtttacaaaatatttacaaaagtttcataatacataatacaaaagttgtcgcctagcgactatacaaaatacgctcagctgtcccaaagaccgtacaatccaagcctaactgcgctgacatgtacaatcttcatccgctcgctctcacagttgttcatcccaagccttgcccttacctacacatgcaaccaataattgtgagtcgacagattcagtaagaaaagcataatcataaacataaaaatatattcaaaccgcaaccacccgcccatacacctaatcacaatttactaactgagttaggaacgttctcgacaaagtatgactaactgcgaatccagcctatactcaatactctagtcgtactgatgtggtagcagttagttaatactatctaatagcctagcatatatttgttggcatctctatgcaactctatgtacacctcactgatgccatgatatgttattctaacggcaactaacatgtatgctaaacatgtatacataaatgccaccattatactaatcttaccttgtttccaaattcacgtgagttggccgacctgaatggatgacttcgtgttggatggatgccccaatcacaaaacataaatggataaacaacgcgctaaaatcctaatctgggaaacccaaacttccaacttaaggttctgctattgataactaataccccaataccctaagtatcaaggaatcacccaaccaaggctctaaaactaacacgaatcgaaaacacgaaaaattcgggaaaccagtttctgatccgattaaccagttttataggacctaagaaaccggttaaccggtttgcactaggtaaccgaaaataattcaaaaccttgtccaattcgtatccaaacgaaaccaaaccttccagaatacctataataacctcaatcaacgtaaaccaatagtagaagccagaaacatacacaaaacccaaacatgccattattgagccaagtttgagttcacttgttcaaccttaaaatcaagctccaaaaccagtaaaatcagacctagaacaactccataaatcactagaaaacaatcaagtacaaaccctaactcaaacagtagcaaaaactcaatttcaacatgcttgaaccaactgataacttaagaacattaaaaagagaaactagagttcttaccttaggatttctctacttgaatccaaccaaaacccctccaaaatcactgctaaaaactgaagttcttgctggtacaaaggaagctcaaagagagagagaaggaggtgtaggaaaattgggtttt

SEQ ID NO: 237350 - DNA, 1190 bp, Cannabis indica
tgtgatgcagattgggcatccgacatcaatgacagacgatctaccactggctttttgtgtttatctaggctccaatctcatctgttggtcttccaagaagcaacacactgtgtcccgatccagcactgaagctgaatacagaagccttgctagcctcacagcagaaatcacttggatacaaagcttgctcagtgaactaaagatacaaattcctaggcatccaaccatttggtgcgacaaccttagcacagttctcatgtctgccaatcctattcttcacgcaagaactaagcacatagaactcgacctgtactttgtgagggaaaagattcttaccaaagctctaactgtcaagcacacccctgcatacgatcaaactgccgacatactcacaaaggccctgtccaatgcacgatttcttcttctcagggacaaacttaggattgtatctctatccaacctaagtttgaggggggatgttaagagtatagaataaattgttctgtaattagttgtttattattagttgtctgttaccggtttttcagttaagttagttaatggtcttttggtcatttcatatcagcttgtgtacctatataaactgttgttacagttggttaattaatgagaattcattctttgtaaaagttcatttctttaacaaatagtggcataagtacccaaagttttgagtttgtacgcggcataaacctaatgattttttttagtcgcataagtacccaatgtttgtaaaactgtaatttttctctattttcgtcagtacaggctccgttttaaatttattaaaaaaaatttggaagttttcgatactacatatttttcgtccagaccaaataatctaaaattttggtcttatatgtgtgactgtttaagataataacagagtctgtactgataaaactagaagaaaattacaattttataaacattgggtacttatgctactaaaaaaatcattgggtttatgccgcttacaaacctaaaactttgggtacttatgccactatttacccttttaaaattatatgatgaattttctatagatttattattttctttctattttagatctctattttgtgtaagaaatatttaatttctaattttttttagtataatgtatatttaaagaaaaaaattgcgtaattttttatttatataagaag

SEQ ID NO: 237351 - DNA, 601 bp, Cannabis indica
aaacaagtcacgtaaaatataactcgaacacgacatgatgatacattttatcactgctaattaaaagtaaatttgatagtgtgataccttgtgaggcatcacaagtgtcccaccacatttttccaattatagcaaatggttaaaatctcaaagtagtataaacgaggcagtgacagtgaatgcacccttttcaaaccttacatcacacacacaagttggcttatagccttataccattttggatggaagagccaagctgtagccaaaaacatagacatacagtgttaattgttttatagggattggaatggaagctacttctactccattgttatttgtcgaaccaagcgttgagcttggatagttgtaatataattacaaacaaatattatcaaattcattacatctcatctttaggtacacttggcaacttgctctgtttattaaaagttataactttaaattgtcttggataatctgtttcagcattaatcttctccaaggtgaaaatgttattgatgccatgctccaatacttcttccaaatccattacatcaacaaaattggcattattttactaagcaaaactcttcattgctaa

SEQ ID NO: 237352 - DNA, 816 bp, Cannabis indica
agtaggtatatggttgatctaggtgatgctcactggacaacaatcaagtggattctcaggtatgttaaaggatcacttgacttggctttaatctacaatgggaacccaagatctaaaggagaagtggtaggatatgtagacagtgattatgcaaccaacattgacacaagaagatcccttacatgtctagtttttactggacttagaggagctataagccatcgaaaccaaacctacaaaaggtggttgctctttcgaccacagaagctaatttcatggttgcaacataagcatttcatgaaactttatggctcaagggtatcactcatgagttaggattaaactctaaaaatttaactatgtattgtgataatcaaaatgccttacacctaataaataattctatgctacatgaaaggtccaaacacataaatattaagtatcatttcataagggacatagtagcacaagaaaaggtccaaacaaagaaaatcaacacataagaaaattttgctgacatgctaaaattggtgctagcttacagaagtttaggcactgcctaaatctactcaacataagcaaatgctgatttgttttaatcggactgcattttttttcaatttttttgtgtgtgtttcaagtgactgaatcaaggtagatttattgtctggtccaactaggggtgagcatccgctcggccgaccaaatcagccaatcgaacccaatttaggctgaatagcctattttcttaggtcgaattaaatgggtcaaaagttctaacccgtgttcatggttgataacgggttgcatcaatgt

SEQ ID NO: 237353 - DNA, 911 bp, Cannabis indica
tgatgtttgcctagacaacaatttagtaaaaagataaaaaaatatattattattattattggaaatattacaattgttcattacaaatatgacttgaatttttagttggatgacctaatatattatgccacaaagacaattgagacataggtacattagaacagacatgaaaacaatgaatgttagagttataggccaatgtagcaatagaattaaaaggagtggcatttgaatttgagttagaagatggtagagattgacactgatcaaacttatagaagcctctatcaatactataccaactaaaaaaaatcttcatagtgaccttgtctttcacataatagtgatcaggattaactcaaagaaaacatgatcatccttagcaaatttagagacactaacaagattttttgttatgttcggaacatgaagaagattattaagataaagagtttgggaagtgaagggagaaacaagaatagtttcaccgacgtgttgaatgtgcaaacctgagccatttctcatttagatttggtctgagccttggtagtctcgagtggtggcaagattgttaacattagatggtaagtgatgtgtggctcctgagtcagggtaccaactattgtcactcacagttttaggagtagcaagcactgcatatctacaactgaaatagaggcattaaaaccttgaaatgattcaagacttattaatgacttatcaaatcgataaaaacattacttaacagtgtgtccaagcttgtgataaagctggtactgggtttttggagtggagtagcttcaaccaccacgataaccaccacagggagcttgaggagcataggattgaggataaggtgatggagggcatgttgtagccactgtattgactaaatctgtagtatccaccat

SEQ ID NO: 237354 - DNA, 1102 bp, Cannabis indica
ccccaacatgaacccctccgagtccatcacaatgcccttccagtcaaccaagtatcccttgccacactgacactaaagctaacacatcctttgatagtagctcactcaccaaatgtccaaagcatactccttttgataaggactaagtatggtgcacccctgggggtgaggtttgcaaaccaaccgtacccaacagcacctacagaacacgtttccactgaagccaagtccctctggacaagtccctccagaaacttcacacgccaactccatggcgcaccatcttcctgatggaaattgagcaagacactattgttgcaggataaaatttgatgcgtccctcctagatgaggctcgcaagccaactgcacctagtgcagcaccacgtgcactcttgcacactatcactttgcaaagtactcaatattggccctccggccctcctgcacacccacaacttcatgcaaaaggcccctctgacccacatcatacgtgctccttcaagcttcttttatgtggtcaatgatctatcaatcacccaaaaccacaaattctccctatggctcctactcttgtcagctctctaacactgtgtcacaagtccatctcccaaaatcaaccctgcatcctctgatgactcgctaaattttgacaaacttgataacacaaagtcttactcctaagacttgaagtcattccaatctataatctcccttcgtcatatgctctctaaaccattcagcttataatgcctcatacaacaccagtgttcccataaacacaaagcacgcccaaaacatgtcgtaaactagcttagtcttgatctcagcctacgccattcataatatctatttggagcttgcagcaatcttacaagtttttgcactgaataacccgtttgttgtagtgttttcctctggattcagacactaaaactgaacaagtacctagattcttcaaacatatgaattagtgggcccctccacttcaacttgggaagaacttatctcttagacggatacctctcaaggtatagtttgcaagctaactactgttgggttttatgccctaaataaaactctttacaatctgattagttatc

SEQ ID NO: 237355 - DNA, 2026 bp, Cannabis indica
cacgataaaaggctttgcaaacatcatgtatgtgagatatatatgttgtctttgccagaatacaaaaactccaagtattaatctattagttctttaaccaattcacattgattaatcaaactaattaccccattatcgatagaatttcaaatttgaacaagtgagcatcctcacacagccatattttctttgaatcgtctttttctttgggatgattgttagtcaagtgatcatctttgtcaatagtactcctcaaatacaatcgaatcatcttactccattctaaaaaatttgaactaatcaatttatggatcgtgattttagacatcacgggaaccacatcagaaacaatcgctgattttatctctgccataatctcgaaagcaaaaataattgaaagagaaaaggaaaaaagagaacaccaaagaacgaacacccaaacatgaaaaaggcaaaaaaaaaaaaaaaaaaaataaccaaattacaaccagagacagatgcgagtgagctttaaagaaacaagtaaaagaactggcaaaagaacgctgtcaaagatgtcgtcacacacgcttccacgccccatcacatgtgcgtagaagcttcaagtggcatgcacgtgagccccatgcgcctgggctatccgtctatgtgggcagtgagaaaaacttgcactccaactgggatttttgaaaaaaggaccctaaactcaaaccttaatcttatttattattattattttttttttatgaattctaatttcgaatttcgaatcacaattatggctctgataccatgtagcaaatagtggataaaattgtgtattgtatttcatagaatagtatatatttatatacaaaattaggagaataaatgggaaactactaaatacaaataagaaataattaaacccaatttatcctaatttttacaactaatattctaacatatatatataaaaacatttataatgtatattaatttaatagggtcagattaaacatgagaaattatgtgtgaattgatcatatttatgtttcaaagatagatatgtttatttaattacatatataaaattaggtcctccaaatgaaattgtaagtgaagtcttaatggttttttattcaccagatctaatagttaaatcaaagatattaattgcaagtacaaatcaagctacatgggcacatataataacaatgtataaaaaattaaataaagtaggtgtcatagattaaatatgaaaagcttcataataataataataacttcataattcgatgacacatatatattacaggtatacaactaaacaaactgattattatagtaaaattaatcaaaattgatgaatttaaatatatgaataagttcgttcttgcaatatatatatgatgtttgaggagataaggcgatatatattagacatagtgcatgtctgccccttaaactagtagatcacataatctttagtaggccttcccttgtctccaattttagcaatatttaattattaattgtttataaaaaaaattgattggatctattgatgtgcctacaactgttacaatcatatatctcacgtacgtcattaaaccatacttgattttgttcaaatatttcgatatatttttataaatttggtgagacaataagtctcacacccttaaataagtaaatatagatcatataatttatcaataattatactcatataagacatgaacagatgcgacattatccaattcagtaagatgtccaaatttgcaattaaaagtataaaactccaacttggtcgatccaaaatgggcaagaaattaaacacattaaattaatataatatttgttgaggaagttagtgatagctgtgattaagtaactaactgtcagagttagttaaggctgttagactttctgttaggttgttacagctctcttatgggctttctcttcagtatatatatgctgcttgtaaactcctttgagataatgaaaagatcacttgatttccctttccttctttctctct

SEQ ID NO: 237356 - DNA, 911 bp, Cannabis indica
atctgggattctcgtcataagggcgaagtttccttcccccaatctttaaatttgaccatcagagttgtttccataaaaggatcatgtgactctacccagttcttacctctctttccctcttttgtaaatgaactcggatgacttttggagaggcaagcaccgagtagacgatgacttacttcaattgctcgacgaggaccagccaaaactccttgcaacctcgccattgtctagtgagaattcgatgtccaagtttgacgattaggaaataacaaccgagtcagaatctccaaaacttaccatgcaacaccatcactacctcaaccatattggcagtgaggggtacaaaagatttgtttaggaactaaaccgagagttgagactatttgcctgcatccttgacatacaaggtccgagtaggctttccagacaccttgccagaaggtaacctagagccttcaaagaagataaccgtgcaagcggagattgcagttaatatcgcacaacacacctcatccaaatgcttgcccaagactaggaaagtggtgagaaccaagtagacgtacaaaaagacttcagttgaagacccacattttgcttgaataatgacgttagttcatgctccatgcgttaaggggttcaatgaggaagacgctgagatgcacactagtgtgaagtgcaagaagtagaggaccagcctaggctgatgaggaagtataggctactgctcatgttgtaccatttgtagggttcggcaggtataataaggtcggatagcctatcacagtgcggggagagatcatggttaagaactagcactacattgtttaggagaatgaagaggctcgcccgtctgtagaccaagaaaagtccaagctgatgtagatctctcctccgtccatcctcacagt

SEQ ID NO: 237357 - DNA, 968 bp, Cannabis indica
agaagcacaaaaacaagacaaagtagtatgcaaggtgactgcccaaacaagactcgaaagtccataatcacctgacgtcgatcttatttcagacataacagctttccctttaccaaacacgggaggggacggccgagcaggtgaaatgggctcccttatgcgaatggcatgttcaataggcctgggcggggccagaaatttcttcttcctctttagtggattcacttgctcttcctcaacttcatcttcaagattcaagggctcctaagcatactgcttggcccttgcacctcccttcaacttagcttcgcgcttaagttgaatgagttcattctcctgatgagctcgttcggcctgtccagcaccatattcctcttcttccccgtcacggacttaggaataaagtcctggggatagagcccgtacttcacaaaattatcctcagaggtcaactggataatatttcggtcttcccccggtagtcgagcaagcttttgagtgcaatacgtgagagcaagagtgaggggagggcggtgatatgtcggaatgtgctggaagcgagtgcgagtgatgcccctaccatccaccatgaagtactcatcagtaaaatgcccaatcttgctgatggccgaatcgtccgtgctcgtcaaccacttgaagcgtggttgagagaaataggagtaccccgacctgccttgcttgggggtggacttcaaatcaaagaaccaggcaactttgtgaggagaaggcataccaaatttctgggaagcgtagaggacgaagagggcagacaggtatttgatgcccttaggagtgcacttggccgggcaaaggccgaagaagtccgccacattcttgaagtattgatgcaaaggcatcaatgccccttgctgaccatgggcacccgacaaggtgcacatccccttttcagggtttttggcacgatttttgtgggcgggaatgtagca

SEQ ID NO: 237358 - DNA, 604 bp, Cannabis indica
ggatataaaccctaacaagctctgggttaaaccctagatgcccaggttggtgtctagggtgcagtttcatgtaatttcagcttctacagcttggatttgattgctccatgtcttcatggaacacaatactaaaagattgtgggttgggttcaagttattgaggtttgaacttccatcttgaagttcctgaagtaaactacgtgacatcatctttcttgccacgtgtcaaacattgatatccacgtcaccagggaaagtttttgggttaatagtattatgtataattgtgttgcgatccggagtttatggttcatatcagattcaatgatttttttattaaatttgaatttattctctttttttgcgactctgatatgaaccttaaaaactaacaacaacaccattattaaaactaaaaactaacatggaaaacaaaacataacaaataaaataacataaacagtaaactacgagagagagagagagagagataaatctatccatgaatcttcttttccaaattgccccacgtgctccaaaaattcacatcccacctcatggtaatggaagtaacagactgttggaatttattttaccaggatct

SEQ ID NO: 237359 - DNA, 761 bp, Cannabis indica
ttttagtgataattttttagttacgatacaatgtttttgtcattaaatatgacttattagttacaacaaaagattatttgtgattaaaacatagtatttagatacaagttgttactaatttaattttagtcagtattgtgactaaaaatacatttagttacaacaaattatgattttttgtgattaatacatttagctacatattttttaatcataacgtaggaataattatttataaatattagtgataattttttttacttttagtgataagttttattgtgatcgataaaagtaagaatttgttaatgcacacttctctaactctaaagacacattgtttcatttaaatgaaataaagctagtgacataaatctaactctaaagaccatgagaaatttggccctagagttagacttcagtcgaaatctctattttaaacccagtctcatctaacctaaccctaagtgaagcctatataaaaaaaaaataaaaaaaaaaaaaaaaagtagatgagaagagataattaacctaagttttcattgtcggactactctcttctcttctttctttatatatattccctctctaaaatatggttccactctattcaatgtgatactcaaacctttgtggaagactgtgttgaacacaattgaaggagagaaaatttaagtttagatcttgataatcctctgctacagacaggaatcaagggttaaagatctgaatggaaaaagtcatattattctgctaccatt

SEQ ID NO: 237360 - DNA, 1120 bp, Cannabis indica
aataagagctcttccatttatatcattttgccaagctctaagaaactatcgcttcacttctaaatagttataaaagttatagattttatatttatgattaacgctcccactcaattgcactaccgaattcccagcatgtaagtatgggctagtcctttggttaagctggtaacgaacaagtctaagaacccatataatacaattaagctaaagcttaaccatcttaggattgagatcaattgatctaaggtcaactgagtgacattgacttagaaaagatataaggtaggtttataacatcttttccactgtcaatagcggtctagttcgatgtataactgataattcgatacaagtttactttactaatgccctagaaaaggcattccacttatccaagtgtaagtaaaccacatcgcagattatcacgtcagtataaatctggtgcactaataaatagtttcaagcatataatcatgattattttacactgtgtagacaacactataatcatgaataactatatgtttaggattcaatagaatttatatattaaacatataatcatgaaagtaacatgtgaactaaacaacataaatagatttttaatctcttattaattagtaaataagattatattgaaataaattttatttagggcataaaattctattatttgtcaccacaaaaagagtgatgaacttcgttatatcttgtctctatttcatttagtttattctgtatttatttttttatttatgttcattgtttaattcagctactctaatacttcagttcttgttttatttaattcttgataggtgttaatttaccacaagttctttaaacattataaacattctctattttagagcatctgatgtgagtatttggatcatatatcagcatatggtaaatgatctctttaaacaacagaagctttaaattttgtaaaaattctataaatgtagcgaaacttttacaacttctttaaacaacaatttttgacatttttttatcctttatttcctttactgtttttttaatcttttcttttactttacttaataaaatataaagtttgaagccagtaatttaaatgccaattatgccataagag

SEQ ID NO: 237361 - DNA, 753 bp, Cannabis indica
ttaaccctaacaatttagatcaaacaacaattggtttcataaaacttgtttagacaatcaaacaatataaaacacatacacctgcaacaagttggatagttggatatagggtttacttaattttaaattaatttaatttaataatttcgaaaataattaattaaataacaaatttttttttaagaataaaattaaataaataaattaaaaaaaaaattaaagtaaacctataaattgggaaaattaggtttcaactaacctaaatatctttttcaaaaaaaatgctaacaactttgaaatttcatgttatttattaaaaattaaatatcctatataataaaatgataatttaatatcattttttttcgattttacattttattttaaataaaaaaaattaaaagttagcaaaatatcctatttctatttaaaattttattattaaaataatcttattttaaatttcaaataaggtcaatttattaaaaaaaattaaaataatttaaaaatattaaatatctaaccttaaatttaaaaataaggtaaaataatcaaattttaaaaataagataattaattaagcaaaaaagatagatttttacctattttcaaattcaaaattcactaatatcttaaattaatttaaaaaatactaattaatttaattctgataattagatttgaaatttgaaaaataaaaataaaaaaaaaaaacatgtatttggtgcggatgttatgcattgcataccattc

SEQ ID NO: 237362 - DNA, 1629 bp, Cannabis indica
acaagttgtttggaaaaagaaacactcatctgttaatgacgtgcttacttctacacaagtagctcttgatcactggaataaagcttaggataaaatttcgttgtcatcaatctgtttggaaagcatcggtgatggcgctgagtgatggactcaacctgcagaaaacacaatcaagattaatgtagatgcagcagtactctttgatagcgacaataagtatggtttcgaaattgttgtccgaaaccaccttggtcaccttgttgcagcacgggccgattgccatggcggaagatatgcatgttcaaattgaagccatggggattaaagaagctcttagtttggtaaagaccaataattggcaacatgttcaaattgagacggacagtcttgtttcagtacaagctattcgaagcaactaagcaataaggtccactttcgaccttttcatcaaagactgccaacttttgttatctatcctcttaaatgttaatttaattttcattagacgatcaacaaatcgagtagcacattatgttgctagacattctcggtatcaatctgattgtagtatttctgataaagttttacatcttttgtattaagaatgctaaattagttaatgaagttgatattccatcttacaaaaaaaaaaaggaagtgtacgtataatatcaagataaaacaatacctacggcaataaaattattctatatatctttatatttcaggtggcaaaatagtcaatttgaagagatatttgtagtgagacgtgattggaagtagttgaaatgaataataataataataataataataataataataataataataataatgtggtcctattattagttcacgagcccactgttggggttggatgtcggtctctcacacattctcatatttaagtttttgtcaagtagccttttggatgcattaccaagctttattggaattcacttcacttaaaatagctgtacgttcgtagctcactagtcactagtcactagctctgcatgtatatacatatataacaaagcttcttaatcatttcctaccgagataataataataatattaataataatttataacgaagatgatatttgtcgacgaactacatatatatacttaaaaaaacaacattttttttttattactttctcagagctggtgggtataggacccacctgggttgcccatgtgtctttctcattcctgaatcctcatcacatgtccgacaattcctcgctcactctattttatttctcttcttaaacacaccatcggcaacaccagaccacctacccctctatatgagcattttcctgtgacatatataggtcttgcctgtgttagaaaatagatctaaaattgatattaactcatgttaaattattcacgttagggctaaacattgggagggtttaccgggtttcgggttcgcgggtttcagattcaaaaaaataaaaccgaacacggatccgaatagggcacgtgttgacgggtcaggggttggccgggttgaccgagttggcaggttgacccggtcaactcggtcaactctttaaaaaaattaattttttattcaaaactaataaaataacaataaattaaaataaaatt

SEQ ID NO: 237363 - DNA, 625 bp, Cannabis indica
tgtgacttatattgtacggagaactaagatcattggtcatggatcaagctctagttacattagaccttctaggaatgtaccttggcttcgtgaccagatgggctttcgccagtgacaacccatatccaaaaatagctattgtattgtgatgctagaaggtcagacagagcattcctgaaacatcaatccagtttcctttttatccaagcgcacaaaataagggaataaatgctccttagatctcgacagaagatcgtatcaagctaaaagggaaaactacctaaaatagaaatcaagcaattaattcatgattaattgcccataattataggatacggttttgaccaattcaattgtatcgaatctgcctagtgaacagattgactcctttgtgggctggacttcacgagaacatcctaaattatgtaattttatgtaaactccccagtagaggataaaaaggaaactaagtataattctcttaacactataaatactcaatgaatcctttggattaaaagttgagttctcttgcaatatttgctcacgttaacatagagaacttatactcattgtattcccacaaggcttttctaacttaaatatacataataatattgactcg

SEQ ID NO: 237364 - DNA, 1694 bp, Cannabis indica
atacaaaatgcggctaaatcctcttaagtgtgtctttggggtcggctcagggaaattcctcgggtttatggtgaatcagcgaggaattaaggcaaaccctgcaaagattaaagcattagtagaaatgcgatctctgactaagccaaaagaagtccaaagtctgacagacaggtaaagtcgccgctctaaatcgtttcatatcacggtcctctgagaaatgcaaagaattttttcaaatcttaaaaggcaacaagaagtttcaatggaccgaaaaatgcgaagaagctttccaagcactaaaaacgcatttgggacaaccctcaatcctgtcaaaaccaatgcctggagaagtcttctcaatttacctggcggtgtccgaatatgcgattagctcagtactaatccgcgaagaccaaggtcggcaatacccagtgtactatgtcagtatacgtttgctagacgctgagactcattaccctcaaatggaaaaattgacatttgcccatagcattgaagttttaacaaattaccctttgagacaagttttagcaaagccagaagcatcgagaaggttgttgaaatggtcagtagaactaagccaattcgacatcaagtacaaaccaagatctgtgattaagggtcaggccttggcagatttcattctcgagtttccgagtactgaagtagcactagtagaagaaaaaattgatactgatgtaccgaatggcgaatgatggactttatatgtcgatggagcctctaatagcgaaggcttcgacggcggcataatactcatcagccccaacaattttaaggtacacgctgctttacgatttgaattttttgcatctaacaatgaagcggagtatgaggctttgattacaggattaaagctcgcccttgagatgaagatcgaatacttataggcttttagcgaatcccaaatcgtcgtatgccaggtaaatgtagaatatctggccaggggcgggcgtttggctaagtacctcaccataagatgcgagttgttgcagaaattcaagaaagtgattgtctcccgagtaccgcgtgctcataattcacacacagacgctttggcccgcttggtctcaataagagaagctgaattgctcgatgtgattcctgttgatgtgctaactcacccaacggtgagtcgagatgaagtgatggagatagacattgacataggagttacttggatgactccaatagtgaattacttggaaaaggaggtcttgcccgaagataaaatagaagcaagaaaactgcgacatcgaactgcccgatatgtcatctatgatggaacactatatcgcagaagcttcagccagccgctactcgaatgcattgacggagaggaatgcgattatatcctccatgaagtacatagtggtatcagtggaaaccattctgacggtaattctcttgccttaaaaatcatgcggcaagggtattattggctgacactgcaacaagacgctttcaacttcgcaaagaaatgcgacaagtgtcattagatagccacatatatcaatcaacctccgagctacttgcactccatcatgagtccttggccctttgcagtctggggcatcgacctaataagggagttactgttggaattattttaccaagatcttagatctactcacaagtatgttgattaacaacctaaa

SEQ ID NO: 237365 - DNA, 1024 bp, Cannabis indica
atttaataattagaggcttgtgataatagatgactaaaaataatattatccactactagaacactaacatacttatattaatttattttaatttcgtatttaacattaaatattttataaataatatgtattaaatcttatcattattttaatggtatctaaaaattaataaaattacgttatattagttattacatgcaacccacctagtataatatatgtataattttctgttggttgagctcagatctatatatgttgagacagacagttaaattaatttacactatacgatactgactattctctttgcctttgggtcgttgtcggcgacaacttgcaaaggaattcccacaaattaatttgacatttcttatatattacttcgcctaaatagaccgttatttcatcaacttgttaaaataatatataaagaaaataaaaaataaggaaaattgacatcagttggccagttaataagaaaatatattatatattattcaacgactcatgtgtgcagcaaaattcgaaataaaataatgtacctattttatttctatatatgatatatgcagtgtaaacaaattcatgcacgcagcttcatgtttcgtaatctaattaattatataacaaaacaaataccaaaatttcaagtagttccaaaactgcatgcttcgttcatagttacgacggcgaccccaggcggtttttgaacttgtgttaaattaaattaaattattttagtgaaattttgattcaaattattaatgtgtggtacttcaatattatacataatctaatgagattaatatatttaattacattcaatttatttatttatttattattttaatttagtctacaccaaaatttgtgattaaaataaaaaaaaaaaatagtgaaaaaataaagtaattcctatatgttatcactacaaggtcctgactaagatattattcacaaaatacacaatttgttagtgactaaatgtattttaattcacaatatttattgtaactaaaat

SEQ ID NO: 237366 - DNA, 1129 bp, Cannabis indica
ggcaaaatgagtgtaagaaattgcaatcgtcagtgatcgggcataccataccccctgaatgagctgagatatttgaactcctctaaaatctcagtcatttgctcaaaatccaacctgtaccatttcttggtcgctaggaggaggtccgggtgcgtatttttagccaacccttgctttaggaggcgttgttaaatgccaaaatattacatattttatagtgtaaaaatgcaaaataaaattaattctttataatattttcatgaaattaatgcaatatattgttatgttgaaaatatttttttttggatttaattttgtttgtgtttgaaattaaagaataaaaataaaatagcatttgtgaaatggaaagaagagaaataaaaagtgatacaaatgaggcccaagacatgcaaaacatggcattcttgaagaccaaaaacaaagcccaagaagaagagcccatctggcccaagcaccactagtctcctctctctctccgctgccacgtgtcaacgccaggaagcttctgcagccacgggccccacacgcaaagagctttgtcccccacttgtcttctttactttcctcatgcgcaagtgagtttcactctccactccccagccatgagtgtgtctcacacaccaactcaagagtgggagtttctctctccgcgtggaccacttgcaacaaaggaaatgagcttcttttattcaacaaaagacatgtgttgatgactcaccacaaacaccgaatgagagcccaacacttgtcaagttgcagcccaaaccggccaatccaaacgtgacacgtggcactccggttataactttgtgaatttacaaaaatacccacatgcaatttgtaataagtttaattgcacattagtccttttacccttctataaatagaagcttaggtttttagaattcagttacagtttcaaagtttcagacagaaaaatccagagaaaacgctcgaggcggtcagtgttagtttatcgcttttgttagttaattttcttatgggtttctaagttcccttattattaaggtggacgatgaaacctagtgtatttaattaagtatttatttttattttgattctcagtacaatatatgcttatgatttt

SEQ ID NO: 237367 - DNA, 795 bp, Cannabis indica
cttagtacatatcaaatttcaatttataatctatcattaaggacctaattttggattattctatacaatgtaaaaggaaaaagaaatggactgatctcttgagtttattaaattttttgttaaataacaaagttgcacaactatcaacttttctattccaatttttaagatatctcactaaatttaatatttttattttactttacatatttatattatatcatacattaggttctctatatttttctttatatcatttaactattatatatttagggacacgattttgtcccgtcattgtactttcacagaatgtattccgtgatgtaaaaaatgcattagatgggtttcaggtctgaggataagttactatgttttaaccctaattactctagaccaatcccagcgctcagatcaaataactctcccatctaacggctgtcgtacatcacggaacattaaagtacaaaatcgtgtctctataaaatgagtggacccaaaaacgacattgtgtgaatgacaaaaaaaaacaaaatatttggaaaagaatttgtagaaagtagataatgctaaatgctattttggtgttattgtcaattgatttattaacaacgtaaaacattattgggtctggttgtgcggtaggacggctaagaaccagagagaaagagaaagagcatgatatagcgggtggattagagggaaatgtatttgtaggcagatatgtagaagattgcattgcaataaaaaatttgcatggatttttctttttttgttaaaggaagaaaatgggtt

SEQ ID NO: 237368 - DNA, 1870 bp, Cannabis indica
ctgcttatcttttttttggcggcaaaactcttttaatctttatacatttaacctcattatttttttttgtggcaaaacctctatatatatgtttatttttctttgtaaatttgacacgccagttaaatattaccgtcaaatatcaactggatgacccctgtatttatacctgtgttatgtaacagtaaaacctcgaagtcgatacaatagtactaatccagttaatgtttaatggtaatatctaactaaaactttgtaaagaaaagtaaacttaagagtgttttaacactaaaaaaaaaagataaaagagttaagtgtataaaaattaaaacataaaaattttattactaaaaaaataaaaagttaagtatataaaaattaaaataataaaaaatttacataaattgctctttttaaatatagcacaatttttagatgatgaacaaacattacacaccattgaccacagtgccacacaacgtgatataactgttatatattaatacacgtgcatcattatacccaaataacgacactatatattatctttatcttatacacgttgaatgcaattatgcaactaccataaaatcatttattgtttcgtcaaaaataaattaatttaaaataaaattgatacgcattgattttagtgtacgtattaatatttgcatggatatatatgacacaatcgaacatgtatatatatatataaaccagtcagaatttactaacagacaacaaagataagagaaatgtcgtccagcaggaattaatataggaagaaacgatcagtgcatgcatgtgctccaccctaccactactcttacaaaaataaaaaccttagaactgaaatctatcaaaacgaagacactgggaagtgaccgaagctcgaagccgtataaatgacctatgtcttgggttaagatccacatatttcaaatatgcaaacgagggaactgaagacatatgtctttgttattttgataatccatgctaaaaaactagttttagtgtttaattaaacctaattattatacatatataggaaagaaaaatgtaggaatagacttaggagcaaacttagatctaaattgacttagagtggaagcatatgctagacatccaaaaacttgcaagtgctcataagtttggtgtaggtattctattaatgagataggctgcatagcaacacaatctccccaatacaccagtggtatatgtgattgaaatagcaaagttctggcaattgagtagatgttggtgttttctctcaacaacagaattttgttgaagtctttggacacaaaagtggtaatggataatcccaaggtcactaaacagttctttatggtaattccttggcattatcagacctgacaactttagtggttttgaacaagttttatgaattgaggaatagcattttgtgcatcagattttgtttgatcagattgatctaattgtacctggaacaatcatcaacaataataataaaatacttgtatccctcagttgtcatggcgttgtattgtccccaaatgtcaacatgaataagatcaaaacaacttttagcaatattgtgattagatgtgaatgactattttctttgcttagcataatgacaaatggaacaatgaaataaagaatttgaattggcatgaaacttcaggatgactctttacaagagggatgacccaatctataatgtcatacaatatcatttgtgactttggaatcaaaaatgaaagaaaatacagaacaatttgtttattattgatctgattacagttgatcaggtaatacaaagttgccaaattttctacccatcctaatcaccttggtcttcaaagtgtcctggatgacacaa

SEQ ID NO: 237369 - DNA, 784 bp, Cannabis indica
attataaataggtatctttataatttttttgagtgtaaataaaattttcacattttattttttgaaaagagatgaggtgatgtcagattaagtcaggttaggtccatagtatataaacgtgtggtccatatcacaacgtggaaggcattgattattctcaactaatcaaattataggcattaaaaaaatgtttaaattaagagaattgctattgttgtttagcaaatttttttcttttgttttttttttgatgaaatatcaattttattaaattaatattctgagtacaaaatatctagtatagcagttaaagcattagacacagaaatactacgactagatcaggaccgtgacatcctagcaacaacatgtgctagatggtttgctgatcgtttaacaaaacgaatttttattaatggcatagagagcataagagaatgacagtcttgaaccagattcccaaagatagagcaaagtggcgagcggctacgaatagcttggatggagactaagctgtcaaattccagttcaacatgttgccagccttgtcgtttaatccaacttagggcctctttgatacccataatctctacaacttctggtccaaagacaccattaagacaatgatgtaattaagtattaggtaaaagtatttttaatagagataaataagtgatgcaaatcaaaatatagttcacttcgttaaaaatttctttaatatatagtatgctaatttatgatgtaaaaatctcacataattaaaagtgatccaaatttacatcac

SEQ ID NO: 237370 - DNA, 1078 bp, Cannabis indica
tgaagagattttacttaataattgctatctctgaaaggatctcatcatcagcggtttagtggtcttgggctatatcaagcacctttacactattatagacaggttattaagttagttaataaagtttgttaaaactttattaataactctcctgtattcctttacaacatatataaaaggcaaaaaatcaacaacaacagatcgagagagataacaacagaatcagatcagtacaaacaggaaaacaaaaagaaaatcagagcaagaacaacaaaaggaaaaacagattcggtttttacaagagaaaaaaccgactgtttttgggggcttcttggaagaggcttacaatggtgtaagctttggaaccaaggtggtggttcggagatccaatagccaggggtgtgttcatgcatcaaagaagagaaaaacacaatagttagtactgtgattagagagaaaaacagagaggaaaaatagagaaaatcattgtaatatattcggattaccactattaccattgtgagttggaatccatgctttgtaactcttgaacattgaagaatcatagtggaacgaggcgagctcgaagaggatgtacccagcacaatatttttgggaacctttataaatctggtgttttcttctccttttctttgctgatttttctgttgtgtttatgctattttcggattggtattttctgggtttgtgtctggttttttgtgggttatcttcgtgttcttcagaagagaacaacgaagaagaagagagctctgcaaggttttatttttctgggctaagtgttattttttgggttgttttctgggctgtgggggttattcagtagtagttgctactgctgtgttcttcagagaagaaagaaagagaacgactagggttaatttttagtggctgtgttatgtgtttgggaaataaaagatagtatatatatgatgatttaaatatagggttcttctgtagtgtattacaaacgtacttgtagcacaaaggaaaaagggagctgttcgtttggtttgtatacgagagagtaacaaaaaggaggtcttgactgaagtaa

SEQ ID NO: 237371 - DNA, 894 bp, Cannabis indica
aaaaagtattctatattattaatcaaaaaaatcaataaaaattttaagacaaacataattactagtaaacaaaatccttaatgagaataaaattaattaatacaattaataaaattatataaaatagtaataaatatgctttttaaaatgtaatttatttgactagatattaaattaaaaaataaataataataaaagcatttaatagctatttaatttgaattaaaataaatctctatgtaaaagtcagaaataaaagagttacttaaattatattaaatttaataccattcaatcaaaattaaatgaaaaaattgataaattaatatgacaataaaattaaaattggaaaggaacaaaatattaattattacactgcaatacaaaatacttcaaaatatcaaaaacaacaaaaaaacgtttaaaaggcaatttaatactaattaaatacatattgaactaaatcatagtcataaaaatttaaaacaattaatacaaaaaattgtcaaataaaacacaaactaattgtaaatgttataaataaagaaaaaaaaatatgcaataaatataaaataccaaccaataataaatgtaattaatataataaataaaattatcataaaaaaataaagtataggacaaaacactaaaaatgcctccacttattccgccaccaccatcgacatcggaaattgaacttcttcaagacggataccaatcgttcttactcgtcgacctcaccaaaatgctggcgccactgatcccaatctggtacttaaagattgattcaaagaaccaccgagttaaaaaacacaacaactaaatttaaattaaaagagaaacaaataacataagtgtacaggatacacatcacacaccaaagacaacaaaaga

SEQ ID NO: 237372 - DNA, 3884 bp, Cannabis indica
agggggacatttttatttaataatctaccgaaagtgcaattctaataaacacttaatcattatataatattagtggtaaagaatagtaaagactaaggagagaaggaaaaaggatcatatataatatttatacgaaacccacataaatataacatgatctaatgaatatgatcatcattaacatatatatatttactagaaaaaagttacatgcaaggcacgtatatttgttaggtacgttttaatttaattaaaaataatacaataaataattatataatttaatttattattatagtctaagtgtatttttttttaataaagtcattaataagcctatgtagagaattggagaatgaggtaaagaaccatgctaaacaaaaggtaaggtaaaacaaagagtaaaataactatgccccgtaaaattctacataatatgtttttttttttgaataagattctacataatattaaaaataaaaagaagaagaagaagtaggtgcatgtatatacaaaataatttgactaacatacaaaaaataaataaaatgttagtcctgtaccaattattctcaggaaatatagacataaataaaatccaaagagcttacaatatataaaggcatacaaatttcagttctcattcatatccctatcaacaatccacttgaaaatcttagtgtagattagcatttaactcgtactcatcaataaatgttcttaatcaaattcaaaattgcagagaaaattgtttataaccaagttcttcactttacaattatagacactcaaagatctaaatttcaatatttattattgaatgtttataatttcaatatttcaacatatctgctttcatcagtccagaagcctctcagcagtggacaaatatgtataatgtagaaagatgcgtggacattaatcttatacatacaagatatgaaaacataaagcttcgatagaagcaattcccatcaccctgtgttctccgaatggccgcatattgttcactaaacacctgagaaaagtgatatgtagcatttcagtttttttacatcccaataacatcaatcacaacctttgaaaacatacagaactcagcacctctgatataaattagaataggaatgtccaaattgtaataggaaaaggaatcaataaataattaaagaaaacttaatcgtacatgtacaacagcaaaaccccaatcgtattttttttttaatttaatgggatttattttattatatgtaaataaaaagtgacccatgaatttctcataaaccattttatttttaatataaataaaaagtcatccatgaatttctcataaacaaagaattctgttatatagacatactttatatatagaataaatatgttaaccatcgttaacatgtttatatactaaactacctagatagagactagagaaatctaatgaatatgaccaatgtacgaaattatatgcttcaattttaaccacgattatctcaaaataatgagacccacacctctttttttttcaagaaaaattgtgattaatctttgccacttaataattagtaaagcactatatgagtatatgctgtacagataggtaatcatattaagctttgtactctccctctttcaagatcatatatataccaaaaacaaatgattattttttttattattttaatatttttttatcacgacctagctctaggttatgaccgatagtgttgtaaattaatgcatgttgtgctggaccaacttatatttattcgtgctttttagaaaatgggttgtatcgtgctgtgccatagaaaaatatggatcgtatcgtgccgtgttcattttcaaaagtagactttgtatgttcgtgccgtgttttgctcgtgtcgacccatatatatttcttaaacagtcagaccgtttttatattcaggcttgaattcgtacttactttttcatattttttttcataattactaaaatatatgtatattttataattttaattatatttatataacttttcaacaatattttacagataatcatataaacataattttttatcacattccataaataaattaatatataatattaatttttgatgttttaatattcagtattatatttaaattttattattattttaacttatttataattaataaatgcattttatcaatattattaaattataatattttttttaatatgtcatcttgtgtttttctggctagtcccgtaccgtgccttttgaactagtctattcgtgtttacatgttgtgactttcgtgcttctcgtattgtgtcattcttaagaaaatattttttgtgtcgtatcgtgtccaagctcgtatgttttcgtgcccaaactctctctttttaatagttttgttgtttatacttactagatgatatttgtggtatctgtcttgttcttcaatacaggaacgattaaaagatgcatatgaagcacaatatgaacagcaaaatgatgactctagttcgcatgcttattcctcagttgatcagatacaaatactttaacacgtgcttggcgagaggagcgattacaatcgagcagtgggacgcaaatggaaggtcaatccacaactagtcacactcagtatttccaaacacaaacaatgcctacttaagaattttcagaggaaatacaacgattgaagtgagtaatagttaaattggtctagcatataagtcaaaaggagcatctgccaccaaacaatgagatagattacttgatttagaagcactcaactaggaggcccgaacctcaaatgtctggagatggttctggttcgtcttttcaaacttcgggaagccactccaacatgcactcaactttttcgtgttagtggcagatgccacgaccaccaccatcacaacaacctactcctacaccttatcttccctacatgtttgaccccccatcacaacaccctccatcgccatatcactatccttacatgtatggtcctcaatcgcaacaacctcagtcacagcaatttatgccgccttatgtctatccctaacatagagatatgcctggatcttcatcttttcctcaacagatgtcatcgtattcatggcctatggtgcctatgtcatcaatgccacaatagatgtcacaaaaccaacacgatgagagcgaggatagggaggatgatgaggcagatgtaaccaggtagtttttattatatactgattattattattatgataacatagctactgtaagctttcatcatctttgtgtctagatatattttatttcacttgaaattgtgacaataaattgcataattttatcatcttaaactgaaactttagcttgtaggtattttcaatctattatctaaataaatacttatttttgttttaaatatctttgacttgggtatatcccacccgatgagagtgtgcttatatttattgatttcgatgtaggtgctgataggatgttacttctgtccctgaattgtctatgctactagaccaaaagttgttggtcgaagccagccattgtactcaaagatagaataataatgtcggtcattattatcgctttttgttggattaccataatatgtacattgcttgatacatatagtattcagaaactagaaagtttaaaaatgaatactaattcatttgatatacaaacttctctttgtaattgaaattcaaaactgtttacaaattgaatgtttacaaattaaaattcatttgatattatatttaattgttgatgttaaataatatagggtcgattaatgctactaaatgttggcatacttgcatgtgaataagggagacattacacttttagggacgatttttttgctcctaatttgcataaa

SEQ ID NO: 237373 - DNA, 701 bp, Cannabis indica
tcaaataatcattgattaagtctccttaatcgcgagaggtcacaggagattatgctggcccagaaaggtctgactcgggagaagcattgcgatttattacaaagaaaatgactatccaggactcagaagccttaccattgctctgggacccgaagagtaccaacttacttataagcacaggcagatgccggggagtcatgcaaagagcctaagacggatgccaattatgcaaggagaactggaagctacttacgaggccatagtcggatggctttatgacagcgtcacaaacaagttgaagatgaagaccccgatgtcaaagacgagaaggaagacgatgatagatacataaaaaattgttattaaaaagaccggtactattatgagaaagacccagacctaggtctagtatctaatgaattgcataagacccaacataatctatctcattaggaagaggtctctcaaaaaatggaaaagataatggcccacctccaagtgaagtttggagacctaaagggagatctgaggaagatgcctcggtggaagtggtcaacgaagacaatagaaaaaaccctactaacgccaaagcctttagctcctgcaaatgataagggaaaggtaaaaatggatgaccctacatacaaaacaactcccctacctcctagaaaaagtgtgaatgcagccaactggcccttgca

SEQ ID NO: 237374 - DNA, 665 bp, Cannabis indica
ttttgtcccaaaagaaaatgctcacatatatagcaaattaatgaagataataaggacagagtgattgttcaaaaaaatatgtatacaaggatagagtgatctaactaattaaagctggcaacaaagatgtttaagagaaacttgtcgagttagaataagcaaacaaagaagtcttgacagattcaaataaaacaaaacgacgccaatagaaataaaattccagtcattaccgaccacatctctgcatcctaaagctgcttgaaaaaggagtaacacattagcaatagcgaataaagtttactggtcctgttatagtccagaggtggtgctttacttcaagtccattttcaaaacgctcccttgtagatataaccaactaaaacaaaacaaatacctctttagctaaaaatcaatgcaaagtcatatagttaagtataaatgtgtatggagaaaaagcagaaaccaaacaaggagatgaggtggactggtgcttctagggacaagagagaggcttcaaatctccactagtaatcccaccaattgctataagttaagcaaataatgaaaacacaatggaagaaaacagcaatttttaaaataaaaaaataaaaatgaaagaaacatgtaccgttacatgtcgtcatcactgatgtcgtcattgatgt

SEQ ID NO: 237375 - DNA, 721 bp, Cannabis indica
aaaaactaattatatgtattggtcatttcgcaatatgataaagtttgaaattatggtaaaaattgaagaaaaaatattcattttagtgattgaatctaatttgtcacacaacacatgtaataaattttggaaagaattctacacgtgacttgtcacctgcatgttttatctagttttaattataaatgtcagtttatttattcctacttaaaaattagtattagtaatagtattataaattattaattacatttatgccatagtaattaaattattctattaatttaatagtttggtcagaatgaatataaaatgtaagtgcacatatatatatttatttatatgaccataattaatgaaatagcaaatgattcaagtactaaaatttagaaatgttgtttatagaacatagatcatacatctagtataaaagattaaaaactatgacatcattacatatttttacattatttttaaaggttttaggttgtgtacgcatgaggtttaccccaacagattttacatacgtcccaattgattttgttgattgtgaacttgacaagtaggataaaaggaatgtcaaataacaaaatcacctacaaaacctaaatgtaatataagaatatagacttgaaatatatatatatataaattaatcaaatgagtagaataacttacagatgcaatagtgataatccttccagcccgacgcaaagcctcc

SEQ ID NO: 237376 - DNA, 1336 bp, Cannabis indica
tatttttatttttatatagtataataatattaattttaatttttcggggcctccaaatttgtggggcctagggcctaggccccggctgccccaccctctggccggccatgtccatatatataatatgtacatgcatggagtttaaaaaaaaataataataaaatatgtacatgcatgcatggtcccattaaataacacgtttgcatatgcatacataaattcatattagatattaatggtatatttataagataatattttatgagtggttaactattttttatgattattataaaattaaaatataagatctatctatttcactagcaattgatctcttaatagtcaaaactagtagacttttacaattaactattgttaattatttactattattatttccaaaggactttgaaatcccaataattatagtaggtactatttttattcaaactagaaaatgatttagggttgccaaataacagaattgctattaattatatagattaaaataatagtattatgtgaatccaggaccggcccttaaacaaagtgggtcacagaaaaaaagtttatttttaggtctttatgttagaaaaatgtggtattttttaaagtcaataaaaaaatatataattttaaaaggagaaaaaaaatttttgggcccctgggctaggtgggccttaggcagaagcctaacctgcctatgccaaggaccgggcctgtgtcaatctcaagtaataatattgagtacttttcttaactattagtttgaattattgattttttttattataaaaaaagattttatcaatcaaaacagagtaaatactacataaatagtatatatactaaatagcaagagatagtctcacttacatttttaaacaaaatcaaaaatttattattggttatcttagagattttttcctatacaagtagtgatctcactttaagcattgctctaatcaaataattattcacataagaaatcataaacagtttttgcttaaaaatataagtgttggaataagttcatttttatttataatccaaaatgtaaaactagtcattttccttctcaaacatcaaatttcagtattatgctaattactaatgtagtattattgtatttttgacctagctctggcccatagggatcttataatttgtattttggagtgatttgtttgaaccgaactcatgccaaaatctatacaatagtttttcaggttgtattgttcccccatatattagtggtggtgcatggtattgttacccctataaatgtatgtgatggtttgagcggtaagatgggtcaaatacgataatataa

SEQ ID NO: 237377 - DNA, 873 bp, Cannabis indica
catactgcctaaaatggaaagcggtataaataatcacataagcagctaagcgtttactctcaacacttactgcaccacgaggcgagcttgtctctgacgatgattgtacatgtccagacggtctacacgaagtttaaaaaccttggcgcgctcataccaaactgtaacgccctaacaattaggcatatcacaacaacagattacgaaaccctaaacccctaaactgggattacaataggatgaaaattaaacttgtaataatttttaactttacaaacaatcaaaaaaatacatacttcagaatcccaaaaatattctcacaaaatattacaaggctattttacgtgacgacctaagcgacaaaatcatgattacaaaatacgtcactcgtagaccccaatcggtttggtctagtatggcccaaacatgtacaagcatccccaagccctcgcactcatggctgataagtgacaaatttaacctttcctgcacagtagagcacccgtgagccaagccctacaagacagtttatatatcaataatcacaattataaatttcacatacattataatcatgccattacacttattgtctatttagtatagacctgcgtgttacgctcacatgcctatttatgtctatgtggcatagacccatgtgttacgctcacacgtcaaaatacaataaggccttagaacgtttcatctcggttctaattattgggtccaaccaaattacgccttgaacgcatatgtaacaccctaactaacataggcgtattacgtgctttttaaacatactgtgcagctcgttgctaatcaacgaggtttatggaaaaacatgattaattaaaattttcgctttttaattaa

SEQ ID NO: 237378 - DNA, 2484 bp, Cannabis indica
tttgtcaagcctttttttttccttaaataaccatgtccaagagataaccttctttccttgtggccttggaaccaaaatccaagtcttattcttattccgagaatgcatttcatcccccattgcagctagccatttcttccttgatttatacttggagttgcttcctcatcagtggttggttctgaatcatttttagattgtacaattgccaaagcatatgctatcaggtctactttagcatatcaatttgggggtttaatctctcttcttgttttgtcttaagccagttgataattggttaaatctcgttggttttcttgactacttcctgagtttccacttcagaagccctgtttatatacttctatagtagcttgtgtttccacctctatttctgtctcttctactgatatgtatggtaattcatttggtgctttgattctatcaaagttgatctcaagctcagccaatcatctcttgtagtaccttcaacatttgaatttatgcctttcttggttgccaagtgcatgaaatcatgctcattgaaaactaaatctcttgatatagacaatcttaggctttccatttttaatttgacacaacctgtaacccttagcacctttagggtattcaagaaagaaacatttaagagccctaggttctaatttatcaagcatttgatgagcataggtagtgtaacttaagtgactcaatttaggagcagtaccatgcaatttctcataaggtgttttcagaccaataactctactagtactcctattgatcaaataacatgcagtaacaagagcttccccccaaaaaaattccccaaaatagaactaatcaacaaacacctcactttgttcaataaagtcctattcattctctcaacaacaccattttgctgaggtgtgtgcttaacagttttatgtctcacaattccatatttagagcagaggaaatccaattcagtgttaataaattctaaaccattatatgttctaagcactttaagtttcttgttatattgattttcaacctcagttttctattctttaaatctttctaaacattcattcttggttttaagaaagtagacccatacatgcctactctaatcatctatgatggatagaaagtaatgtttacctaagtgtgttccaactttgtcagacccccataagtcaacatgagcatactccaatggtctctttgaactttgtctgccagccataaacattaatttgtgatgcttctccaatatacatgcttcacaaaaaggcaaagaatttggtttgggattgcctataatccctttgttgactggatttttagccaagcgttgcgaagtcgtaataaatgagattttaccaaaattgtaacaataaatgtaattaatgacacaaaaattttccataaatgtaaacaaaagtcaccacaatttaaagaggttctgccctagatgtcagtcttagcctactccccttgtgttttattgatcaatgttgcaaaagtcaagaacaggctcttaattgcaaagaatgaaaaagtgtttatttttttctaagtgctcaaaatcgcggatccccttttccaagtcatggtgaccccttatataggggaaagagtcggtgcttctcgcttcaggagacgcgaccatcgtggagctacctcaactatctccttagtttttagaggtagttgcagtctgatttttatgataataccttgttatttttgtgactttataactatctttgagcctttcattggatttgaacatttgaaagccattgacgatgagggtctcctatgggcgtgatacggtcattgaccacctttggggatgaaagcctttacttagggttgacacccccgagacccaacttgagggtgataatcgtcatctcagggtgacccacgagatcccttatacgttgtcagtagtcatagagttatgtggatgtccccatctacctttgagagtgtccttatgtcaacggtgggtgtagtgtcatctgccccttagactaacttggcatgtaggtgtgtggtgattgttcatcctgcttaccaaggtgttagtccatcatctttccttcttggagacgcctaacttactcaagctaggggtaagggtgaccgtctgacttccattataacagtcatgaccacccttgatgattaaaggtgatgaccaccccaacggtcatgactttacatattctccattaatttagtcttggtatttccgtgccacgtgttgttactcttgccacatcatcattatcaaaatttttgtaaacatttgcccctaagtttctagcggtatgactatacgtaggaacttttctgtgcagcccgcacttcaatttagttgttgtgtatgacatagtggtacggtggcgagaatgccattgttaaactagaactacatttcaaacccaaaaaataattctcccacttttcatatttttacaacat

SEQ ID NO: 237379 - DNA, 907 bp, Cannabis indica
cataagaaattagagttagggatgacatgattaattttggtgaaaattaacgatttttttgcgattttgttcttatgcaatttgtgtgcgatattgttgcagcattatgcgattttgttatgtatgttttcttgtgcgacattatgcgatattatttcttggttgtgcgattattgtgcgatatgatacttgtttatattatttttgtagtatgcaacattatgcgacattagtagtatcttgtgcgatatattatgctgattttttctgtttatttgtttgtattttttgggactcattcaactgtatttgtgcatgtactgtatgatggcgtttgggctgtggagggtttcaactgggtatttgattccccaaaaaagtaagacattgatgtttgacattgactctacactaaaaaaggtacgtgaaattttgcatgaggagttggatgtggacccattggtgtatgaattgaaattagaagtttgttacatgtacatcaaaggcgctaagtttccgcctgaggttttaatgaaagatagtcaactacgagtgttcttgagcatgaaggcaaaaatgagtgtggacaacttgttgccactatttgtgactaaggtgaagaagaatgtgaatttggagcctacttcccggaatgtaacccctagaagtgttgttgggacctttgtcccagaaactaatctgggagttggtttgaatgagaaacttggcactaatatagatgatgagagagtgggtatcgcatttgatcattcagatgagttcgatgctcccttttacaacaatgatcgtgtggttgatttaggtggggataatgatgtggctacagaggtacctcccctgaggatggaactaactcctagaacccaagtagagcgacaaagaagac

SEQ ID NO: 237380 - DNA, 827 bp, Cannabis indica
cacctgtaggtgaaagacctagaatttgtatagggagtaaattgaatctgagtcccaatattatggtagttatcaggtgcgactatccaatttttagatgtcattttctatgattgggattgagagctagaggtctagtggacggtgtgatatgcatatgaagcttgattttgattatttgtggtctctctattttttatacactttgaaaatggtgatgagatgttttatttttaaaagctaactatacataaattcttattaaaccaatggtcctttgatattagttgttttcctactaggcttaataagttgtttcccctattttctcttattgcaggaacttagtttgatgctagtggatgagaatggtaccgttgaggaagaaagttgttattagtttagtcttattctacttatcaaactttttaatgaaacttattttgtacttaaggttaaatggatggtttggatgacttaaactagccatgtactagttagaaataatgaatgacgtatgctagatattattttagtattttattaacttattaaatctatcaattcagggactacataactgtggggatattattgttgttttatattgatgagttatcctgattttgttactaatattttctttttttatataggagttaatctattatttttaaataggtattttgtgatataagttaaaggatcatttataagagttatctttctacaagggtcaaagtgtgaccttgaccattcaagttatagatattacatatgtaaagcccgcttagttaatttggaaatcagcagttgtttatgtttaa

SEQ ID NO: 237381 - DNA, 4411 bp, Cannabis indica
ttgaaaattggttccaaactaacttttcagcaacgagaaaagcttgtcacttttctcaaacagattctggatgtttttgcatggaaacatttaaacatggtcagaatatcgccagaggtcatgtgtcaccagttgaacattgaccctgaagtgtgaggagtacgacaaaagtaccgcaaaatggacgctgcgaggtaccaagcactcaaagaagaagtggaccgtctgttggcatgcgacttcataagggagtcattttacctaaactggtcatgaacttcttagttttatggatgcatactcgagatataattaaatctcgatgtatgagcctgatcaggagcacacctccttcattactgatcgagatttacttagaaagaccatggaagtgtatgttgataatatgctcgtaaaatctcaacacgtagaggaccatgtcgctcacctagattccatgtttaggatcttgtgacactataaaatgtgatttaatcctctaaagtgcattttcagagtaagctcaggaacatttcttggtttcatggcaaaccaacgaggaatcgaggccaacccagcataaataaaggcactggtggagatgcgatctcccaccaaaccaaaagtggtccagagcctaataggtaaattcgctgcactagatcgtcttgtatctcgttcctctgactaatgtaaggaattctttcaaattctaaaacgtaataaaaagtttcagtggactgataaatgcaaagaggctttttaggcactaaaaacacacctggggcaacccccaaaactatccaagccgatgcctggagaagtgttatcaatctacctggcagtgttcgattacgggattagctcggtgttaatccgcaaagaccaaggtagacaacatccggtttactatgtaagtaaatgctactagacgctgaaactcactatccataaatggagcaactaacatttgcactggcagttgcttctcgaatgttgcgaccatattttcaagcacacggtattgaagtactaacaaattatcccttacaacaagtattgacaaaaccagaagcgctagggcgactggttaaatggtcgattgagtgaagccaattcgacataaaatacaaaccacgcgcggcaatcaaaggccaggcccttgttgatttcattctcgaatttccaaatgacgaggtggcaatcattacaaaagagtgggttgatcctgaagttccatcaggagaaggatggactttatatgttgatggggcatcaaataatgaaggttcaggcgatgaaataatattgataagtcctaaaaaattcaaagtgcacgctgccttaaggtttgaattccttgcctcaaacaatgaagccgagtatgaagctctagtcacaggtttaaagctcgctcttgaaatgaaagtcgagtacctcgaagcattcagcgattcccaaattgtggtttgtcaggccaatggagaatatttggccaggggaggatgcttggcgaaatatctctcctatacttgtgagttgttgtctaaattcaaaaaatttattgttagtagaatacctcgtgcttataattctcatgcagatgctttggcccgtttggcttcaacaagagaagcaaaattacttgatgtaattcctgttgatgtgttggctcatccgacgattaattgcgaagagatcatgcaggtcgacgtaactgaacaagtcacttggatgaccccaatcgttacttatttaacaacgggaaaactccctgaagataaacttgaggctaagaaattacaatatcgagctgctcgatatgtaatttatgacaataagttgtatcgcaggagtttcagccaaccattgcttaaatgtatcgatggaaatgaatgcgactacatactttgagaagtacatggtggtatttttggtaaccacactggtggtaattccctagccttgaagataatgcgacaaggttattactggccaaccttgcgagcagatgcgaccagttttgccaagaaatgtgataaatgccaacgaattgtgacctatgtcaacagaccaccaagccagttaaattctatcactagtccctagccatttgtagtctggggcatagatttaattagagagttaccaaaggaaaaggaggagtgaaatattcagtggtcgcagtagactactttacaaagtgggctgaagctgaagctctagcgatataacaactgtgaagttatgcgagtttgtctattgagctattgtttataggtttggatttccctacaaattaatctctgatagcagaaagcaatttgattgtaaggaaatgcaaaatttttgcaatgatttagggattcagaaagcttttttggtggtcgcatatcctcagactaatggacagacaaaagtagtcaacaaaatcatcaaacataccataaaaggtaaactcgaagaaagaaaaggcgcgtggccagaaaagcttccgcaagttctatggtcatacaacacagctgcttgctcaacgactggtgaaagccccttctcgatttcttatggatgtgaagccatggtaccagtcgaggttggatctgggtcattaagaagagatattttcaatgttgagtctaatattgaaaattagttgatccaactcaatttttttagaagaaatgcgcgatcaggcccaaataagaaatgcggcctatcaatagcgtacaacttgctatttcaactcaaaaattaaagaaagaagtctacgagcaggagatctggtattgcaaaaagtcatgcccaatacacacaactctgctcatggcgtattcggtgacaattgggaaggtccttacctcatcgctgaaaaatttggtaacaccacttaccaattatccgacctcaacgactcaattttggatagagctcggaatggagaatatttaaaatattattatcaatagtacttgcatgcatatacttagttaatttatttcataaatatcctaagtctagggggtgtaaccatatattatactattgattatctaatgaattctcagtttttagagtttttaaattttttgaagtatctttatttttgcatgtttacacttagaaaattttcatcaaaccaagctgtgagtagtaatcgcatgggaaaaattcgataacgagttatgcaaggttaagtctttttgaggcattaagttgcaattaaaaacacacatcaaatgtaacgatagaaagtacttaatagaaggagtattcccaaagagatacgctgttcataaatatggaaaaataagttgtcttaaggtattgccaaatacaaaacacgagtacccatgtaccgcttaaaagaagtttgataaaagaaataaaaagactaaatggcaggggcgttggaataatctacgaccttccttgtaccatttgcgagttcagcaatagtcgcatctttggcatcatcggaaaaaaagatttccacctagcccttgagtctcggtaggtgacatggtaccgaaagcattggccatctcaaccgcctctggtctaaagaccatgaagtcaaagtctggcagcttggtcagggtagtgtagatgtagtcaaagacagtctggtcgtaagccttcttctcgttctctttctcagctgcaagatcacaggtaaggccaattttgtcctcctccaacttcttgactttctcattcaagatcttaattcgctcttctacctgacctttggctttaccgagatcctcgacttccttgtctttggctaccacatctagctttgtctttttaaggccttcttaaagagctaagttctatttctttaggagattgaggtgtttaaaacgaacaacatatgcccacaaataaatagtcatcagttgggagatgagatcagctgatcgagacaagaggtcctcgacaggagttcccttaactttagtgacaaactcattgctcacaaacttgtcctgtagagccatgatatcgcgagccttgatagcggggtcgatcacaactttctttcccttgtcttgagtaaccttatgctacttttttggcaagtcagccgcctgggtaagaacgacgtcgcttttcctcttttgaggtgtcgcagacgatggcgtcgcagtaccaaccttaggcttgtgattgaaaactagagcttgtttcaagaaattcatgtctgtgagaagaagaatgacaagtaagaacttgtaagtctaagacaatattgtcagtaatatacttaattatattacctgatgttggtctcgaagtttgcttggatagacgcttgtcattctttctttctacttctcagcaggctctttgtacactggttcacactgaagtttagcgtcctttgggattagctgttgggttttatgcc

SEQ ID NO: 237382 - DNA, 688 bp, Cannabis indica
aaaaaattaattattttaattacttaaaaaaaatacatattggtaacctgttatttcaggttaaaacaaatgtaaccaacatagttacaataaaaatataatcattcagtacttacttatctatatatatcacttttaggtatatttaagtgtaagtttatgctttgagttgtaattctactcatcctctttttttattatttatttatatatttgtattttttttttgttttgaattgtaatatttttttttcaatttgatgagtatatattccactaaacaaagttttacatcctagtagcatcatttaaaatctaccattttttttacaattgttcacaactgtttaaaccattctaaattcttccttgccgcttttttagacattacaatctgaattctactcttaacatcatatttaattctttttacatttatattaattgtataaattttcatatttcagagagcttcattcttgcaccaccatatgtggtatgttattgctgctaatgttgctaaaaaattggtgctaaaatctattcattttttaatctatgcagccactatagtaacctcaaaatttatactgctgtaatttcccaattcaaccacccagttgtaacattttatttaattttcttttgtctttttatgtttttgaatcgagtacgttgtaatagtgat

SEQ ID NO: 237383 - DNA, 1897 bp, Cannabis indica
tcaattaatgctatcttcaatatatattctaatcacatataattcaaaaatttgtaaacacataatcaaatatggaagatatgaactaaaataaattgttaatgtagatttcgttaattaataaatgagcttaaactacataaaaagaattcagaataataataataataataatagacaagaaggtttttacgattgaaattaattttaatagtccacgagttcattttattctcaaaatatgatgagtttacaaataattaataatataatattttatatcttctctgaaatttctcaatttggcccttttcctgaatttgggaattcatttactatttataggtgtttgggggtgacacttatttctctttgatcttatctttataattgtttataaaatataaacaattctcacgtttcatatttacaacatatataataaatgagtaactactataacggcctttgtctttatccaaaacagctatgttgactaagcttctttgcctcacaacatatataggcaccactttttatgcttatcttgacggtaatttatttgccaaggtatctgttaacccaaaaatttgctttggtgatctggacatcaatgtttgaaatgtggcaaaaatgataacatcacggaattgagtagtcctgagttatagcagttgacctgggaagggtccctagccctacgcctaagttgactttgggaactccaggatagaagttcagactttgataactcgttttcaactcactatctttcaatattttataccattaaagagaaggagcaatcaaatccaagccataggagctgaaattacatgtacacatgcaccccaaaaaaatcaacttgggcacctagggtttcactcagcacccaagttaacattcctaaataggattttaatttttgataccgtcttagtacaaatgggtcaaactttacattggaacatgaactagacataccacagacatatttgaggcatcagaatcagatttagataaatttcatatttgagtagctggtgcccgggcacccagcgcgcaggttgacaatttgtcaatctgggcgacttccaagtctcatatcggcaattcaatattttcatcttctttgtcttcatccaaaatggggaaataagtactttcagaaaagaaacaacataacctggtttgatagaaataaggcccgatggccagggtgacaaaataggttttattgctcctaataagcagatattgaaatttagcgaataaattttctaacttattaattcatcttgactccattataaatttagaattacactcttgattacatagaacactctatacaccaactatagatacgttataatttatctattgtttcaatcacaacaatcacggatcctacatagacagtttatattgagtagggacaaaattaccattttacttttaatatgtattttatctttaaaatacttaactacatgtaagtgatattttgagaaactaatatcattaccgaatgaacgtttaatcattaaatgcctttaactgaacttaaggaaactattgtttcacttattataaatatagaagctatagatgtacatatctattattaatattcccacttaattgtacaactgagtttcaaagatataagtatgggctagtcttatggataagttggtaactaatgtttttttttttatttttttaaagtttatagaaagagagagagatattgagaaagaaagagagaaagaatgaagtggatcaaggatcctgctcacatattgttccaactaggattgtacaaaagttttcgtagactgcccaaatcgatgacccacccaaactaaactaaaactaatgaaaaatacaaacc

SEQ ID NO: 237384 - DNA, 1011 bp, Cannabis indica
ttcaggagcctcgaggtctatagacaacgaggcacgcttcttatttgtagtggttttcctggatctcttgaggggttccacattaacatctgaagaagtttcaaaggcagcaaccctcttttttcccttttttgctcgaagagtggaggagattctctaaatccatatctgcgagacaaaaagatgcattaaaacttatttaaaaatagatgaaaaggaaaatggtaaataaattcccatttaagggaagttaccataataatctgatgatgaagaaggaggactatagtattcactaaactccctagtcttgtgatcatgaatatgtcataggggttaattggatctaaattccaatctgaatttggatggctctctctctatcaaagttagtcccatactgctcgaccatcccatagtaagaactagtgcaactaagttgaacatggaattgtggataccaactatcaaacctatgtgtgatacaatctataaggaaggggttccaaatgtaaaagctatgccgactatcatggaaagttactaatgaagtacatttttccctaagagcagtgggagaccatccacattaattacctcaggatgcatcttcttcagcttcccaaggggttacattttggagataatgcacccgagccacataatcttgactctcctcgtcagctggagctggaaccttgtcccacgatgaatacttaggaaatttgtaatcacaagtatactcgtctgaagcgagaaggccaacagtcttcaaattgacttcattcaagagaaactcagctgatcgcagtccgcacagaaggcccagctaagctttacgcctcttacctatctcaggagtgggaactggtctttttgagactgctgtcaacataataaatgagataagtcagcgaggccaaaggttacaaatatgaaataacatgaaatcgagtttttaagataaagtttacttacgaataatgtgaaatattgtcgtgttgattgggg

SEQ ID NO: 237385 - DNA, 761 bp, Cannabis indica
attacaacatattggtgaaaactaatgaatgttttccttcttgccacaagtcaaacattgatgtcaagatcagtttctagatgaaaactttgttataagcttttaaaggttaggaatagggcctttcatgaaaaagtaatccctattgtgagagggattcatgaatcaataaagaacactttcgagggtcttcatattgtggagaatgatagtgctaacaatggtgatatttccgatttgtgaatgttccaacaagttttattgacgtctactctgatattacttgcaaggacttgtggtgagtaggtgctactactttttgaagattgttggttgcattcttgagggttttactgtcaggcttgattgtagggaccctattgatgctgaaactcttgcactttggcttgctgtctccttgtgcttgaaaagggggttgtctaagataatcctaattttagatttcaagcttttgttcgatggtatttactacaacaaggctccaaattggagattcaaatctaattttctacaattttttttacagccattagttccattttggagtgttgtgttctggacctgcgggacttttaatgttcaagctcattgtcttgcagctttggctactactaatttatgttttttctctttttgttaggaagaggtggaacctcttatcttccataaccttggttgttgaaactttgtttactctctattgtaataaaagtttttactactaaagaaaaaatagaaaa

SEQ ID NO: 237386 - DNA, 2055 bp, Cannabis indica
tcatctttgattaaatctttttactgctgaattttattttcttgttaatctttatttttatctccatctcaaaattattagtttgccaaatagaaacacaagtctaatctagtggtattcagtccaattccatgtgggatcgacttcacttgtgtgagtactacttgattacgtgcacttgtgtattattcatatttttcgtaacacacttgccatagcacaaatctgtgcttaggtaagttaatagaactccaaattgctctatggtaaggcacctggttttgaagcaaagaactcttgtataaacaattggtttaaaagttacctgagctaccagatgatcttatttccagttctgagaacctctttctcaagtgacatagtttgccaataccagctgacccaaaatttaaagtgagggggggcttttttttttttttgtaaaagcaaggagggcaaaaataaatttaaaaagaaacaataaagtgtagttagtggaatttgaacctttaccctctaacatattagtaatctacattaactattataccaagcttactattatgtttataaatatcatattttaatacaaatatatgttgtaactaactaaatacatatacaatttttcccgatttttttttcaaggggggcgactgccccctctggctacaatgtgggtccgcccctgccagctagtgtcgagttttaaatcgtacaaccaaaaagaaactttctttaggtaaatggtattgatctattttacacaaagtaaatctttcttattggataaagcccaaacaaacttagcaagattcgcatgaaacaaacattttattattggtccaaaattttacaattttttcgtaaaatataaaaagtagtgcaaccaaattttaaacctgaaataatcaagacaatcaaagtcaagaacaacccttgaaaaccacaaagatcaccgaacaaaaaacacatcctcaaacacgaacagaaaagttctgtccctcacaaaattacacaaacccagaagcatcgaggttgacgaaccaccaagaacctccgtccacttgagaaaagagagcagtagagatatccaaagtacacaaagaacaagatcgatatttcagcaaaaaaaaaaaaaacaaaggacaagatggaaatacctagaggtttcagaggtcatggctctaatctaaaactccattgggttatccgtcgcgcaaaaaaaaaaaaaaagaaaaccgatggagaagggttgctggcctaggttgcttcacgaagacgagagagaatgatcgaagcccattcgagccttgggaggtcggagacactcagtctccgtcagcgccgagagaaggatagagagagagaagggttggaaaaagagagagagaggctaaccctaataaatgaaaccctgaaactaaaacttttcttttatatgtgtcttaaaagttaaaagatataattgataaataaaaagcccaagcaatacactgttaaaagacaataaaaaaaaataagtgactttttctcctagttcttacttaaaaacttcgataaaaaatggagattttatataaaacgctaagatagtgtttaaaaaatgcataaaatagcccttacaatacctttttttatctgtttgccaaataaaactctttttccaataagaaagtgggatcaaatattacatgatatcttctatctcactttatattttttttcatgtgcaaaaagtgggataaaaaatctcttttgctgtagtgaagctttgattcagatttagtccaagataactcaggcagtaaacagtaaaacaaaaaacccagtgacaaattaaacttaaagagtgtcaagataaaaataaattagctagttagcatagatgaacaaattataaattggatgacaagttttgattagctttagcccgctcaactaaaggtattcctcttgcttgaataaagatcatgtgatcggttcaaacaccaatgttaatgtagcaatcatgtgctcggtaccacctgttgtatgatttagtgttagagatcc

SEQ ID NO: 237387 - DNA, 2854 bp, Cannabis indica
ttcattcaaaacatgcctgaaaatgtgattacagccccaaaatgggttatatacccaagttcaattcaagatacaactgaaaagagaggcaacagaaataaaagaaaaggagcaacaaaattatcaattactctccagctcacatggcttcaagcctaacgaactcctccagccatttgggcttcacacgcgctcgggttccacgcgcacgtatcttactcgcctccttgcctccgcttgagtcggacattgcattctcaggactcggctccttcgaactctgcatctcaacttgttcctcttcccttagccgatcgtgagccttgctgcatatttctcccaagtctaattgcaatgggcttgatagttgggccggcccaacactacccccgtcatcgaaaacgaccttgtcctcaaggttgggaatgccatagagtgctccaaattcagccaagttttcccaagtagcatcctccaatgcgctaagtgaccattgaaccaatatttgcttctcccctcgaaaggttcgaacggcaacaattgcttggggtagcatcactggtttgttattgacagtaatctcaggaagcggataacaagtgggaggtttgggtccataaaacggtttcaacaccgaaacatggaacgtaggatgaatcttactgccttcgggcaactccactgtgtaagcaacttgtcccacttgagccttgatcggaaatggaccaaagtatctcttacaaagtttgggatggagtcgttttgccactgtattttgccgataaggctgtagttttatcaaaaccagatcaccaacactaaacttgatgtcacggcggtgtttatctgcctgttgtttcattctattgcgagcagcctgcaagtttgtagtgagttgtttcagaatgtcatcccgagaaagaagatcttcttcaacggcgtgaatgctagtggtccctcgggtgtacgtaggaatagatggtggagtacgaccgtataccgcttggaatggtgtcatcccgatggcaaaaaacgactccattgtcgcggattgtcagctgtgaaagctcgcaaatactgttccaagtacctatttgtaacctccgtttgaccatcagtctgaggatggtaggaagaactcatcttcaatcgcgtgcccattaattcaaataatttcctccaaaaagcactagtaaaaattgggtcgcggtcggagactatggaacggggcagtccgtggagtttgataaccatgttggaaaataattccgccaccttggttgctgtgtattgattcgataatgccccaaaatgcgcatacttggtaaacctgtcaactaccaccagaatgttggatacactgccagattttggtaacccaacgataaaatccatcgataaatcttcccaaacacgttccggaagttctaatggttggagcaaaccataaggtgccgtgggagagtatttgatagtctgacagacaatacaattgcgaacaaactgctgtacttccttgcgcatacctggccacataaaatttgcacttaaacggagaaaagtgtgttccggacctgtatgtcctcccatcaaggactcatgaaactcgctgagtaatttctgcttcagattagaatggaaacttagttgaaggcggtgttcgtagtacaggagcccatcacgaactaaatatggagaatctttcaaaatacccgaagctagctgctcctgtatgtgacgaagttctgggcaggttgtattctcttgacggagctcttccaaaaactcaaaactggctgttgattgagctgctgccaatagtgaatttggaacttcatgctgacgagacaaggcatctactgctgaattagtctttcccggtttatattcgatggtaaagtggaacccaattaatttgcggaggaattgttgctgctcgggagtctgtataacttgggtaagtagttcttttaagcttttgtggtctgtgcggatgagaaactggcggcccaaaaggtattggcgccacttagtaccggcctccacgataattcgcaattctcgcaaatatgttgaagtgccactgaactttggacccaactttttgctaaaaaacgccactggatgcccctcttgcatgagaactgcgcctatacccacattggacgcatcggcttcaattacaaacagcttggaaaaatctggaagtgccaaaactggtgtaatcgtcatcacttgttttagttgctggaaggctgcacacactgcctctgtccatatgaagttttctttcttgagcaactcagtgagaggcgctgcaattgaggcataataagctacaaatcttcaataatatcctgttaaaccaagaaagccgcgaagctgtttgagcgtggaaggttgaggccaatcaagcatcgctgtgatttttgatggatccgctctaacgccatctgccgccaccgaatgacccaagtactcaattgtggattggaagaaagtacacttgctgagtttggcaaaaaaccgatggtctctcaatagttggaacatcgaacatagatgagcaatatgttccattgttgatttgctgtaaacaagaatgtcataaaaaaaaacaataacacaatggcgttgtaaaggttgaaatatccgattcatggttgcttgaaatgtggatggtgcgttagtgagcgcaaacggcatgaccaaaaactcatagtgaccctcatgagttaggaaggccattttgtgaacatcttttgggtcaatccgtatttgatggtatcttgcccgaagatccagctttgaaaatattgtggcacctctctattcatctagtagctcatcaatt

SEQ ID NO: 237388 - DNA, 1680 bp, Cannabis indica
cgcacctgcaaaagtatgttaagactgaccaaggtcagaggaacgacaacaaccaatattcgctacctccaccagttgatggacatctgcaagtcattgttggaggccctcacattgctggagattcgggcaaagctcaggagaggtatgcgcgaaaagtgcagcacgagcaagaagaagtcatcctggctgtggaagaaaggaagcccaaagttccacgagcaggagagccgaccataaccttcaactatgaagacgctgtcaaaattagatttttgcacaacgacccagtagtcatggaagtccagatagccaataaaatggttgccagaaccatgatcgataatggagcctcttcctacatttgttcaagaatgcttacgaaaaggatggactccaactaaaagatctaaccccatgcctctatcctgtctatggtttctccggtcaaggagttgcacctctaggacaaatctgttgacccatcactgttggacaagctccaacgagcatgactatcatggcacagttcttaatattggatgttccttcaccttttaacataatgcttggtcggtcggccttgtatgacttaaaggctgtaaaatcaatatttcactcgtgcctgaagttcccaacaaagaatggggtagggtgtctgaaaggaagccagcagtctagacgggaatgttataaccttggagtggccaaggctaagaaggaggtatcctccagccagagcacagacaagggaaaaaacattcccaagtagggaacttcccaaggcggggatgaagatgtagatcctcgactttgggacccaagcagcaatgttggacctatagaagaattagaagagatcgaaatcgatccagatatcccgaccagaaagctaaagattggaaaaggttttttgctcgaagtaaaatcagaattgataaaatttctgagagcaaacctagacgttttttcctggtcacatgcggatatggtctgaatagatccttctattgtttcacatgttctgaatatcaatcccaacttccgaccagttcaacaaaaacaaagactattggacaaagaacgagcagtagccctgaaagatgaagttgaaaagctgcgcaacaaaaacttcataattgaagctttttacccagcttgggtcgcgaatcccgtaatagtgcccaagccgaacaagaaatggcgagtctgtattgatttcacagacctcaacaagacttgccctaaagagtgttttccacttccaagaatcgatcaacttgtagatgcaacagcatggcacgaaatattaagcttcatggacgcttactcaggctacaatcaaataaaaatgcatccaccagaccaagaacatacaagtttccgaacagatatgggtctctattgctacaaattcatgtcgtttggtctaaaaaacactgggctacttacaaaacattggtaaacaaaatgtttaaagatcagatcgggcgaaatatggaagtatacgtggatgatatgctcgtaaaatccagaaaggctggggggcacatagacgacatggacgtatgcttcaaagtcctcagaaaataaaacatgaaactaaatcccttaaagtgttccttgtgagtcagctcgggaaagtttctaggcttcatcgtcaatgcccgaggaattgaa

SEQ ID NO: 237389 - DNA, 921 bp, Cannabis indica
ttttttctttgctttttccataccacatagtctttttgttggataagcattaattttctcattgttcacatttaaatcaaatgaactcacaccaatggatgccgatgttagcgactcaaaattgtgatacagtaatttggatgaaatgaaactaggaccttcatgttggaatctacgtggtgcattgatgttgtcattatttgaaaatttctgaatacctttgagaatgtgtcacacatgatcaaatttaaagcctacgtcgtattttttttatcttgggctattaacattttcgtttaaattaactgttaaaatataaattaagtaatagcgtacaaaaaaaaaattgaaaaataagatagtaacaataaataaaaaatatatataaaaagggggtttatgtaatccctcactatgctttgatttgaggtgtgagatcccacacataagacaaaatttttttactatagatccaggtaaactttttattattttgacctctcactacaagtttctcaaccggtttctacagtatccaggtaaatttctttcttctttattgtttggagaattgtattaacaacaaaggaaaatgtattccaaataaaaaaaaatgtactttatttaattatttatttattgttgtaaaaaaaaaagaaaaaactgtatttgaattgtatgagtttttctaaaaaaatctaataattgttttaaaattagcattaattttatgcttgaaaaaaaacatttaaataaataatttttatatcttttttaagatgaaaaataattcatatatccttatctttcctttaacaatcttatatcataattttaattgtacaagtatataataataatatatatatatctcataccataaaaaaaaataaaagaattaataatatatatctcataaag

SEQ ID NO: 237390 - DNA, 1698 bp, Cannabis indica
ttaactggaagaatggcgacgacactactaaacaaatttatctcaaaattaattgataaatgcctcccaatttttaatatcttgcgaggcaataaaaaattcgagttgaatgaagagtgtgaagaatcattttgagagataaagaaacatctttctacactaccaattttggccaaaccaatcactggagagacattgttcatttatttggctatctcagaaagtgctataaaatcaacaatagttcgagaggaaggtaggaaccagcaacctgtttactatttgagtaaaaggttactggggccagaatcaagatacccaccactcaagaaactcacactttgcttgatacatgcatcccgaaaaattgcacccttattttcaagcacaccctattaaagtccttacagatcaaccattgcgacaagtattgtttaataccctatggtttaataactggattagcaaccctaactatattaattatgtatcaatgaggaattatattattatataatttaatatgtgaaattattatgatttatttcattttaagaccccgttggtgtattaggggcattttcgtaattttgacctgaaggagttatattattctgcttcgatcaatgtaagattttctaaactcttatttgtttattatattattttagagaattcatacttaaggtgttaattaaacatacatgttagtaaatctagatccttgtaaaataaatcccaacaattattttgtatgtgatgcgggaaattgagaatagggttattaccctaaatttagcggttatgaattctaggattttactctagaatttaaataaatatgaatgccataaggcataattaggttagattcggtactcagactcaagataaaactattttaaggccttattgtaaataaacatgtgagcgtaacacgtaggtctatgtcaaatagactatggatgcagtggcatcatcacttaagtggttataattattgttcatattattgtttatactgtcttgctggccttagctcacaggtgctctattatgcaggaaagagtaagtcggtagttgagcagccacgagatcgagggtttttgcggtgcattgtacatgttcaggccaagctagaccatgagaattgggtctgctagggggaaattattgtaatctctacttttgtcgcttaggtctgcgtgtattaatgacttgtaatattttggaaatgctttacgggatcccgggataaaatgtactcttttagatttatgttaaagtttattaattacaagttattatttttattctgtatttttaaagtttaatttccgctcttggctctagtaaatcctgatttagcgggattagtgtatgattagtcgtagtacgtggcattctttttgttaggatgttaaatcaattctcgcttctctctgtctcttttttctttcttgttccctttttttttattcttctctttgctccatcaactcaaagactccttcagccctcactataacttctgtcattatttttggttttgtcagtatgagctgctcacttaataataatcccttgagtagattcttggtgaaatactcagatgcatcttttggggtcacttcactaacttactacattgtgtttaagaacctttgtaagaatattcatggatttctctctctctct

SEQ ID NO: 237391 - DNA, 698 bp, Cannabis indica
ggagacccaatttacatgattctctattcaaaataatatatatatatatatatatatatgtatattatacaaaaggaggcgtgaagagatgtgtatatatatttatgacatatatactcatcaattcctacatattttaaactattctacatttttgtctttactccctaaagcataaatagccacaaacacatttttttctctatttcaaattttttttggatcaaactagggatttcaaatgttcatcactatcatcatcatattattcattttttcccaaaaagttcatccaaatcacaccaaatatataaatctctctcatttctaaaataaagagtggattaagataacccatagcctacattgctaagtttcattcatagattctgaaaattacaagccaaatttcacaacattagaaaaaagtaaatatgtaaagcgagggttttatgaaaaaaatctaaataacactatgatattcatactttctatgtattttaacatgggaaatagaattaaatagtgaatgagtgggagtaacttactcaatagtgatgcccaagctaaaatcccctccaataatctttagttctcactttgagcattcctttgaaatggttcttggagctatttgagaggattttgagaagtgctattattttttataaagagtgaagagtagaatgggttgtaaa

SEQ ID NO: 237392 - DNA, 1876 bp, Cannabis indica
gaatattcattatgccaactacatgatatcttctccattaagtattttatttctttacaaaatttgtaataattaactgatgccagtgaaattcagatatcattattgaaccaaatatatgccagcattatttttttttttggaaatacaaagatctgtaaccaaaactaacgaagacaaaagaaaccggttacaaaagatcttcaagatgaggagcacaggttgttccaaataatctcttcatctgttccaaaagcagcctgagacaaattgtgagcgagagtgttatccgttctgggaagatagtggactgaggcacctggaaaaaatgacaaagaggaaacaatacttgcaatatatcctgaaagagccgaacgatcaaaggaatttttctgaatcctgagaaccagattctggcagtcggagacaatagtgctgagaggaaaacgaactgtctgacaccaaaacaaagcacgttgtagagcttctgcttctgtaaaattggggataggcctgtggaagaagatgccaaaaaaccagcaatgacttgccctgtggaatcagtaactatggcaccataaccatgcttgttggagctggagcaaagagccgcatccacattaagttgaaacataccgcaaggaggctaaaaattggtgctgctagattgagtgagggaggatggagtgttgatcttcgattgagcatccatgtactcctacaagtagtttaaaactgatgcttccacatccaagtcagtgtagttgtgattagtaaaaaatgctttattccttctattccaaattgcccaaacaaaaccccagaaagagggtgaaattatccttgtcaaaatgttcaaagccacgaagtaaaaattctttaatatcacatttattatttttaaaataaaagttagagaaagaagagttcttccaaaacttacctgctctagaacaagtaattagggaatgagtgttagagtctaaatgagttgggcaaattgagcaagaaggagaaaacatggatttacgatgaaaaaggttaagattggaaggaaggagatggttaaaatccttccaaataaattgcttgattttagggggtatattggaagaccaaacagatgtccaccaagatttaagggcaacaggattagaggaactaggagcagtggaatgagagtttgccaaatggtaggcacaattgacaatgaagcaacctgaagggtgatgtttccaaataaggcaatcgctgttagaaggattgattggaacactgagaatggaattgatgatattatcatcaaagtattaattaagtttgcttgtgtcccaatgtctatcttcagtaatgaaaaaagagacaatggatagagggggagataaaccagctttgaaaggaatgctatcccagtcaggaagccatttggggtcaatgattctaacagaagttccatccccgatcttccagatgaggcccttaatgagaagctccctaccccaaagaatactatgccaacagaaggaaggagagtggccaattgcatcattgagaaaataattttgttaaagtatttagcttttaagagccatgcaaccaaggaattgggagaagtaaaaattctccaggcttgcttagctaacacggcctgattgtgatgaacaaggttacagaaacccaaacccccaaagaatttagacttaaacaagtggtcccagcttatccagtgaatcctttgcttattaccaattgatccccactagaagttagacataagtctatagaaatgtttacaaacagagacaagaatccgaaaacaggacatggcataagaaggaatggcctgcattacagatttgagaagaatctccttacc

SEQ ID NO: 237393 - DNA, 1496 bp, Cannabis indica
tagactcaaacccagatctagacacaaacctagatcggaacccaaaccaagactcagaccgggacttgaaccccgattggatcgtggactcgaaccgggatctaggactcgaacatggatggggtacctcgaccgaggacacaggcattagaactaggactgagacctaagccccaaagctggactaggatcctaacctaggacctggacaaggacctggggcttgaagtggaactagactgggacctgagactgtaatccagatttggacccagggcttggaactgaacagtagtaagtgtttggatctgggacccatacccgaactcaaacaaaaaccaagactcgggccctgacccaaacccaaacccgcaacctagacttaggtccgagtccgagactgtgtttgagtccaggaactggaatctgactaggacccaaacatagacccggaccaggatgcagacacaaatcaaaactcagatcgggactcgggacacgaacccgaacccgaacccagacacaaacttggacccataccccgagctaggacccagaccgggattggagactcagacctgggcccaggacccagacctagattggggacccaaactcaaaattagaaccagaatcgggacccaggatagggattgggacccaagaccttaccccggtctctgtcccaaaacttgaccaaaacaaggacacggaccgacacccaggatctgaatcggaatgagactgggacccaagattgggattcagatcttgacccacgactcggggcttggacccaacccgtagtcggtgtccacatcttggaatcataccaacacccgaaccttgaaccatttccataccaggacccaaaccctgaatcggactcgagacccgaaatcggaataagtactggaatcgggaccctggaccaggaattggacctggacccaaaacttgatctagacgagtaaccgaacacggacccgaacctagaccgggatctatacccagaccccaacccaaaccccagacttctgccaggacctgcgacccaaaaactcgaaacccaggaccggtgacctgggactttgactataacctagacccgtaacagaactcggagcgagacccaaacccagacccagacgaagacctgaacccattcatagactgaaacttggacccaaaaccagacccaaacccaaactcagacccagacccagaccaagacccaaacgtagacctaaacctagacctaagacccgtactaggacccacgacatgagctagaattggtccaagatctggatttggacccaggacccaggacccaagacctgaggcttggacccgacccatagtcggtgtctaaattagggaattggacctagacccagactagaaccagaacctgtaccagaacacaaactagacatgacatgtggttggtgttcagatttgggactaagactcggacctgaacccaaacacgg

SEQ ID NO: 237394 - DNA, 589 bp, Cannabis indica
aaaaaagtaaaaataaaataaatcgttactactgaattagcaaaccaaaacaggattttttttgttatcactctttttcttttttagatcgttttcggcactatatattaacggttaaattatataggtgtaatgtaattacggtagggccgtcggggggatgagttttggagttaaaactagagttgtactaagcaataataatctgcaaagacaagaaaacaaataataaaaaaagactagagttgagttgaggtggtttttttgagataagagaagtaggttaatgttggagtgcagttggaggcatatgtatatagttccaaatatgttgattagaaaatcaaagaaaagatatctaatgccaagtgttccgaccagtactgcgcttttgcagtaagagtacgtagtgaattatattagagtagaataaaatagaatatatttatggagaaggagggattggtttagcttggctgctggattgatcggaatctgctgcaactggccctgccgcagagtgtttccgttaattgcagatatcttgaacgtaatcaatgatgcatgttgaattatatttcttttgtaa

SEQ ID NO: 237395 - DNA, 680 bp, Cannabis indica
gcaaatagatctaagatcctggataaatataataccaacattatgtcccttctttgaatcaccgagcaactaacccaaagaaagggttttgcgcttggtcgggtgcccacactaagcaaggggcgatgctgcccttgcacccgtacttcaagagggttacaaattatttttgcctttgttcgacccagttcactctcaaaggcattaaatacgtgtctgccttgttcgtcctctacgccattcaaggatggggtgtgccgtccccacacaaggtcaactggctttttgacttgaagtctacccctaagcagagcaggtcggggtacttatacttctctcagccggattgcaagtagctaacgggcactgtagacaaggatgttagcaagattgggggttttgttgacaagtactacttcgtggaaggcatggataccacatatactcggtttcaacagacactactacaaaaagccccttttaagtccattaaagttttactagataagtatttggagtcccttttgtgttggacattatatctagggacataaaaagggtatttttctagtccaacataattggactagaaaaacatttctagtccaacattaatagacatgatatttgaacccacaataggaacccctttctaggccaactttgctggacattaatct

SEQ ID NO: 237396 - DNA, 1378 bp, Cannabis indica
aacagatcttaaaattcttctcaggtcattgcagtgacgtatcgagtgagggacacaattttccaccacacaaggggattttcctggaactaaaacgtagcacacatcgctcgatcaacctcgatgactcctataaaattcaaaattctttcaattactgtcaattattattcaacttcataacatcgagaccccctaaaaagatttgaggtacctgctttcgaaatcgttcgtataaaggctttatatggctaccagcaataagttactctactggaaacattggaaccataacagctggtgcttgcagaggaggcactacaggaggactctgttgtctaaacctctaaatttcatcttcttgttggctgattcgggcttgcatctctgcaaacctttgctccaaatcaagaggatcctgaggttaattcccttggccacccctttgagatcgaccgcgacctctgccgcgtccacgagggttttgggggttttgaccaccgcgacacctccggtctcaaccatttcaccctgacctcttatgtttcattgggcatccatattataggacttggcctacgaacccataaggcatgtaggttagacagtggtcagatacatccctagtaccacattttatgattttaggtaacacattaaaacatctaacatgcttcctttatgttttccaaattaaacaaattaataaacaagtaaaggcttactgaaccgtgaatcaagctcatctctggcaatgattgtacatatcttaacgatcttcaataaacaacatggtggttttgataccaaaaattgtaacgcccttctactagacacacaatagaaattttctcaaaaataatgaaaatttaaattttaacttttatcattatatatacatttttatagcatgtcacacagtgactaaaaaatttaaccccaaaatactttaagactgaactctccaagctaaattgccgcaacatttataatcattgccaagccctggactcactggttctccgctttagcctttcctttacatacagatggtaaacaacactagtgagtcaataaactcagtaagaaaaacatagaatctacaatgtaataccgacttgtacataggctcccatacgcctatttacaagacttatcagatgctcaagaacattcttaacagaagtacgacctctataccatatgcactaaagtaataattttgtactagtgttggtagggctaaatcgtactcctaggtaccactgagtgttgtaccacatgcactacgtactcatcccatactagtattggtaacactgtagcataccagcatgcaatttaaatacatacacacatacatatacatactttatgc

SEQ ID NO: 237397 - DNA, 1115 bp, Cannabis indica
ttattagttaattaagtatcggatctcatacagtttaatataatagcttttagggagtatcactagccaatcgcaaggtgacacgtctgaaaggtgctaggcaccactgatgcccaataacaatcctctaaaataaggtacttctacagtgcacgtatactgatgtactctcttcgtgtttttgacattcaaaatgttttaatcttagctatttttatagactatggactttgaaatattttaatttttacttttattcttgtgattcatgaatataaaatttgatgaacatgttgtttgttacttggattgatttttgtacttggtttaaaatttaaattaatgtttcttttcttcttttaattgaaagaataagttgttatattatagggtaaatactattttgaatcatgtatattgcaaaagttattaattgaactctcaaccaacttgcttgatgttcagtcctataattatgtatagaagataacaaaatcaattttagtaacaaatatagtataattttttcatggtgcttaaaaaagatttttttagattttttttaattatataaaataaaggaagttattagttgaatgtaactgaacttttaagaccgttaatacattgctttattaataagtgagtggggtcataatattttgtttgtggatgcaaatttcaaggatgcatttaatgtctggttaattaaagacaaattatgtcaatgttttacaactataatttgtatttaatttcaacaatggtctactctcaccttaaaatatctatattttcaacttttataataaaatttattgactaaatttgaacttataatattaaatatttatagtttcaaatccaagtatcagttcaatattattaaaatattaaattagaggtggtctcaaagcaagattcttaatagaaaaaatatttttaagagaggtcaacatatttttgaatttgtttgtaagagcatagagatacaaataaatgatgtaaaaataatatgtagcccgctttattaaaaaattatttcgatagtgtgtcaaattgtgatgcaaaatcttacaaaacaaaaagtgatttaaatttggatcacaatatag

SEQ ID NO: 237398 - DNA, 1304 bp, Cannabis indica
aaaacagatggagatatacaacttcctactattgcaatagtggcatctttcaatagaaacaaaaaagtataactgtatctaatttttgtttcagtagacagaaaatgatctcatattttttggattggtatgcatgaggagcacaacacacttttaatttctatgcagggtgatattctatttttaagtatgagcaaggaactcatttgcacaaatcagcttcctctgttttctattattgttttccacttaaaatgtcagcttcctttgtatacaagtaaacctttcattatcgagatatgactgctctcctttaaactatgaaaatcagctttaataaatcttaattacttagatgtacttcattccattgaaccaacaagatattttgtgaaaatttatagttaataacatgaggttagttacctcttcattccgctatattatatactttactttgtgcttgtcctttctttatatgattttttagcagaaatcttgacaagaaattaattgataattaagtaattttttagctccactatgtctatgtatttgtgtttcttgaagtataactactatttcttgccttgttcatagtatgagttacattatttattaattataattattcataaggaaaagtgcatcacatatggtcgatggagtggatggaaagctttggattagagatcacgaatgacacatttataatatacatagattcacttaaagcccaaattttcttattaatttatctatgtatttacacattattttgtttataattttataacttcactgttattgtttttaatgtatttcactaacaattaattttattttaaattttacaaaatatattacctaaaatatactaaattaatgggacgtaaaataaaatattattaaaataaaactaaatataaatgccttgacacgtaacactcatttaaccgttaatttatattgatttatagtttaattatattttttattttgtatatctattgtctaatatgaaaacaggtgaataaatgactacaatatatacaacaattaagaatattattccaactacagaaagttggaagattaaaaatgagtgttagaaaaaatctggaaagtggacatctactgtacttaatatgttattgaaattaagttaaaataaataataaaaaaataactaacaatcttattatgcattttacagtgctatagcatatgttgaacttgatgacaatacaaacagcctatctgctgtcatgttcacatatcttgtggaaaaaatattttcgtgt

SEQ ID NO: 237399 - DNA, 2274 bp, Cannabis indica
tacatcccttttataggggtgcattgtaaaatcaccctataatatatatatatatatatatatatatattcatacttcttttctcatttaccatacatatatattattaactacatacattttattattatatatatatatttatatatatgacagctgagagatacaagttttaaattttcttattgtagaatagagaaagttattataatttgttaattctctggctttttgggaagatgtaattggttgattgatcagaatttgaacattatcaaaaaattataatttatttttcaaattgggaaaaagaaaaaagaaaaagaaatatatacattattgctatatatcttttgttggatgttccaaaaaaaaaattaatactacatatattcataattatctttttctaagctgtaaatgagtcaaaattggaacataatttatcataaactaataagctatcttttcttcaaattgagaaaaaagaaaatatattgttatatctattgttggaaaaaaacactaaaattttacatatatacactaattcataattctatttttcaataaatatatggtttttcaatgtttttctcatctgtcaatgaatcaaaattggaacattattaaaaaaagaaagattacattatgaaaaatgaattaattatttctctttaatacgtagataaatgtatacattcaatataaaaaagtatattttatgactatatatgatactttccttgaattaatccaatttcaatccttacaaatacatttcattgtagtaaaattcactaaataaaatttttccatatatgtatgtatgtatatgtatacatttaacataataaaaacatattatataaatatatgttatgaccagatacattttattatctatatatatatataaatattttgttagttaattgatagtgtatatggctatggagaagcttgtttcaagttggtctaatgagaaaattacattgccggaatcatacataatcccgccggaaacaaggcccggagaccaatcttttccggtaacaagctcgattccggtgattgatcttcatgaaaatattaatcaacatgataccattgttcacaacatcatcaaagcttctcaagactatggaatttttcaggtggtgtaataatataatgttacattaattttctttaatataatataatgttacattatattatagtatactatgttttgtaacattaatatttgatgtaaataataatgtatgatgtaggtgattaatcatggtgtttgtgaagagttaatggatgagacaatgaaagttatgaaagagttacatgagatgtcacctattgacaaagcaagagaatgttgtaaggaccctttgaagagatgtagactttacacaagtagtaacaatttctcaaatgaaaaaattcactattggagagatgcctttcttcatccttgtcaccctcttgaggaacacatacaattttggccacaaaatccaatccaatataggtacgtatatcaatgttgactctgagatatattgggcttaagaattttattttattgtgaccttatttaaaatgtatgtggtatttttaaaaatttgtaaaaaaatatgtgtattttcaaaaaaaaaaaatattttttttaagatcctgggttaggtgggcccctaagcataaacttagggggttattttacaaatacacaaaaacaacaaaagaattacaaaaatacgatttcatggaattttaaacatttttacgatttttttgattttatttacagattatacggttttttaatgttgtactcttagtaatttattgttgattttttgttatttgtatgttattttttgttgttattttgatgttattttcatgttacttttatgtagttttcttgttgttttcatgttgcttttatagaaaaccgtaaaaaatgtaaaaaaaattcgttaaacttaaaaatttaatttttttacaaaaaatagtactttatgttattatttttaaacttaatccgccttattctagagtcgatccgttaaaaatttgaaataatttaataaagaggaaattacactctataccctttttatattgtccttttttatttttaccctcttttttaaagtctatcatttttagctctttttctaaatgttgtaccaattttgcccatgtcacttcaagatactctccatgtgactttcttatgtcagggtattttgggtacaatacatataaaaa

SEQ ID NO: 237400 - DNA, 916 bp, Cannabis indica
ttggttttgagtgggtaaatccaagtgtgtctactataatcatctacaaagtgaatgtagaatttatagttgtaactagaagtaataggggcaggcccccaaacatctgtatgtattaaatctaatatatgttgggcacgattaggattgacattaaaaggcaaggcatgggatttaccaaactgacatgcttcacaaaagttgctcttttcattcatattgatttttacatcagcaaggtttaaaacctggtttaagacacgattagatgggtgaccaagacgcttgtgccacctatcttttagggaaacaaaactagaactaacacatttgttgctggaaacagtaagtacaccagtaaatggtttgacagaactcgacttaggtactagacttgattggttggaaaaaccttcttgatgatttgtaagttggtataggccatctttaagagtcccttgcagcagcaccctccttgactccagatccttcacaaaacaattttgagcaaagaattcaacaaacacattattatcatgtgtgagtttagaaatactaagtaggttcttagtgatgttaggcacatgtaaaacattgctcaaaattatggagttgttatcaaatgagggtattagacttttaccaacatgggcaatttcaagtttattgccattaccaacagtcaatgtctcctcaccattgtaatcggtcttgtgagtgagattgtttgggtcggctgtgacatggttgcttgctcctgagtcgacataccaggcagtgtcctccaccatttcaggggtagctataaatgcagaagcaccgttgctattgttctggtttgtcctcctttgtttccactgctggatccatttggatctgaacccatatatgtttcatcgtagcgattataacagtg

SEQ ID NO: 237401 - DNA, 1162 bp, Cannabis indica
agtattttattgtctttatcttaaatggttttaaaaggactagtaagtgtgacgtcttgggaaatcggggcgttacaaatggaaccacagacttcgttcggggtacgacatccatcaaatttggataaaggtagttgctatgaaagctttagtttagagtgttaacaaaattaatcaagagtggtttaaaaagctatattttgtgttgtttttgccaataaaatgtaagttgtgtaaaataatgtactgtttgggatgttaccagtgtaacttatagaatagagtgctttagtaaaacatcatgctaacatttattcaaccttaagaaattttggtcttctcatatcagttggcttattagagatttaagggttctaacttgtattttcatttattataatattgttgattagatattttataaataacttcttctagtgctccaagcaatctttgaaaagcttgagtgttggaagaacactttgtcttgaacacttcaaggtgttctttggttgagagtatagaaaacaaaggaatgtcaaatagaatttaatgtgtttttttaaaaaaaaaaataaatgtcaaaaagaaaatacaatatatatatatatatatatatatatatttgtatgaggcattacaatgagttttgggaggaaaagacttttatttagaaaagaaacggtgcctggtggtgttaggtatagtttattgggtttacacgctaactgtcaaggagaaccagctgtcaaagtagttagttaattctgttaatgattagttaggactataatagattttttggttgttattatagtcggttgtgattgttatataaagctgtgtattgtactattcaattcaatcaatgaataacagattgtattttccaattactcctcttctttttctcttgattgcatcttctcatgactgcatcttcacatggtatcagagcttgatttcgttcatcaatagagatccctacctcgtctaatggtgtagcatcaagactgaacaatactcaggcacagaacaatcagcatatgcctttactgaaatcgtatcctatttctttcagccattctctgcctatcaagcttgacgaacacaactttctaccatggaagcatcaggtcctggcattgatcaaaggcagcag

SEQ ID NO: 237402 - DNA, 1440 bp, Cannabis indica
gcagaatcaaggtattttggcttcacaatatagttgcaaccgaacctttcatggtcacgacaagatgctctgtacgccaaatttgggcaattttgtaatttgtccattcggaagtgtaaaattgatttctattaaagagttttaaatttttatgccaattatttagaaagagaaccctagaaacaaagaaggagattgaggaagcgagcgtggcaatccagatcaagttcaccatctagttctttcttctccctttttaaattttttatgttaatttttgtttccactttgaacatggatttgagtttagaagatatgaactaattatccaatttagggatatgatgaatgttgattgatgttattccaatttattaatgtgatttgttagtttctttttggatcattgtgatttattcttatttgtgttaatacatgttttagattggccacgttaaacatgattcatggtcctaatataaaatctgagaagtgaatattaggaattctctaatagaacaaacataggttttgatgtgaaacgagagtattcatatagcttatgtgacccttagattatttcttaatacaaatcatatgttaatttattttagagatgcagtagataatatatgatttatgaccttaataatttgagaagagttaggattatttttacaatctatcatcacttaaagaaataaaataataaattgcattaataattgggtaactaaaataacaggattcatattcttaatctcccatccatatttttttttgaaatggtctcccatccatatttgaacaacgttaaaagctggatttagattttttttgaaaagtttaaagattttcctttcaaaaattatcttgatttaccaaatagaaatataaatctagtttagtattattcaattttaattctctgtggttcgacctcacctatgtgagtactacttgatacgtacacttgcgtagtttacaattttgcgtaacacctctcttagtttggctagctcagaatcacccccaggtccacatggggctcgttaacactaggttggccaactttatgcctggtttttccagcatatacctaggggctgctcttgttaaaggagccctgtggtactttggacaagttatctaacattggccgaaacctgctcgatatttattgggcctttagatcgggaccctgcagatgggtttgcccgaggtggccagacaggattgaccgggttcttaatggtggatggaactcaaaattggggtccacaaccatcggatcttggggttcagtggactccttattagaactatggtgattattaggtgaaaaaaggttgagatcttcgtgagattttgaacctctcaatgaaagcacaaaaatattaagtgaaaaatttgccaactgagtcgaagtctaaataacgc

SEQ ID NO: 237403 - DNA, 797 bp, Cannabis indica
aaatcctactcgattaaactgcccacactaaaccaaataaagcaacaaaaacacaatctaaataacccaacaaaaaattcaaatcgctcaatgaatatattggatgtgttgaatattattattaacccgcctaaataatccgaataaattgagtaacatattttactaaaaaattatgatatgttacataaattatgtttaatagttaaactatttcacatttaaagttttaactttgtagtgtttaattaaaaatttagactttatagttgataatgttaattgtatttgaattttgaagttgacatttagattcttacatcaatatatatatatatatatatattctatttttgaaataatattatttaatactttattgtttaattaatttatatttgtcttatatttaaatttttaacatcaatttaagctataattaatgcatttaatcttgaaatatatatactatatatttattttttctaaatctatttatttgaaaactaaaaactaacaataataaaaaaaaaacactaaagattagtttggacgagttaactcgaccaaaccgacaaaatcattgaacgggttaaactttttttattttataatttggcgggttacaattagatatttacaacctaaaatttatattggattggtaaaatatactacaacccgaccaaaccgactgatgtacacccctacttccatagacagtgaacctgtatcaaatgagaatgtctagattaaggtagagcaagttgctcttacaacaccagctaatgatgttc

SEQ ID NO: 237404 - DNA, 1553 bp, Cannabis indica
aatagtacataataaaaatattacaaacttaaacatacatttaaattaaaattaaatacaccaaacacattaaacggaaaagtaataacacatatatgaaaccttcaaagtaaaatgagatgcaacaattcaataatgtggaagactatttcttgatccaccgagatagtcataatacgggactataaacttgtgagtcattttcagctctttcaccttgatcttgagatcgttgatcttcatgatcttcaacgccatgtcccaaatattgagatgctcgatattgtggcccctcatattatgatcccattatttagatccctgattttgagattcctcagattgagatccttctctttgttctccaatttcggatgtttgtgtcatttctttgtaaattcgtctttttttgctttgaatgtacttataaaactctggattggatatagaattcaaatccgtgaataatttttttttcatcagccttttgttactcttttcaataactttaatgaattctctattttgttccattagtttgttgaattggtcattacctaattgttttcctttacttttttcacaccacatggtctttctgttggataagtattcatttcctcattattcatgtttagatcaaatgaattcataccagtggatgccgatgtaggagactcaaaattgtgagacgatgatttggatgaagtgaaactaggaccttcgtgttggaatctacgtggtgcattgatgttttcatcatttgaaaaacttttgaatacctttgagggtgtgccacacatgatcaaatttaaagcatttatcgtacttttttatcttaggcttatcacatcttcgcttgaataactgttgcaatataaattaagtaataacgtcaataaaaatagaaaaataagatactaataataaataaattataataacaaacacttacactgtcttctgctaaagcaccacttagatttttattttcaatttggttgatacatccccttaattttgcaacttcactattcaaagtagatatttgagtttgcaaagatcttactggtcgaggtttattactaaattttccatctttgtggtactctgattgaactcttgcccaaaaattattacctgattggtttcttcctacgattggatcttgagaaatgtcaacatagacatgacacaagtgcacatcttcctctactgagtaagaagaaccgcgaatggaagacatttttgaagaaaatatagctatttaggaaatatgttgaagagatgtgatcaaattgaatgagaagtgtgagattatataggaaaggaaaatacattgcaacggttgagatcgtggtgaaataatttcagcggccaagattaaactcgagagatttcttgtcttttaattttggaatcagaagataaggatgtgatgtgacaacacactgcaacggttgagatcgtggtcaaataatttcagcggccaagattaaatcactagatttcttatcttttaattttggaatcagaagataaggatgtgatgt

SEQ ID NO: 237405 - DNA, 1626 bp, Cannabis indica
gaacatgtccctgtaagggttgcttgtttgttgtgttataatagtgttgaaacaatttttcatgtcttggtgcgctgctcctttgctcagtcttgttggtcacgacccatagtggatgtgggtagttggtatgaattagaattgggttggtatgttgcaagaggcatggaatcaaaaatcatctaatgcttcttctatggtataataagttagagtatcacttgatcaatatttaaatgacttaacaaaaaaaaaatgtgattcttattattgctttgaatgatgataaagttattgagcaacggactacatcagctattaatcagatcaaaattaatgttggcagtgcagtttttgagcaggttggatggtttggtatggaatgtgtagttcgggatagtgatgggaggttgttggaggtatttaataggggcaaagtgagtcgtattccattagaagtgccatggattattcgtatcaaagagcctctcaattagattgatgatcatcattgggacaatgtggttgtagatacagaaatttagtttgtgtacaagtgattatgagtgccttcacaatttggtttggttgtttctgataggaaaactattctaaactaattaaattatgtttcttaatgttttgttaatcaatctgctaacaaggtcatacattgtattgcgcatactttttatttttctctcagtcgtattatctagaagattcttttgtctcttgagttagttgccatttttatggcaggtttttaagtttaaatgaaaattggtatttttattaaatatatatatattaataaaaactaatttaaaaaaggattttttttcaatttttaactaaaaaaataacaatatactacaaaaaaaactttcagtcggtcaaataaataaatatacaacccaataaagaaaaaattacacaaatacttcttacacacactttcagcctacacgatccacatttcctaggatcgaaaccatcctgtgatgcaatgaggtgaacaacgatgaaaaaacttcgacaggcgagaaaacaccattaattgtgcgcgacgtcacctaagaagagaacaaactcacgaacacaaccttcgattgaccaacctagtaacctaacacaaccgaaacgagacccaaccagaaagagaaccaccattaattctggtgacttcacctgagaatacaaccgaaatcaatcaaaacaggggttattttgaatttatagaaaaaaaaagtacaaaaaaactactacgaaactaaaattcaactagaaatctggtttaattcgcataaaactaatgtcttgacttcaattttcaaatccataaaatgcatatctcaaaaagttaaactagaattcctaaacaatccaacttaagtataatccaaaaaaaaaaattgaatcaattctatagttaaatgtttatcctggtctattttcgttgttttttagatttctaatggtgaatttgttcatattaaatcacaaatagacatgtagatagagttacgtacgtggaaatactattctgatttttaatgtttcacaacagttgcattacaattgcataaacattttgctaactgttgtttctccacatattactat

SEQ ID NO: 237406 - DNA, 1332 bp, Cannabis indica
ttactgtgtttttttataagtttcatactgcagtatactgtgttaaattttcactggtgttctactggtgttttgtagttgttctactgttgttttgagttaatctgctttgtgttttattggtgttttataaaaacacagtatttttgaaaaaaattccgcgtgacagtatttttgtaaaagttaacccaaattacagtatttttgtaaatttccctattatataattatacatttttttagatttagagtataaaattttgtagattagtgggccctctcaatatattctgattttaaaagggaatttacacccatatcatttttttctatttttttttttcaattttactgttgtaaggaaaatattatttttttattgtgttttttaaaacggggaaatttttttttttttgtacaacatgcttgtccacattatatctttatatattaaaagtgtctatctaacggcattttttaaataaaaaaagattttgttaaatttaacggatgattaacacttctaatcttatacgaccatccttctctaacaatccttcttgaaccttaccaatagtttcaaaagccctaacctaaccaggatctctcactcccactcccactcccaatcgattgttgccgctgtcttctttctctggaatgtcggtgataccacggcgcttgtttgcttcgagaatcaggttgaagctttggagagcaaacatataatttttggaaaacatcatttacccattttttttaaagataaaatttgccgcctttataatatgtatgtatgtatatatatatatgagagagctctcttttagaaatttcagaacttccgattgctttcagtttcaggtggttgaagaactcttcacttcgctttcagccgtcggagaaaggcccaactccactcggtgctggtgagattctttactgttagtctacatgggtgtacgaacgtatcaatttgataattgattctttttttttcgaatctatggggattttgctttcaatctgtactcatctaaagttttccacccgattagtagctagttctttggatttctactaacttttttctttctttaatttgatttctttcagttttaggtcgctgttcgcttcgctttcagtcgtcggagaaaggctcgacttcactcggttggtgagattctttgctgttagtctacatgggtgtacgaacgtatcaatttgataattgattttttttttctgaatctctgggcattttactttcaatctgtactcatctaaagctttcacccgattagtagtccagttctttggatttctactaac

SEQ ID NO: 237407 - DNA, 1076 bp, Cannabis indica
aagaacacagacatagcaaaacttggcaaagcttgtgctacagtttttaatagaacttcacgcccggcgatagacaagaaacgaccctcccagttttgagtgcggttctgcatcttgtcttttaaaaaccccaagatggcatccttatttcttcccatgacacaagaaagaccaagataagcactatgttcatctgtaagtctcattctaagaatctcacacaatcggtctcaagtagcagtaggcacattattactgaacaatacagaggacttactgaaattaacctattgaccagaagcgatctcaaatagctgaagcagatataatatattcgaaacctctctatcagttgtgcgacaatagacataactataatcggcaaaaagcatatgagatataaccgaagcaccagcaaccaccttgcaacctttaagcctcccatccggctcaaacttccgtatcaaagatgagaagccctcagcacaaataagaaataaataaggtgataaactccaaatcgacattgtttatattttataagaagaaaatatcttataataattaagaccaaattcaatagatatgtactaagttgttaggtcaaacaactacttccttattaattatatatgcaagctaatttggtcggccatttatataaatatttcacctatagatacactatgcatatatatatgggtgtatacatatttagtatcatgtgttctatctaaataccatgtgtttaatactatgtgttttctaaagaaaatttagtagctcatgtgattggtaaagctgctatttcttatcctgattgtattttcagtaaggaggatgtcccaactgatttgcttccatgtttggttgctgaatttgaaagtttataaagtttgattactttcttcaaaaaaaaaaatactatgtgttttcaattatacatatctggtatcctaaacttaaatttgtttgataaaattgtatcaatacaatcaaactgtttttaattttataaattttgaatttaagtttaattatttaattacatataaatgagaatcgtttgatcaaat

SEQ ID NO: 237408 - DNA, 1142 bp, Cannabis indica
atgtgtatcagcttcgcattttattattaagacaccaaaatcaaacatccacttctatacttttattaccaattttggtacgtatgataaatattaattaatattgtatttctagctaggattaaaagttggcatgcatgtacacaaacacaacactcttatatatatgtataacatgcatgcagataaatagctcttcatatattatatgtataaattatgtatataatatatggagagctatttatcggcatgcatgtatgtatgtaagtataatatatataccacatgtttgctggtccttgatgggagtgacagcacctttctccctccaatcaatgctagaaggaatggaagaatgagtaacattttcatacttgaacaacatggatgatgttggccgtgatgatgatgatgaagtactactggctgccgttgatctgtatccattacgaagagccctaaactcatggttagccatgtccccaaacttgttcatacttattttgaaagagtactttttctcatgtttattgaaggactcaataaacttgacattttctttaaagatgttgaaacgaatctccttctcttgggcactcttgtacacctttccatgtctcaccatccactcttcatgcctcttcgacaaggctttgatcccatcttcctctatattattattgttactattatggagttctcggcaatatgacacttgagaaccacaaactgccatgaaaattataatgaataataaggctgaagccatatggttatagctacgtacgtacgtactaaatttaattaattaattatgggaaaaaattacttgaacagtatttgtgcttgtgatgtgttaactatatgagtattatatatagggaaattattacattattctttttttcttacttgagaaactgcacaaaatgaggaagaatattataaggggttgaaataggaaactgagaaacaaaactgaaaacttgtgggcttaatttagcctcatgaatagaatctacaatagatcatagatctttttgacttggcccagtcaagcacagttatcatatcatagcatgtataatacttattatcttttaaccaaaataaaataaaaacaattaagtaaaaattaa

SEQ ID NO: 237409 - DNA, 1497 bp, Cannabis indica
tgatggccttgtcatccgtgctgctcaaccaattgaagcctggctaagagaagtagaagtaccccgaccagccttgcttgaaggtagacttcaggtcgaagaaccaggcgacctcgtgggggcgaggagcatcccatccttgggaagcatagaggacgaagatagcagacaaatacttaatgccctttggagtaatttgtgccgggcagaggccaaagaagtctgcgacatccctaaagtacttgtgcaagggcatcaacgccctttgctggccgtgagcccccgaccaggcgcacattcccttatcaggatttgtggcgcgattttcgtgggtgggaatgtagcagtccagctcgcccaggtacccgtcctggtccacagttcggaggcgtccctccaaaatctttgacggaggacttacccacctggcgcccaaggaaccctgcctcctatgaggaaccgccttagcaagctcctcactgacgtagtccacaccctcaaccaggacgtctccgtcagcatcgactggctgcccagcctcattgtcctccccgaagttagagggttcaacctcttcctctccctccgcctcggaaggactgctcggacgcacctcgtccaactcctcaacctcctggacctcagtgtccccctcacggtcctcttccatccggactgccgaaccctgttcagcgtcgggcagagtggcaagccgagccacttgaggatcagaagcgtcggccagacgcgtagttttctttgtacgagccatcatcttatggatgggtacaaggtcaaaagagtttccttcgttagaaggaggaccagcacgaagacgaggatgaacctcgtgcagaagttgaagcaaatcctggtcgatctgatgcccgagttcccacaactcacctgggttcatctacaaaagacaacacacaagatgagtgttggacggagtatcaaacgaaaaacaagtaaatatgccgaccaggagtactcaacagaataaaagaacgactatgtttaaagaaaagtcaaaactcaagaagtcagaaagttttcttgagttagggcaaaaaagttcatgaagcttagaataagcaagatggaagatagacacaatgcggttcaaaaataagctctacggctgaaagcccacatgaagacatggtaaagaagagtcgcagaagtttctaaccctagggtttcctaagcattctttctacagcatagttgcattcaaaatgtaaacatgcaaagaaaagcataaaggaaatcagaaacttacccaaagattcgaatgtctgagttcaagcaacgtcaagcaaaccaccaatcgtctgaaggcacttcggcaactttgaagccagaaaactctctcttttcgctctggagtttacttaacaacgaaggtgataaaatgggttatgtgccagtacgatgactatttataggaaaaaaggtaactgtatccaaaggaacctcagacgcctcgacttc

SEQ ID NO: 237410 - DNA, 569 bp, Cannabis indica
gtgcttccaaaatgcacgcgagtcgagccactcacgacttagttccgtttaatggtgattgtggcatttattgcattgagtatgtggagcatctcatgatgcaacgtggattagctgatgtcacacaaggccggatgaagttgtttcgtgaacggtggtgtgttgatttttttaccagaatgtcggctgattatatgtgtaattatggtgacattgtatgttttttgtaattaaaaatacagttatatattttttgggtatttagtcttgtaaagtctaacggtgtcactttcttcttagtagatttaacatacttattcttagtcttgtaaaaatatttaacattgtctttgattcataacaaaaaattatcaacctcaaccttattttaaagcagttttgaataacaaatacataacatgttattagaattaataagtatactacgccttaaatgcgagctttgcatgttgctctgttgtggcctgaactgccacagtggctacagttttgaggtacagatccttttttatcaccagacaggaaacggttctcccgtcttcttccag

SEQ ID NO: 237411 - DNA, 1059 bp, Cannabis indica
ctagctctcatgcccgtgtcccgagtccaagtctgagtcttaggtctcgatctgagtccaggacctagtcggggttcaagtcttggtccgagttcgggttcgggatccgatcttggtctgggtctagatctgggtttgagtctatgtccaggttcgggtccaagtctcgagttttgatttccgatcagggtctgggttctaaggcccatgtctaagtccccaatccaggtccgggtcctaggtcccgatttgggtccatgttcaggtttagctcctagtgccaatttgtatttcgattcagtgtctgggttcgggttatggtccaggtctgtgttttggtggaagtcctggtctgagtctgggtccgggtttgggtccaggttcggatcttggtctgggtctgcgtttaggtcaaggtttgagttcggatgccgagtgtgggtccaagtctgggtctgggtcacggtctcggtccagatctaggtcccgagttttgatcccgatgtgggtctgagtctgggttcgagtccaggttcgtatctagatccctatctaggtccgcgtgtgggtcttggatcaggtcctaggtctaggtctgggtccaggtttgggtctgggtattggtcccggtttatgtatatgaccgtgcatgggccagagttccggtctcgatttgggtctgggctaggtccgagtttggttcaaggtctaggtttgggtcctaatcacggtcctagtcttgttcgagtatcctcatttggaagttcttgttcaggttccaatttaaagtcccgggtctgggttagggtccgagttttggtcctagtctgggttcgggtcctggtttgagtcccagatctagatccctatcacgtgtctcggtcaaattctggttcttgggtcccatgtctaagtttgggttcgggaccgtgactagggtgcacttccaggtctcgaccccaattctgtgtcccgagtctggttccatgtttgggtctgagtttgggtcaaggttcggcaccaagtctaggtctttattaggattcaggtctgggtccc

SEQ ID NO: 237412 - DNA, 1066 bp, Cannabis indica
acctacaagacgttgggttagtccgttaacttccattccaaaataatatttatataatgaccgtaaggtctaaccagttctatctatcagagacgttttccttaaaaaaaaataaaaaaaaaaaaaaaaaaaaaaaaaaaaacaaacatacataggattggatgtgttgctaggtacaagggagtactaattgttcagttataaaaatctaataattcttactcctttttttaaaaaagaaaaaaatctaataattatatattttattgggtatttttattgagaattttgtgtacacataatttgttttctaccacatatgggtcgatacttatactattgttatacatacatatgtataaaatattgctattaggcaccataggcacattcttgagatgttgcgttacgattgactagcaatactctctaaaaggtattatattaaattatatgggacccaatatttagttggactaatagcgatatggacatataggagggtgctaggcagcactggtgccctttagcatttttctatatttatatatatatatatatatttatatacaaattttatatatttacataatatgaactcaatttgttaagtgtttcattagttagctaaaccacaaagccaatcttgtaataggatggattttaggagaaagaaaattattgaatactttatttagaaaataatgtcataatttaaaatagttaattttacgtttttttttttttgttccctagactcaaaccatcagtttaattgagaaggctcatgtaagacaaattgttaaaaagtgaattaattgggacaaacgataaaatacaacaagttgctcccagttgtctctagcaattttggctcagtttcttatggcagtgaaagttaccgaggttgttataggtagctacatacttctttctattcttattgttgctgattattatatattttaatctaattcacttttattaattgattcattagttagttttaggaaggttggtccaagattggtctgcctttgactgtaattgattaagaggtaataag

SEQ ID NO: 237413 - DNA, 1115 bp, Cannabis indica
aagtcaataaaaattaaaaagatgaattaaaaatatcaaattccaccaacaacactatatatatgactttgaaactaacaattaagtatatacttttatattattatatatttaatcatttatgttatatataataaaaactaaaaaagtaaaaaaataaaaaaataaaagccaaagtcgggttggtcgggttattctatttaattgggtaggttggacctattttcaaccagcctaattaacagattgggcggtttgcaattttttcgggttatttcagtttataatttttatcggttttttcggttcggtttgggtgggttattcggtttgggcggtttacaatttttttgtacaaccctaccaacaacaaggtcgtgtggagagaaagcataaacatgttattgacatgggcctaaccttgttggctcaagctaaaatgcctcttagcttctagtgggaagcctatgcttctgcagcctacttaattaacaggcttcctacccttatacttcaaaatgtgtcaccttttgagaagctttacaaacaaaaacttgactataattatcacaaagtctttggatgttcttgttttcctttcctaactccttataatactcacaaatttgccttcaggtctagtaaatatctgttcttaggctataacaacactcaaaaaggatacaggtgccttcatcctagtggaagagtctatgttgctcgaagtgtcacattcaatgagtctaagttcccttacaatgacctattctctaccccaacacaatcttaacctgtccctaatattgtccatactcatagttttcctattccacggaataactatgtcccacatactaccaatcgaagtagcactcccaccaactctcaatcttctcaagattccaatgaatctgttcagattcctcaatctccacacatcaattactcttccaacaatagtcttcacactactcagtcaagctcgagtcactcaccatccacagattcctccctaccctgtcctctacaacaagagtcttctcaatctacacaatttgtgtcaactcaacccccacttgccccagagtcaacaatcattctatggtcacaaggtc

SEQ ID NO: 237414 - DNA, 1414 bp, Cannabis indica
gcataaaacccaacaattattacctgccaaattggctgcagcagaaggaatggtagcatcagcacggggttgttgagtgagttgctggcttagaagagatatctgctgctggcattgagtagataaatcgattgggacagagaaaccaacagcttcatcagtggaagtgctgctgtaattttccttggcttttcctttttcttgtttctttttatccccatagcctggtggaaaaccatggaggaaaaaacatttgccaacaaaatgaccttgttttccatagtgagagcatgaaggacgaggcttcttggctcgtggaggataagtagatggtggatgagcggcaacaaccaggggaggtgcttctgaagatccaagagtcctttgacgctcttcttgaatgatcatggcaaaaacccttgaaagatttgggataggttcattcaacaagatttgtgcccatacagatgagtaagactcattcaatccagtcaagaactgaaggacttggttctgattgtagtaatcaggaaagattatcatggcaccacgggtgcaagttttgtttggttgaaattctttcaactcatcccaaaggtatttcagcttagtgaaataagcagatacagattgctcaccctgttgtaaccgagtgagttgtgattgtagttggaagattctagggccatttccctcattgaacctctcatccaagtcgagccacatatcagtggcaatatcaaaatacattatactatgagcaatcttagtagaaatggaattaacaagccatgacatgaccatattattgccacaaagccaagaattgagagagggattaccagtaggaggacgaggtaaagatccatctatgaatgcaatcttgttcttggtagtgagggcgatcgtaattccacgtttccatgattgatagtttgttctgttgagaacattagagacgagaaccaatccaggatgatcgcccggactaagaaataaacggactccagaggtcattagtaatggatcgatcaatcgatcgttgaggaggaatgacagtgttgtcgaaaacattaatgggagaacccagatctggaacattggatgtgttctgaggtgggtgcctagtgttggactcttgacgaggatcagctgttgaagacatgttttgatcaagaaccgtctcagggctgatagcagcgacaggaggttcagttgtggacggaggaacgccgttgttaaatcttgtggacggaggagcgccgtcttgggatcatgtggaaggtcttgccatggaagctgtgggcaagataacttctgattgttggattttgtgtcctaaataaaactcatttcaatataatcagatttacttaataataaagatcagaaataacatttttatgttgcatgg

SEQ ID NO: 237415 - DNA, 2073 bp, Cannabis indica
aaagttctgttgattcaattctctcttcctctctttctttctttcttcataactctgtttcaagctcactcgtatcacaactagcaagctcttcttcctgattttggatatggtttgttgttgatgtgtaatggcacgaggtggaggaaatcaagcacgaggaggagttcatactcatgctaatcgtgaatctgaaaacaattctaatgactcgaacatgttctctgttcttggagaaaattctcgatcgactaatgctaatgatctgtcgaatccatactttcttttcaatggcgacaatccaggtattgttcttgttcctagaattctcaaaggcagtgaaaattacagtaccaagagaagagctatgctaattgctctggttgctcgaaacaagattaaatttgtcaatggaaagcttcctcaacctgatgaggatcgtgaagactatgatagctggtttagatgaaataacactgtcatttcttggatacttcatgctatctctgatgaaattgcagatatagaaaaatcacacttggattgttgtctccctacctgctgatcaagatgtcattggctgcaaataggtctataagatcaaaattaatactgatgggagcaaagaccttatgcattacaagtgttagaagaccttggatattcaggaagtaagcctatgaatacaccaatggaagccaatctcaaacttggccaagatgaaaaagagaagttggctgatccaacattgtatagaaatattgttgggaaacttcagtacctaacagtcactagaccagacatttcttacttcgtgaacaaactgagttagtttttatccacacctcgagtcacacatatgcatgtagctcaaagggttctacaacatgttaaaagctaccctggacaaggaatcttctttgctgcaaacacagaagttaaattacatgcctacactgactcatattgggcagtatgcccaaatacaaggagatcaactactggtttctgtatcattgttggatcatctatcatcgcttggaaaagtaagaagcaacacaccatttcaaggtcttctgcagaagcaaaatatagagcaatggctaatactacttgtgaagtggtttggcttctctcagttttgaaaaaattgaaggttgaacatgtagggcctactctataatactgtgataacaaatttgcctagcatatagcaaccgatccagtgttccacgagagaacaaaacacatagaaatcgaatgtcatttggtcaggaaaaaggttcaacaaggtatcattaagacagttcatgtttccacaaaagaccaaattgctaatatcctaattaaacctctctttcctaatcaattcaacattttcaaagaaaattgggattgaaagacatttacagtctatctccatcttgagggggagtattaaacttgattagtgaattgattagttagctatgttgttggttgtcggttagttagttagtgtgtttgtttctcttgtaatctcagctggtatataagatgttgaacactttgtatcattttagttttgatgaataaaaattgtattgatttaattctctcttcctctctttctttattactctttttcaatctcactcgagctaatactaagtaaatatgtgatcactaaaagggtagtaaaagtacaataagagaatcatatagtttaatggaataagaaaaagaacaaaaagcaaattcacttttataatctaagaatgctttccttgaataatgaaacaataaaactaacatagagccaaataacactaacaaaccaatgctactaatagcttttacgacattgacaaagagtaagaaatatggaattatggtataaaaagaattctcctgtttacacaacatatagatgttggttgaattcataaattcacacattttgttttgaagcttgaaattccgtattttatattcccagtttaattatttaattaagtgattaatcaaatgcggaataatgaaactggtactgaaaacagtttttccgtagttacagaatacaactctgtaact

SEQ ID NO: 237416 - DNA, 3119 bp, Cannabis indica
gttgataaagactgttacacatacaattacactaaaattataagcgttacaattgtaaaaatttttaatctgtctctaaatttgggtgaattgattaataaaatgttgtataaatataggtatggccaccaagaaacttgaagaagttcgagacactttcataccttccacctttgactactgagcaattgttaaaggaaattgaataccttctcaagaacaactggattccctgtttggaatttgaagttggtgtaagtatctaattaattatattattaattacgtgaattaattaataataattataataataaatgtattattgtatatatatatataggaggctttcgtgtaccgtgagcacaacaggtccccagggtactacgatggacgttactggacaatgtggaagttgcctatgtatggttgcacagacgcaacacaagtgcttaaagaggttgaggaagccagtaaggagtacccagatgcacacgttcgtatcattggattcgacaacgttcgccaagttcagtgcatcagtttcattgcttacaagcccccacaataattaacttaattaattgagttaattcttaattaattatggaaccatatatccatccacattccgttactttcatttcaatttgtttttgtttcggtttgttttgttatcaaaagacttgtattaatgcatgtttgtgttaattaagttcttcattatctttatacttaatatctttttttctttttttgtattatcaatgtgaatgaattattttatataataatgagaataatgttggagttcaaatttgtaattcgttgtttaataaatatattggtaacgagcagggccgtcttaaatattttggaagttctgttttaattttaaaaattgagcctctataaaaaatatacaatttataaataatatttttaaataatatcatacggttatatattttaaaaaacaccaaaaaactccaattaatttataaaaattattattgattgcaatacaataaaaaattatagaaaaaataataaaaagttttttttaaaaaaaaatatatagcaataatgaatttttatctttttgctaaaacgcagtaatagaattgaaaatagattttgaaaattgacatagaaataatcattgataagttattagccttttaaaaaattgagttcattaaaaaacttgaaaagcattaaaaaaatatatattaggccctttagttttttggggccctgtacaatagcccagcttgcaccccataagagtcgccctggtagccaatagtaaatgtgtaatgccctgatacttaggtgcgctacaataatttttaattattgtgccacatttgcttatcgaaagattttttcttgaaaatcgtgccaaaataaattttttgatttaaactattaaactttataagcatatatatttacataaattttgatcccgtgtttaaaattttacaatcataatcaaaataacttttacagacatgtcacacaacaactacaaaatacagcctaagtcgtcccgagactaaacactctaggtgcaccgtcttgacatgtataatcatcctctgagctcagttgtcactccagtttagctttcacccttcctttacctacacaaggaaaataatatctatgagtcaacagaatcagtaagaaatgcatataacatataatatattaccaacttgtatctaggtgcccatacgcctatccacagataagtaagaacattctttactaaggtacgaccactgtaccacatgcaatacataccgctactgtacgagtattggtaggtttgcaccgtacctcaagtaccactaagtattgtgccacatacactccgtactcaaccgtactagtactgtactctttgaacatcatacactataccaatgcactcagtatcgctatcgtactagtattggtaatatacgaatcacaaacagcatgcatatattacacatacacatattcttatataaatacgttctatgctattcttatctcgtttctaaattcaagtgtgatggccgacctaaatagaaaatcatgcgctggatggatgccctatgtcatatttacacaaatgggtaaataacacgctaaaacccgaactggggacctaaacttacaactacaagtttcgctatcgataattaacatgatagtattctaattatcgaggaaacaaaaaactaaggctctgaaaaataacacgaatcagcaaaatagattttttgaggatcctgcctgtgtataggtctggtttacactagaaaaccccccaaatccaaaaacttgcacaattcgtacaaaacttaaccataccttccagatcacctataataacatcaaagagtaaatttcaactagaaacaacaaaaattatccacagaattttaaaacaccattgttgagccaagtttgaattcttagaactcaaacttgctcaacccgagaattaagcaccaaaaccagaagattcaaacctaaaacaacttcactaatcaacaaaaaaacaatcaagtattaaccttaactcaaaaagtagtagaatcacaaccttaacatgcttgaactaacaaaataacttaaaaactcaacaagaagcagctagggctcttacctccacttgatacaccctgaattcctagttgattcctagaaaaataatgaaagtttggctgagttcttctggttcttaaggaggggttgagcaaagggagagagaaagagaagttttttctcaaattttggtttttctttattttctaaaaatgaaactaaaaataaattattaacttaattataataagtggccagctgccaatcaaggggtatgtcacctaattctctaatgcaaaatatcaaaaatacccctcctacttccaacttaagccatgaaaagtctaggggtaaaaaggtccaaaaccatgaccccgctcaaacctagcatttaaaatatctcaaatgtttatccccgttaagaattaagttctaaacttacccatatgactctaacagtcatccatcacattttcgatcgctgctgagcaaaaatcataaaaaaaaaaaaa

SEQ ID NO: 237417 - DNA, 2113 bp, Cannabis indica
tgttttaaaattcgagcaggcaaaatttggatataaaaataatctccatacttgtttagccaaaagggcttgattaaaaagttgaaaatcccaaaaaccaagctcgcccattgccttaggctgacatactattttccattttacccaaggaatcttcctttgatcgccacatgaaccccacaagaattatcttacaatagactttattttttcacaagttgtcaccgggatcttaaagatactcatcatataagttggaatagcttgaagaatagatttgataagcacttctctcccaccagctaaaaagaaatattgctttcatccccgcatacgcttcctaacttctcactgatcccctcaaacacctacttttgtttctaccaatcactgtaggcaagcccaggtacttgtcatgagtagtcactgatgttaaccccaacactctcagaaccccatcctgatccaacctgttgcacatttggactaaaaatgatagcagacttcttaaagttaatcttttaactagaggtagccttataagttggaaagatacactttatagtttcagtatcacctctattagctctaccaaacacaaggctactgtccacaaagaataagtgagtatcacgcggtcccgatctagaacacctaaaccccattagttcaaatctggcctctgcgagagagaacaacgaagacattgattttgcacaaaagaggaataaataaggagataaatgacatccctgtcgtaaccttcatgttagaatcacccgaacggtattgattaaaaaagtgtactccgagatcgtcacacaatccataataaccctcacccagtcctcagcaaagctaaactatcgcatcatactggctaagaaccaccattccacctggtcatatgcttactcatgtcaagcttgagtaccataaatcccatttttctataatttcttttaaacaatgaatgaagtagctcaaaactaacataatgttatcatgtattgaacgccttgggacaaatgcactttgaaaagatgagatgagggggtcaagaatacttttcatccttagtgataaaattttgaaacaattttatacattacacaaggcaataggttaatactctttaaccaatcttgatttttgtacttttagtttcaacaccacatttgacttattaaactgtcacaccgaagcaccgtcatttaagattacaaggcatacttggcttaccctctcacccacaatatcccaaaatctttggaaaaaataagcatgatattcgtctagtcttgaagctttagtggcaccaatggccgtaacagcctggtgaatatcctgagtgaatggtgccataagatgctcattatcagctaccaaaatatacaaattaacaacctttgtactacgatggacttgctcatttgtcgagttggctgtttgaaaaatatatgtaaaattctacttcacttcaccaacaatctcttcctcaacacacaacttttggcaagtttccgtcatatatagtctcaataataacatttttcttcttcctccccaatactttgttatgaaagtatttcgtgtttttatcaccagtcatcatccactctgatctcgatctctgatttcaataaaatttctctctattcataatagaaaaaattatgatttgtttttcatatgacgatattagaattcaaaatcctattatcgacacctacaataaaatttaggagaattatcctatacactatattttaatttttttttttagacttacggtttgggtcgctcctgtagtttctatgtaggttgctacatgaattttgattgcaatttaagttgcttcgttagttgctataggagtttctgtgtgaaattctgtaaaaaagaaaaaaaaagactattttaaagtataaaaataaataaaaaaaatctaaaatttaacaatttgaactagtcggatagaagatattgaggtgtgtggggtggaatcgaatatcaagtttgtaattaaaaattgtaatataaaaagcttaagaaaaaaaaaagaagacacctacaataaaattctctagtaaataatatagggtgattctac

SEQ ID NO: 237418 - DNA, 1090 bp, Cannabis indica
ggggatttgggttggaatgagaacgtaaaaccaaacatatgtttggaataaatttgggttggaataattttagtagagggcttacaattaaggggaccctacttttaagtttatttttgagtaaatgtcaaacattttgaatacttgagtttgagattgccttaatctcaaccccttacccttacaacaaaaacccactagtgaaaactcttacacttatgttgatgtcacattgtcaccacagatagaattgcctaatgaaagtgaagcagtgctttttgtttcgtttttgtggattgtgtcgaattaggtgatggtaatctaaccaaaacagtaaatcaattgagaatattttcaattcagagcacaaattcaaataaaagtaaattacaaaactgtatgtttaacagtccgacaaaatagaagattatacttacttaactctttcgaaatttatacccatccgtttaccaccatcttggcctaaacaaaatcgtagatatgagtaaacaaatcaataaacagtttttcttcaatatatactactacttgccacagctacgaaaaattgaacagaaagaaataataaaatcaatatacaaaatggatgtggaagcataagaaactatcccaaacagcaatataaaattaagtaaattaatatttgaatcttaaatggaattgagaacccgaaaattgaaatgagaaaatagaaaagaagaaaaagaggggaatcgatttaagaataagaaagcacctggtaagggattgtaataaccaagaacttcaaggtgcttgccgtctctaggagacctgctatcagctgccatgacccgataaaatggcttgttcttgcatccgaaccgggccaatcgaatcctcaccaccattttcagtgaaatttaccaatcagtgttggcgcaatacttgataaggagaaaaagcgaaatgccgcgtgggtgtcgccctgctgcgtggtgtcgggaagaacaggagatgataaaggagaccgaacaattttctccggcgtcggcgtcgggagggagagaccaagtttaggtgcgcttgtagtatttactatttggtggtc

SEQ ID NO: 237419 - DNA, 4421 bp, Cannabis indica
ttagttatccattccccatctctatctctatatataaatatatatttgatatttgtatatagatgaagaagaacagaagaagtaggtgtattgatcattgtattaataatattatattatcaaaatataaaaagtggctaccacatcacataacatagggatggatggggtgctccctttatagattacttatataaattatattattactttatctataggactacacattgatttaacttgttttgaccataatttttttttttttttttttttacatttggtatgtttttaactagttagaaaataaatatatcatatatataaataaaataacatgttttcaaaaaaaaaataaaataaaataacaagaatataatataaaaacacataaaacaaaatgtaatttatgtaaataaattttaaaaactgtaaaaatatttgaaattccgtataatcgtacttttgtaaattttgtatgtttttgtgtatttttgaaataatcccaaacagatatcgttatgtgagaagattgttgataaaaacacgaaaagagagaggggaacggcccaatgtatgggccttatgaaactgaagctcattatgggccggctggcctgtaagaaaattgttgataaaaacacgaaccaaaagagagaggggaacttcccaatgtatgggccttaagaaactgaagatcattatgggctaagcggccccaactagcgagtaaccaaatacgacgtcgttctacaatgagattagaaaaaaaaaaaaaacgaaaaagaagagagagagagagaggggacaggggagtgatctgctccgacggtgttgacgagtttaaaacgacagatctcaatgatctcaaataccaacggtgaggattcgtcttccgaatcatcagagaaaataatcaaacaaacaaatataccttactttctctatctctctctctctctctctctctctctctctcttcgtttctcttccacagaaaatttcaacgccggccggtgctggaggtggtggtggtggcgtagcttgcgtctcctcagatctgaatcctctctctcctgatctatctggtaacgcctcatacttccttcatcttcaatttttatgttttccatttccttcgaatgaattaattaatcaatttgagtgttttttatatgttagagcaagttatatatatttgaaatcgccatggctgctccgcctgcaagagctcgagctgattacgattatctcataaagcttctcctgatcggcgacagcggtaccatttttatttttctttttaatttcagttaaaatctattaatttggggctaaatgttattgtatttatctgatttgatgttgttttttatggactgtaatgcaattgtaaattagtttcgattgattataaaatgtttctttaatttgttaaactttgaactatttatggaaactgtatgaatctagtcgtcatcatcatgcaactaccttagtgacattgtttgttgaaatggtattgttattgggataatgctggtttagtttgatttgatgggacttttttcagtttttttattattattgttaaaatctattaatttggggctaaatgtaattgtattagatttcatttgatttgatgttattttttaaggactgtaatgtaatggtatagtttattactcattggatgttacatttaactgtaattgtaaattagtttcgattgatcataaaatgctcttcaatttatgaaccaagccttgcttttgttgaactttgaaactatttatggaaactgtatgtctctagtcatcatcatcatcatgcaactacctgagtcacattgtttgttcaaatggtattatttttgggatatgttggtttagtttgatttgatgggacttttttctaaactattttgatgagatgagacaagagtcactatacatgtttgttgtgggttctgaatcagtttattttgttgtgttgtgctttatctgtcttcgggatggggtggtaacattgcaggtgtgggtaagagttgccttcttctgcgtttctctgatgggtccttcacaaccagctttattacaaccattgggtagggtgttttaatatttgtaattttgtagtccttttcctctctccttttccttatttttctttaaaataaattcagttttcactaatatggactttattttataacagcattgatttcaagataaggaccattgagcttgatggaaaacgtatcaaattgcaaatctgggatactgctggtcaggaacggtttcgaactattacaactggttagtatcttactcgttgaatatgtgagagcttcatagtttttcattagctgtatactccggttgttaagtgaaatatgtgacctactggtcttagaaatctaaggataaataggctttctcatcaattgaataagaagaacactaatgtgaattggcgttttgttcaaacaatatcaaagtgaatatttgattatagtgacctaccggtcttagaactctagagattaatagtctttctcttcaattgaaattgaataaaaggaaaacaaatgtgagttgatgttttgttcaaacaatatcaaaattgagatttgattatagtgttgtaaggaaaagataataattgggggataaatctttttttattgatctatttattcattgtgacgaatttatcaaaatctatccttctgtcaatttataagttggatgtttcctcaagaatttctcgccctttttttgcagcttattaccgtggagccatgggtattttgctcgtgtatgacgtcactgatgagtcatctttcaacagtaatatactatttcatgcttttatcatttgtcagatctgctgtttttttataaaaatgtgtgacaactggctattgtttcatggtattacaactacttgcaacagtaagcagtgtgttttgctgtgccgttgtatctaatccgatttcttcctgtttttagacatcaggaattggattcgtaatatcgaacaacatgcttctgacaatgttaataagattcttgtgggcaacaaagctgatatggatgaaagcaaaagggtttgctctcctctcgcattatctatacattatgttatatggcggtgattgtgaatgttgtcttgattcatacccttttttcaggctgtccccacttcaaagggccaagcccttgctgatgaatatggcattaaatttttcgagactgtaagtagttaccttttttctacagacggttccaccgtctatcaaatttttacactttattacaaatgctgaaacgtacccgtttgttgcagagtgctaaaacaaatttaaacgtggaggaggttttcttttcaatagctagggatatcaagcaaagacttgccgataccgactcgagggccgaggtatgtgcaatcggaatgcttttcatttttcaaattaaaccatgtattagttgctagacttagatactgttattgaatggttgcagccacagacaatcaaaattaaccaaccggatcaggcagggagttctgcccaagccgcacaaaaatcatcttgttgcgggtcttaagaggccaaggaaatcgcgattcgaaatggttaacttttcaaaagcaaccatctccatgatccatcctttggctggaaaaaaagaaaaactgattttggtaccaactatgtcactggcgattgtattgcttttctctatgtcataattctaaagttagtttgggtgtgaaaggtagaccaagtattttcttaccaaattaattacatattattagttcattttcttttcaacttttttattatattattattgttaatctttattgagcttggaaaaagagtatatataaaaaccatatcttttatggtatatgatgagttgggtgtgtttaatgtatctcaactctgatttcaaagtcttttttagtttttatatttttctcgatcaaacctagaattatctttttgttttataaatgagatactaatgtggcaaaattgtttatttgtataaaagcttaagtataaacaatatgaaaaataaacacatcttgttaaatatacaatgaaagtttaatgataaattctgtgaagacatcaaagttcaactttgaactctgaatagcaaaagtatttctaaattatcaaaggcattacaaatgtgcctttttttttattgtcgaattatgtttattttttgaaataacgagatgaagtcacataccaaaattaccaacaaaactaactgaagccttgagttgaatattgttgttattgaaaagaaagtgattcatgataagcttgttgttttgttgagtgggattttgagtacattgaagggttttataaggccaatggattgtct

SEQ ID NO: 237420 - DNA, 735 bp, Cannabis indica
acacagtctcagaatcatcacacttctcagacgatgtgggatcgcacaacttacctgatgtttctccttacggatcacaggactactgactgtcacattttaactaaataatttcacaattagaattatataaatatttaaataaaattaattttatgtatacaattaaagccttaaaatatacaaatttatacattaatcaaatccccccttccccccctcaactagcttcttgctagtctctactaattaattcaaagcgaaaaatattaatatgaaggataatttgtagtcaaactctctaaactttgaagtttagaacgatcaatcccctagacttgaaaaattagaattgaactccccaatctccacaatcgttttgctttgtactccttccattagtttttggatattaaatgtcaaatagaccgtcactatgtccatgtggtataatttcattagtctacaacatttgaaggaggaccgcaaatgagctcggggtttgggttcctgggttttggaccattgacgctcgcggtggaggaaactcgtcggcgtcgagctgagaatgccacagcaagagaaggagatactgaatgagagggggagagggatgagttagggttttcaaaagaggaagaaagaagaaagaggaataggaaagaaaaaaaaagagaaaaaatagttttttaatttttttttctaattttgaagtttttaaatattttttaatta

SEQ ID NO: 237421 - DNA, 1244 bp, Cannabis indica
tgtcttatttagttaattttgtcctggttttctccccatacacgtggcaatttcactatgggacacgtggcaggtcaggctctcagattcagagatagttaaggaaaagtcattacataggtcgatccccttgagatagttcaataactactccgggagctaggccccaatccggagaagtcttgcttgacttcatctccgggagctggacggcatctagctcctccgggtttggggtaccagagatgaactgtcagctagcatttaatacagcgtggagaaatcatctatgaacgcatatgagaggacgtgtcagacgccataaacctgtccttcaacaattacgtaataatcaagggtataagtgacaactctattatgaacaatcacatcaatcaaggaaggatgagcgcttatcccacctaaatcctatgtaacctactacgtaggttgtgcatgccctactttgtagatttgtgaacttgtgcatggcgaaggcaggcacttaggacaattgagacctttcttcttcttgaaaactgttataaataccccttaacaaaattaatggggggatcgaaaaaaaaggcaaaacattctctgtaaaaaatactcacccattaatatcaaagactcatggactaaagcttattaatgccccaaccacgtaaaattaatgatttagttgccgaaaatctcggtaaatattttggtgctttcattgagagctgtagaaagttttgctcacaaaacgacaacacgagaagacccatggtacaatggtggagactagaaaccacacgcgtcaacctcatccccccaagatccccagaatccaagggacgaagaggcggcttcgcgagtaaacgtagatatagaagaacaagacagaacaaatgatgaggaatacgaagaaaacaaaaaagaatatgatgcctatgatgatggcagttacactgaactactagccttaaggcaaaaggcggccaatcacaaggccgagctggcagcacagaaagaaaaaaataagaaaatgtaagggataatagtcgccatgtaaaaagccatagagacaacgggaatccacgtgcatccaaaggctatgcctccgggactaggtgaaacacaagaagagtctttgccaagtacccaaagacgtaaaaataatgctaaatttgctaatatgtgagaagagaaaggaacaaaaaagaaagaagaaagatttgtattaaaataattaaata

SEQ ID NO: 237422 - DNA, 2046 bp, Cannabis indica
aggtttgggtctgattctgggtctgggtctgagttcgggtccaaagttcgggtccagagttcgggttcgatttttaatttgagtccgggttcgggttttgtcctggtatgggttcgtgtccaagttcctgtcctggtttggatccggggaaggtttcgggtctaggtgtatgtctgactttagattctcgggtctaggtcaggtcctagttcgggtttgagtcccgatttagatttgggtctgggttccggggcctaggtccctggtctaggtcccccatccaagtccagttcctagctcctagttcgggtcctgagtattagttttagtctaggtcctagtccgggttcgggttcaggtctcggtcctagccttggtcttggctcagttttgggtccttatcagggtctggatcctggtctgggtcgcgggtctcaggtcccggggaggatttaggacaaggtcaagtccaggtcctagttttggtcccggtctaggttcttgtcccaggtctcaggtcccagtcctagtcaaggtctcggtccaggttttggtctaagtttgggttatgttttgggttcggttctggtctcaggtctgggtcctagtcacagttccagttttgattttaggtgtgggttttcttccgggtctgggtctaggtccaagttggggtcatggtccgagtctcaatcctagtccggctacgagtttttcggactcctatctgggtctaaggctgagtctggatctaggttcgggtattaggtctggtcccaggtttgggtcagggtatgcgtctgggtccaggtttgagttcttgtccatgtccaggtccaaatcccaatttaggttaggggatcgatttgggtgctagatccagtcccgagttcaggtttaggttctagtctaagtcctattctaagtacgggactgggtctaggactgggtccgaacacgagttccgaggctgggttccggtctagttctgggtcccagtccaggtgtgggtcctggtcacgttttcggtcctgttccagggtcctagaagtcacggggtacgggttcgactcgagtttgggcccgagtttgggttaagacgttatttgggtctagagctaggctcaggtctgagtttgggtctcggttagggttcaagggtgggtccagttttgggttcgagtttgggtccaggtcgtggtcccgttcgaagatccctgtttggttcagttcaagtttcagttttggttcccaagtgtgggtttgggtctaaatatgtgtctgggtcctggtatgagttcgagtatgagttcgggttcttgtctaagtcctagatccaaataccgctaggggtccggtccaagtatcgagtcctggatcttaagtcccaggcggatcctaggtccaggtttgggtctggggccgagtcctggatcgcgatccaagttctgacgcctaagttctggtcctagttcaggggcctatttacaaggtctgggtccccactcgaagttcaggtcctaggtcccggtccgagtcaagtcctggttagggttcgagtttgagttcaggttccacccccagttctgggtctaggtctgggtctcagtctgggtctaggtccaatgttggtttaggtccccaagtcacaagtcccggtccgggtccaagtcccggtatgggttcttgtctgagtatgggtttaggttagggtcctgttactgtctcatgtctaggttctagtccaaacctggtttgattccaattctgggtccgagatcgggtttggatctcggtctaggtctaagtctgggtctggatcacggtctgggtctgggtccaggtatgggtacgcatccaggtccgagtcctagattcaaacactgactacaggttaggtcaaagccttaggtccaaattcggatctcagtcttgaatctcagtcttgttctagtaccaatcctaggtcttcagctgggtccttaatttgggttttgggtccaaggtcaggtcccgtgtctttagtctagggtcaagttttgggtc

SEQ ID NO: 237423 - DNA, 514 bp, Cannabis indica
taataaatattcataatttagtttgttgaggtatatgacatattattcaaggtcattagttcaaatctcataatactcttcatttgatattttttttttatatattttttagggccccaaaacttattaattcgtcgtaagcccatatatttacagggccagccctgttcctcccgaccatcatcctcatcaggtttaatctcatttttctttattagtttaatgctcttggatttatttaccataaattctctaaaatttgatttgtaattaatttttttattgaattaattgagatcaatatgtgcaactttccacattactttccaaaatcacaaatttgagctactaattgatatttttagtacatttagctcaatttgttatctaatccaaaaaatagattaatgaaaagtgatcttacatattaagtaacaatgttgattataaaaatttgggatagatgtttaacagtcaatgctctcaagtgtatttaatattaatttttttaaaa

SEQ ID NO: 237424 - DNA, 1197 bp, Cannabis indica
cctactttttcttcccacaaggccacaaacaaagttgatgcatgtgaaattaatacaaatgcatgaactatctattaccctatttttctctcactatattttgtagtgaaaaattacttttgcatggacaaataatttcattttaactcaaaaataaataataataataataataataataataataataataataataataataataaagtttgaaagatgattgctcatgtaagatactctaaataagtgtccaacaccttacctatgtttaatttaaaattaatttaaattcaaatactaaaatattatttcatttttattgtgctgattagaatttttatctctcaaatttcgacaagtaccaatttatgtttaccgaattttttaaatcgttaaaaatttcttctaaattatgaaattgttagatttaaagacttctgatcaattttactaatacagtgattgttattgtgtcaaatcatgccctcgatttttatatttataaaattgtgtctccaaactttaatatgtattaaattatgttctctaaacttttatgtatatccattaataaaattaaacaaagttcttaaatttaataattctaaaattttaaacaaaacttgtaacaatgctaaaagttgagaaacataatttgtacatgtaacaataagagttgggtagaaaaaaatcctaattagcacgtagaataaacagtccctaaacaatttgaatttgatggaccaaataataaaaaaaaaaaaaaaagatataagaaaaaactagatatgggtcccatcccaaggaatggtgctccaattgaagagtatctctcatggagaaaagtgaaaccagtacagacaacacacaatgctctgaatgagatagttacttgttttcctaccaaaaaaaaagatagttttacctgtcacatacaaaacttctcttgttttgtggttaaagagaggtggaaacttccccgcattggctgtttgtgagtacttatcggcagcgagtggcattgaactgttagcttagtccattttttaacattggatcttacttataaaacccactcttattattacacactattacacactactgttgcctagctagaccgtacttgtttttttgtctcttaataattatttggaggcttttagatactccatacttcataaatttccatct

SEQ ID NO: 237425 - DNA, 1403 bp, Cannabis indica
aataagcgtgaaacattcattaaacaattaaacagttagacctcgcagtcattgcaaaatagattcctcggtaaagaggagatcggaatagaaccatacagttggtgggagaaagcccacttagccacattatgggcaacatagttacaagtcctactaacatgagaaaagttacaacaaataaaagcaggagaagacttaatacaaaaggagacatagttctcaagagcccaatgggacagcttcccattgagcgcattgatagctagcctcgagtcactctccacaataatatacttataccctaaatccatagccatcgaaacagccaagcagcaggtcgtagcttctccacataatgcatccgagaaatccaaccgagacgtgtcaacccgaaccaccttgcacagatgattccttgctacaccagctatgcacatgctctctaaggccactctaacatcacaattcagttttatccaatcctgtggaggagggttccaagtctccctcaaggtcggtgtaggagcagataagagagaatcatgtaactctacaaaagaagtacaaatattgtcaatacatttcatcatatctggggggatttattgtgtaccatttcattgtgcgtcctccagatgttgtcgacaacaatcgatgcataaagaaatacatcctcagcacggatccccttatgtctaagatcccatataaatttaatccaatcccaaacacgaataccagtatcgcacacagagtaaataccccaaggtgaagaacgccataagtgttgcgccacctaacaggagagaaataaatgttcaatagattcctccctcaacccgcacaaatggcagtttgagttctcaatctgaaaccttcttctaataactgatctcatagggagcgcattagaaaggatacaccaccagagaactttatggcgcgccaagattttactattccaaagcttattctaaagtgccggagcaacaacacaatgaggagctctatccaagccctggttcagataagtcgatttacacgagaactgcccgttgctttccaaggtccaaatccatttatccttaccttgtcccgagggcttaccacctttcaagattgcagaaacagtctcctgttcaaaaagactattcagttggtggacatcccaatccccacttgacagtaggagatcaaccacaaatttaagttgtttagccgctaataatcctaaaatttatataattttgtcgttaaataaaataataataagaggggatatgttaaaaaatgtcagtatctattaatcaaaatacttttatattttattttaataaaatatacctacttttttactttcttgagtggattgcctattatacccttactctctacttaag

SEQ ID NO: 237426 - DNA, 828 bp, Cannabis indica
aatctagatcctggtaaaaatttccaacacatcacacgcctcaaaagccagcgaaagggttttaaaggtcaccccttttgcattgttaaaatagtcctacaatatccgatcagaatcacattttgtatctaattcatttgtcaagggggcatgactcatctttaggcctgtgatcaaattgaacttagaccgcccaaatctggctttgttttacccacgccaaatcgcagttcatcattttttaccttaccgactttctttttcccttaataatagttgatgtacaatcacgtcggagaatttcaaatcactggcattccaaaaaactccaaagggagttttttttttaccttctcaatcaacttaaaggcttcaaacttagcttttattgaagtaaagtacccgttctttctgtaagtgatatgccctaaaaattttcaaacaataagagaatgagttcttgagccatctgcatttacaaactaaagatgattattaattggttataaatcgcacatagtcgcaaaacaacacgtaaaaattgcataaaattacaaaacaacaagcatgaatcacacaaagattgcaaatacctcacttaaaattgttcaagcactgtttagagtaaacatttaaattaaatcacacaaatgtcgcccaaaaatcgcaaaccaacaggaatacaaaaacactttagatcgtcatgatttatcgcacaaaattacacaacaatacgaaccaacatgagaaccgaaaaccgtttaaaattgaaagattaatcgcataagtatcacataatatcgcacaaacaaagaaaatcccaaaaaa

SEQ ID NO: 237427 - DNA, 1642 bp, Cannabis indica
taggttggttgagaagcctgctaagagatccctttatgggaaagacagatactagctgtgttgatccattgtgatagtaccacgactattgcaaaagttcaaaaacattattatagtagtaagagacaacagatacatcgtaaacatagtactactagagagttcctctctattggagcagtaagagtggaccatgtacgcattgatgaaaacttaatcgatcatatgacgaaaggattagctagaaagaaagttcttaaattctcaaaagttatgggactactgcgcttagaataatgagtcactcataatagtaaccaagcctatagattggagatctcaagaaatagattcaatgggcaataacaagttacgatgtgataagaataagatcatgctattgttataagaaatatgaagcatgaattcttgaagtgatataaggttgacataatagaaactgttaatgagatctatactctatgtggagtggagtaacgagctacaaaagtaatcttgatagactcaccgacgtgaatgtggaagtgaagccgcttcctatgaaatttaggcaaattctagagtgttcactataccacaatagacgtccatggccatttaagcacgagattttggactacacccaagaaaggttgtgcgaggtacatcgttagagatagagttcaagactacgacccactctagtatattctaagttgtattcacaacgcaaaggttcaaattgaaaaatacatttgatgctcaatcttattgcttagaatactgctcgagaaatatttttaaaaagtttcaagtgggggattgttgaaactttgtaaaattttacaaaacgagaagtaaagtgtgtgtgagtgaatggagtctcacatgggatataaatacttcaaagaagtgtatataatttggaattaggatgcggccccaaggggtacctattttttgtgcgcatggatgaggactcacacaccataccaccacacacgagtgcgcgtcgccgactttcgttcaaccgtgctgagttgagctggcgggcgggtgtggtgtcactttatctttttggagaaaatttatttattatattataattttttatttaatcaaaatagttttaaacatttttaattgattagtaagacaatttctcactccatattttcagtaacgttcacatgatcgttcccacggtcagaaaatgattttctttctgttacttcattatgtgcgttcctatataatgcatcaaaactaacaggagaaagacatctttttctcacagaaaaatatatacgattataatacatatgtattcagagcagtattacaattattgtgtgtgctatttcgacggttctctatcgtgcagtatagcttcgatacaatgacgacaagactgatagtcttgttgcacagttctgggcagcgccgcagagtcttaaagagagcaacctattcacgactaaacccatatttaatttagtaaattcatttcttttatatttagtacttaacatttaaaaaatgaaattttttcagaaattatactctaaatttttatagtacaaatgtatgagaattagaaaagtgtaattaaaaacttcaaattatatactaactagaaagc

SEQ ID NO: 237428 - DNA, 2715 bp, Cannabis indica
gaaaggagaaaatgcaagcagctagaaagccatatttccagattgaaggtatgcacaaagccgaaccccatttcgtactgagccagatctaattgataattaatgttgtgtagcgtcatgtttcttcagctatatagaatatgctaactagttggttttgcggctttgacttaataaccgaaaccaaaggtcaataatctgtcagtgcacatatattgttaggaaactagtttttcaaagtagtttagttatttctatctactgttgttttttttttttcattgtttagatgctgtaaatgtcctgagcctcttttatatgtttgcgtgatattatttgaattttggtgtttttcattcaaataaagttggtagaaataaggttttacagtgtagttcttttatgtatgcaatatggttactaattcaatcataaactcgttctccagggtgaagatattgctggtctggacgtgacaactcttgaagaactacagaacttccatgtggaggctataacaaagatttgccacgcaaaggtagtttctcttatggtttatttttcgattctctttatacaagcttattgttactgcttctgcaccatttgtgaatctatgctcaattgcctttactgattccatgacgactactaaccgtttatcttcgtttctccagtgcctaaatagtgtattgtagcattctgaggttgaccaccgtacaaaacttactccactgacagttctaacattgcaaggttagtcttaattgccaataaaatttctacattgcaatagacctcttaaaagggtatgtggtgatttatgcacataaatataaatctcttatgagctttacttgttggttttgcaggttttgttaaccacttcttcatcattttgtacagtcgaggaaatgtgactagaaagtagaaagaaacaatttgtttctaaaaatgaccaaggaaactgtaatttttgcaagaaaaaggaaaatcccatttgagcattgatagattagaatgctttgttgtacatgaaacttccttgtaacaaaaaattatgatcatttcattgtgtattcgtatatataattatcaaactcataatatgttatgtaggttatattacttcacatcacaaccttaatataacctaacaaaaagtattgactctatcgatctattgacatgtattttgatgaacccatttagactttatttgccttctcttcttcctctgcagaactacttaagttatttattcaaaaagaagacctgaagggcagttgctctctgctgctatcccaaaattattagctgcacatgatggcttgagaatatcttcaacatattcaccttccacactttttaaaaacaggggaaaaaaataataaagatgagaaaagtaccaaatgaaaatgttgaaaataacttacaataataataattgaaaagggttcaagatcagcacttgggaagcctgtcacaatttgcagggccccatccgatttgtttcttttcgttgtcgtaaatcaccatttttccttgcatcgaaatatctgcgaaatatgtaaaatgatgtacctgtaagaaagaagccgaaatgagtagtttttgatctctagtgatggaatttttcttacctccaatgatgtttaggttgcccaatccaacctcagagccattcaagattcccaagcatacatttccatatttctgtgaggaaaaaagaaccagtgagttaagggcagaacagaagggattttaaaagttaaaacatggtcgaagattctcaccgagactatgagataagactccggtggcatttgcagctgagcctttttagcgttggtaaagcttagcgcgaggggtgtgaagaaggtcttagcgtcttgaacggttttgaaggctttgttgcctctccagcaaagaggcaaggaacgatcatcggttgcattcttgagaggctttccaattaaactctttgtgacctgaaacatgctttgctacttaattttcctaaaacaccaaaaatatacaaaatcaacttatgccctgtctgtttctcgcttaccaggctaactacggcgtcataagattgggagttcaagtaggtgtatgagcttccactgtcgaaaatcacatcaaggccttttagtcctgttagctttccaccgaagtaaagctctgccggtcctgataagtagtagtctctgaaaatacaaacaattcagtgttgtttcttatgaaactaattcttattatgttgcaattaagttctgtttgggagcttagaatttactcactctgaaggtttggctaatattggtatccatgagattcctgaagaaggaacaaaatcgtccccaaagaagagataacctcctccgcgctcacttaaacaatgaccaactacatttctagtcagacccatttgagtaagctgcgcaagataccagctttgccattgccaaggccgataacaccagcagttggaggtggtgtgccatgatactcctgatcatatccacacctgatatgagcacaacagtaacagaaaattccgttattctttcaaattcaaaaactaacacaaaatttcatagtaactgttgttcatagtccttacccgaaagccaaacgagggccaagagttgagccatttgagaatttgagaggaaagctatccatgaccaacacacccaaagatgatcc

SEQ ID NO: 237429 - DNA, 1213 bp, Cannabis indica
gtcaagaagctcaaaaacaagagaaagtaatatgcaaggtgactgcccaaacaagattcgaaagttcatcatcacctgacatcgatcttatttcagacataacagctttcccttttccaaacacggaaggaaatggccaaactagtgaaatgggctcccttatgcgaatcgcatgttcaacaggcctgggcgaggccaagagtttcttcttcctcttcagtggagtcacccgctcttcctcagcatcatcctcgggattcaagggctcctgagcatactactcagcccgtgcacctcctttcaacttagctttgcgcttaagttgaatgagttcaatctctggatgagctagttcggtccggctagcaccagatttgctcttcttccccgtcatggacttagaggtaaagtccttgagatagaacccgtacctcacaaagttatccttagaggtcaactggataatattcaagtcttctgccggaagccaggtaagttttagcgctctatccctaaaagcaagagtgagaggagggcggtgataggtcggaatctgctggaaccgagtgcgagtgatgcctgtgccatccaccatgaagtactcatcagtaaagcgcccaatcttgctgatgcccttatcgtccgtgcccgtcaaccacttaaagcctggttgagagaagtagaagtaccctgacctgccttgcttaggggtggacctcaaatcgatgtaccaagcaacctcgtggggagagggcataccccatttctgggaggcatagaggacgaagagggcagacagatacttgatgcccttagtagtgaactgggctgggcagaggccgaagaagtctgccacatccttaaaatattgatgcaagggcacccaaccaggcgtacatccccctttcagggtttgtggcacgattgttgtaggcgagaatgtagcagtctagctcacccaggtatttgccctggtcaagagttcgaagagttcgaaggtgcgcctccgtaatcttggacagaaggcttacccaccatgcgcccaagcgaccctgccttctatgaggaacaatcgtagcaagctcctcactgacatagtccatgccctcaaccaggacgtctccgttagcatcgacttgctccccagcctcgttttactccccatagtttgggggtgcaacctctgccttttcctcctcctcagaggaactgt

SEQ ID NO: 237430 - DNA, 817 bp, Cannabis indica
catgccagcacgtaagagcggagcattaaaaactaatgaaaacgatacgatcctagtattcctaaagaaggtgacctcgatctgagttttagtatattttcaagtgttagatcgaataaaaatccttagataatcaaatgaagtcatgtagcatcgtccaggaagtagctaaagtgatgtactcgtgtataagagtcataattccgtgggtgtaaggacctaatggaagcttgaagcaaagatgttacaaatggtatacttcctggtaggttagagtaattgtttgtagttgataacattctcttatgatgacagttggttggccacaatatgtatggcaccctataagatgtttttatgagtgctaaatttacttggagtgaggtaccacctataagtcagcaagaagtaagagaattatcaaaaaatagtagacaagatacgacttagtatgctcgccgctctcgtggatgatgatttagaaatgataaaaagttaagtactgttggtgaccgtatgttcttaaagttcacttcaatagagaaatattgtgcagggtaagtaaagcctgagatatttaggtccacctactatagcagataggtatgacagaattccacattttcatgtgaagaaggtaggtatccaatcccacacacatgcttatgtatgggaatttctaactacatcaggacatgagtaatatgatacgttaggagctgtggtacaatgtgtaactaaaaatatatgagtatattcctagataaggtcttgtggaaaggaaattctaatagaaaaagttgtgaaattgggaaaa

SEQ ID NO: 237431 - DNA, 1032 bp, Cannabis indica
aaaatatttttttcttttttcctttttgacatcgattttttttattcttcctgttatacccgaaattcggttgtacttcagagagtgacacgtgtcaatcaagtggaatatgaaccaccaaagataataacaattatatcatttaatgcaaaatggaataactcattaaatatagaattaatagagtatattcataactcgctaattgtatagtctaaggaaagacaaggatatacaaactatcaattcatgtattaacgagagaccatcttaccccagaaggcacaatcccgaggaaactatgggcaatgtatggtgagacatcctcctctctacatataaggaaatattgacgagacgaatcagctcttgaaacacttagcgtcttttccacattataataactaagtgtaacaacttagaaacatgcaggacatgattgtccaatctgtgaggccttatggtcaaagagcagttcttaagtttgctgagtacactggggctcatgccattgctggaaggcatatgattaaaccaagttattattggtcatctatatgcaaagcgatatgcttctactcacgtcagtgtcaaccgccttgaagataagaatgataagtggttgtgcggttatcgattgttatctacacgtgtttaaatgaaacgtgttcaaagccaacgtttcatgaaacagttatataattcaaatttaaatgtaaataattgtcaacctatattcctataaatagggacagattttacaaaaaaggggatagaaaatcttttagagaaaaagatcactaactataatattgtgtcaaatactcagaaatatcttgaataagatagactcgtggagtatgcatatttaactgtaaaaccacgtaaaatacttggtgttattattttaattattataactataaattttcctatatatgtatatctatgtataatttattacgaaaagactcattattcgttacaaaaatctgcgttaacaatttgatactttcattgagagcctacgtg

SEQ ID NO: 237432 - DNA, 980 bp, Cannabis indica
gctttggccttgcccttacctacacacataaatatagctctgtgagttgacgattcagtaagaaaagcataaaataaacatacaactatcccgggttataacctggctcccatacacccggtcataaccccaatccctgtgtcccacacagtactgagtctagaacattcataagacaatactatcgaccataatgtcagcctatactcaatatgctagtcatacatttatgaataatcaatacaactctatgtatactattattgctatcaatgtaatctaacaggcaataacacatgtacgctaaacatgtaataacatatgcatgatattatactattcttacctcaatttcgaattcaggtgtgccggtcaacctgagtggaacaacatctcgacgaattataggctcctaaatcacgtcgattccaaaacatataagtgatccgctaaatcacaaccgggacaaaggttttaaaccaaaacttaacctactgtaacctaatataacaatatcccaaactagcagggaataaactgcctgaaaacctgaaactaacccgaaacgaccagctgaaaaaaaactggtttcacccccctgctacaaaattcgagtaacctgttttacccagaaaaccaaccaagctcaagaccctaacaaaaacgtttccaaacccaaccaagctttccagacctgcataatataccccaattaaaattttccaactgataaaacaactacccatacacaataatcaaaactaccattgatgagtcaagcttgagttcaaaaactcaaagcttgctcatctaactaactagctatcaaaatctgcttaaaacactctataaaaagataacttagcttctgaaaacataacacaacaacaacaactaaacttgtaaaaacatgcatgattcactatctttaaaatcaagaaaccaaaagagagttgctagagccttacctataattaaaa

SEQ ID NO: 237433 - DNA, 1405 bp, Cannabis indica
agagtgatactctcattacatccctccacacacaagcatattgtgatcttggacaatttctctctaaacttgactttgaattctaaagtaaatatgagcattgaaaatgcatcaaagaataaagacggatatatttagggaaatttgactttttatgcttacaaatacttaatattttctcctaaacacataacatataatatttgtgggatatgacacattttacaatattcctaaaatactcccatttacattacccctctccccatcagacacatacaaaaaattgaattttaacatagcaatcggactctgtcgggttacacatcgaacaccttaaatttttgatttttaaaacatgcatcggacccccccctcccatcgggttaggacatcgaatctatcagacacaaaagaaagaatatgattttaaacaaacatgaatcggaccccactcggaacccattagacacaaatacaaaaagaattgaatttttactatagcaatcggacccatcggacacaataaaatttaattttttaagtcatacatcggacctcatcgggttccccataagaaccatcgaacttcatcttccccaaatcacgatttccccaaatcccagatttgaacctaaattgaactctaaatctaacaaatcaatacctatcaatgacaaaaataaaaaaaaaaatgataaaaaaaataaaaaattagggacgaagcttaccttcgacatcttgggtctcacggtggtgaggcggtctgtgtggcggcggtgaggtgaggtcgatggtgtaggtggcagtgagggtagaaaagttttttagtgagggtgatgttgagagagatagaggaagagagagagttgaggttcgaaaatgagaggggtatttttggatttatcataaagtggttttatacttcaaattttgaaatgtattagtttaggcataaaatattagaattttttatgcataacttttcaaatttccttatacttataggtgttggtgagactctatttaagtaggtgacaaaaccaattgttataactaataactttttatgttttacttgacaaaataactgttataactaacaataactcctctattttagttatttaattacaatataatgtttaatttaagttgctatatgattatttattccttcatgataatattaattttaaataataattgtattattataattgttagtaactaaattagtaagtagtttagaatataagtaaattaataactactatatttatccatagattactaaaaataactattaagaactagaaatgcaagaaatagaaagggagatgaataaaaacaagaggaattacattgtatatccactttacttaatttattttaatttttacct

SEQ ID NO: 237434 - DNA, 1207 bp, Cannabis indica
ggttaaaattacttgccacataagatcatctccaatgaaaaatataaagtttagctccaatgaaagatgtaaaatttattttaaatttgactcaaaaaataaagggataattacataaggcactaattttttttgtaaaaaaattatatttttatattaattttttttatatatatatttttacggttttccataaaaacaacacgaaaaataacaaaaaattacataaaagtaacatgaaaataacaattaattaacataaaaaataaatacatataacaaaaaatcaacaacaaattaacaaaagtataacataaaaagaccgtattttctgtaaataaaataaaaaaaaaaatcgtaaaaatatttaaaattctgttgaaaccatatttttgtaattttttttgttgtgtttgtgtatttgtgaaaataaatcaatgttatatttggcccaaattttacagtagttattcaatgcattcggagtaaaatgaatttttttaatagaaatatttaaaaaaatcaacaaaagaatttaatttttaattgaaagtatataaacaccctattaaatataaaaaaaatattaaaaattattaattacattaatgagttgtaatgcaaaatgtaactcatgctttagaccatctccaatggaaaatctaaaatttgtattaaatttggtacaaaaaatgagtttgtgttatatttggccctctatttacaattgtgctccaatccacaagatgtaaaataaggaaaaaataattaattatattgatagtcatttcatattttgttgagaatatacaaaaattattatgttttattcatttattatttaaataatggtaatatggtaaataaagaatatatagttaagtaaaagtcaatgaatcataataattagtgacattataataaataaaaaaagtagcatatattgtgggctaaatttggcacaatattataccttgtgctaaatttagcacaacttttagcatatgccaaatttaacacactttttagaacaccattgaagcataatttttcttaagtgtgtttgaatatagcaatacatcacttttttggtactatattaataatgctcttttccaaaatggatggtgtaaatttttttaagaaaattacactctatactctttttatattgttatttttatttttaccctcttttttaaagtct

SEQ ID NO: 237435 - DNA, 590 bp, Cannabis indica
aaatcacgtaatacgcctaagttagttagggtgttacaaggacagattgtgaactttaataaatcctcaatattttacagcagcaacactactcatgatactagagatcacatctgtcagctgatgcaaatacaagaagctgatagaacaagtttgtatttggagcttccatccttagtgtggagaaacaagaaggcaatcttgggatttataaaagacaagctgcagaagagagtacaacactgggaaggtcggtttctctctaaagtagggaaagaaactctcctcaaaacagttgctcaagcttttctaagctatgcaatgtcggtctttcttctgcctttggaaacgtgtcgaagccttgaaggaataataagttctttttggtggaaatcctcaaaagacaaacatggtgttagttggcatagctggaagaacttatgcaaacacaaaacagttggaggcttgggttttagagactttagggagtacaacttatctttgctgggaaagcaagcttggagattgttaactgaggaagattctttggtttgcaaagtctacaaagcaaggtatttctctactggctc

SEQ ID NO: 237436 - DNA, 841 bp, Cannabis indica
gaaagttcttatttaggatgttaataaacatacttgtgagtagatctatgatcctggtaaaataatttccaacattattgtcacactccaaacttcctttaaaaatgattcatgccccccacctgaccagggtgaagagttagaatgccaggagaatggtcaaagagaccttcattgaggaacacagcttctgcaaattcataagtatttatccaagcttgattggctaaaatcctatcaatcttggaaaaaattctgtcttcacctggttgtttattcgaccatgtaaaataattgccactgaatttaacatcttccaactcacaggaattaacacattgcctgaagtccaaatcaggatatgatttgaccctaacaccaattctttcctccttagctagtatatcattgaaatcacccattaggacccatttgtctgcagtagcaatctccctcaagtccttccataatattttcctctccatccgactatttgctgcataaactactgttagataactgttaaaaccatccactgtcgaaatttttaaatgcattaattggctagtgcatttaataatatcaacagtgaatcttaaaggattccaggctatcacaattttccctccagcatgccacgctatattggaagagaaacaccatccttggaacacatttgagtataaggccccaagctttggagccttaactctagtctcgaggaggccaacaaaatcaaccttttgagcatagataaattgtcttataacctgttgtttatgttgattattggctcctcggacattccaacaaagtagtttatccatttccaagagagggt

SEQ ID NO: 237437 - DNA, 1257 bp, Cannabis indica
tagtttttctcttatatctttaatctgatggcccatcttaaaacgaaaaactagctgattagagctggagaagaaaagacgtacctgtctggtaaacttattcccagacatgagtctacgctgtagaggttcggtatgaaacttgtccaccaagtcatcagcaacaatgaaaacatctccaagctgtttgagccaagctttgacttgattatcaacagccatcttctcttctgcatcaagaagtacacctttgattacttcaatcgtcccaacaagtttctgaaactcgtcctttacaccacaaagcagtctcgcctcttcgaatgctgcagaacccagcatctcaataagacttgcagcaaggtcgaataaaactccttcggccattttcacttagaaggtatgatgagaaagaagggttaatatggaaggaactctagtattgattgaaataatgttgtgttgtgtgagatgaaggacgttctgatttgtaatatttatatagcaatgatgatgtattagaacaagtttgacactgcaaagtaaggtattgttgtattaattgctttaacatggatttgttatattccttgcttcatctttttccaagagacattgtctttgctttatgtgcttattttgtttttgtcttcaatcttgcttttgcatctaatactttgctgaatgttataaccaaagtagcaaactattttgtgtaaatttatgattaagaataaagattaagggtataaaggcttgtattatagttggttgattagacaaatttcagtcaagacttatgttagtgtgttagttgtaatctccaactaatctttagttgttgtaacaaactctgctttgagtatgtaataaagattagtattggatatttcttatataaaattttaagcttctcatcttaatagttaaatccaaggccatcaccaaagaagaatgatgacatgaattcaaacataacaatggtgataattgagctgatatatatagtacttaattaataacagcagttaattgtattttcaataattgatgtcaaattagagcagatttaattaagaattaggagaaagattaagatatctcaaattttttcaattcacacaactatgagtgttatgtttatttatagagctagcttattacaagaaaagtaaagtagcagaacttaacaacttgacaaagaattaattctgttataaacatggtattaactaactctaaacttggtaagtgtac

SEQ ID NO: 237438 - DNA, 1186 bp, Cannabis indica
gtttgcttccgcatccggttctaaaccttccaagaaaggagaagttcatctagccaccctggaggaggtcatgcagggccccgtggcccaagagaactataagtcccgtgctaacggatgggaggcggacgagctccactccaccctgacctgcgctcaccagcttgaaaagattgtggtggtggtaggcatcaaaccttcggtctctgagacctaccaccggctgcctcgcgacgaggactattttgtcaattttcttatttttgttggcgttgcgtcgtaccaactaatccttcaagcttaccgcctactttcaggcttatttattttgtatgccgcccggagctggggttcgcccagtccggctgaaattttgtatttttacgaacttatttctgtccccaagaagggggacaaatttaaagacgaatttatggcctccgggcccatcctttgaacgagggcccagtccctttcaaccatcaaaaacatgtgaaggagtattgcaattgcttcttcttttcctccggtttccaggccatggaccacacggagcttctcacgaagtgggttaggatccctccttacatgcagaccgcgcctacccaagtattcctgtagcgggccaagactttctccacgtatgataggaaggccctcaacgttggggacttagttacgacggagaactgtcggaaggccaagctgattttcgagaatcagtcggtggatgacttcaatctttccaaggtcatctgcccaaacgtgaggactccggcagcggaaagggcactcccggtagacattatcgcctccggggaggaccggtaccagaagtacctctttaagagggtacaggagctggcttacatcaaggcccatgcggctgctgcgaggacccttcgtttggaagctcctccgaaacagaggcctcttagacccaagcctgtggtcccagtttcgaactctggtgctctcgacgccaacacttcaggttctgggtaagtctcctttaataattaagtatgttcctcatgtccgagagtatacccaacgtaggcctattgggttcgatgagcgcctttataggtttagaatgccttccactcggtgggggaatcacgccaaggaatatcatttttcccacttgggtcatttcttgtgtcggtcccggatgggctctgga

SEQ ID NO: 237439 - DNA, 2299 bp, Cannabis indica
aattaatttttttttaataattaaataatttatttatgaagtaaattttttattatattaataaaataatattataataaagaatataaattttagtgttttgattaaaattaaaaacaaatttagtactaaaataataatttttagtgttgagttaacactaaatttaaattttatcattagaattacgcttagtgacttatcttaaatcaatatagttgcttaaaaatgctcaccacgtattattttagtataaaattaggaaataaatcgtgcttcacgtgcatttgtatgttaatttaatgataattaagttataaaattatataaaattttaaattttgacatttttatataatttttttaataatataaataagtactctagtaaattcttattttttttacccttaataacataagaaaaataatttaatattgtagttttaatttttctaattattttaaactaaaaaataataattaattattaatatattattgtaataaagactagtttttaaaaatataacaattgataaatctataaaaaatttattaatttaaaattaattgtctaccactgtatttcacttcgtcactatattcaaagtcgatgtcattactggatctcacttgtaatagttcatcatctaaaaaaaaatatgtaattacaattgacaaatctatttaaaattcatcaattttaaaattattgttatcatcatcatatatcacttatcacttgtattcactattaaactattgtcatcactctatttgatcactttgtatgagtttgctctataaataaaataaatcaaacaataaattaactactcatcacttttatacataaatcaataatgggcaatttttttataaaggaaatatactaaattattggaatcattttttaaaacaaaaaataattaaaaaagtattatgtattagtttatataaagacttcatatataactgtaatgactgcattttagaatatggattagtaaaggcaattagagttaattattgatatttttataattatacatgaatttattattttgtgggtcccattattagaatggacattagagttataatttctcaattccagagattttattaaactctagaggtattatttgtgttatatatgaaaaatgtaattttttataatttttgtttggcgacgacagaaaaggcgatggatggccgtttgagtcacatgagtaagtttagaaccttttttttagtgggataaatatttgagataaatagaataccaggtttaagcgagattgtggttttggaccattttaccctaggcttaaaatggcttaagtttaaggaacaagggtattttggtcatttgaattgtgggtgttgatggttattttggagcttgacaactggccatttagtgtcttaagctgaatattgaatttaggctttattcatttagaagaaattaagaaaaaaatcaagaaattcctttctttctctcttctttgctcgaccaccacaaagaccagcaagatcaaccctaaccctcaccttttttttttttttggatttcaactaaaaattgaagtatttttaagtggaggtaagccatagcaccttgattctctagttacttaagcttgaagtttagtttataattcaattttgagttgtagtggctgttagggtttaaatgaattgtgattcaatttctaagtttaatttgagttaggtttgagttcttgctgctagtttgggggtttggtgtggtggatgcacaagtttgagtttgaaaactcaagcttggttcatctatggcactttttgattctatgtatatttttgaattttattagttggattatgttgtttgaggttattataggcgttcgagaaggtttggtatggattgggcatgttttgagcaagattcaaattgtttgggggaacctagtgcaaaccggttaaccggtttgacaaattctgtaaaccggttaaccggaacagggacatgtttcccgaattgttcgattcgtcaattcgtgctatttttcagagttttagttggtttattccttgataattaagatattattgtataaaccaatagcagaacccttagttaggggttttttctagattagggttttggcgtgtcatttacccgtttatatgattgtgattagggcatccatccaacacgagattttctgttcaggccgactaactcagttgaattcagaaacaaagtaagaatagcatagaaccatattgtatatatgtgaatgta

SEQ ID NO: 237440 - DNA, 520 bp, Cannabis indica
gctgctgaatccatggacaagcaagagacaacttggacgactagaaactattttagtagaatttatctggtccatttatacacgtttaagtaacaaaattttcagagttttggttcattgtagaatagtttggtaaagggtggagagtctactttttatgatcaaataggataggacctaaaaagttaggagatatagttttagtaaaaatgggatctttatgacttttacaagttttattttaattagtttaattttttttttcattaaataagtactttgtagtaaaatccaatatgtttttctatctattcatatttttctacatttaattaaaaaaaaaattactaaaaagtattattagtatctagcattctccgcagtatctatcggtattaatataattaaataacgagtctcatatgatttaaaatattaaatcgttaattaattatagagtgtcacctataaaaaaatgttcaacattattagcgtccaataacaatattttttattaaaa

SEQ ID NO: 237441 - DNA, 1061 bp, Cannabis indica
cctatgcaaataggaatagaaatgtagcatgaaattctaatggtattaaaattaatgaaaaattaaagaattaaaagaaaaagataaatgataagcaaaaggctaacaatattttctcttcttcttttctctctctaatttctaatggcagttactaataagattaagattccaatctaattaatcctaatgccatgacaaaaataagcaaatttcaaaattttcaaagaaaaaggtaaaagataagtgaaaaaaaaaaagtttcctttttttcattgttaattaattttcaaaattctcaaggactaagcaaaagtgctcaaagtcctaattcaattgagaatgcttgaagaacatatacaaatgcctaagaattttaaaattggtgcccatctggtagtttcaagcaaacaagctcagttcacatcatcaagtcaacttcacaaatgtgtaaagttgacttggaggacaaatgctaacccaaaaacattccatggtgatgtagacatcaatgtttgacacttggaatgaaggatgacgtaacaaagttgagtagacctgagtcatagtagttgacctgggagggggccctagccctgcgcccaggttgacttcaagatcgccgggatggaagcttagactttaatagcttgaatctaattcagtatcttttattattctataccatgaagacgtggaacaacctaatccaagtcataggagttaaaattacacaaaacctgcaacccgaaagccaacttgggaacctagggtttcatccagcacccaagttgacatatccaactagggttttagtttttgggatcgtcttagtgcaaaagggtcaaaaattatattgggacgtaaactagacatatcacggacacatatgaggcatcaaaattagaatcggagcaagtttattttttagcacccagggccccaagcacccagcgcccaagttgacaatctgtcaatctgggcgcattccaagtatcagattagagattcgaatttagcatattcactgtcttcatcaaaatgggaaaataggtcctttc

SEQ ID NO: 237442 - DNA, 1393 bp, Cannabis indica
aggttgtttttatgattaattttcttagagtagattctatcatttattttgattataaatataagttttcacaattatatttatcaatagatttatataaatttaaattttcataaaaaattctatattacattacttaaaaaaaattaattgatattattttataaagtgtgtttatttttctttttaattttaataattttatgttcaaaaaatttaatatacatcaaatatatttatataaatttaaattttcataaaaaaccctatgttataatacttaaaaaaattaattgattttattttatagtcaataatattattattaacaataagttgaagaataattttgttaataaatctaacgggtaaccatttaatttataaatatttgtttaaaataatgtttacatgctgtattaaagtagaaccctagagccttattgatggggtcaagcatttgtgtacataaaataaaacggttgtgtacaaaactacaaattacttgcactatacatataactgatatgatccacaaccaactcagaaatatatatatatattttatattaaaatatataatagcgaattatttactaaaatattctataaattcaaaaactggattatgtcaatttttcctcgaagaactacaacgtggattagaaaataattaatttagagatgtcatccatagggccatacaaactttacattatccggttttgctatatattctttgttagaataatttagtttactagttttggagtttgaaaagttattatatatgagagtggggtacgtgggtgagttgctttgtttgacattgaagggagtcaaaggagtggtatcctaagaaggaagcatgtttcgaggcagaaacatgggaaattatcgctttcatgctgtggatatgggtgggagtgagtggttcattggtggcattgcctttgcctttgccattggcccactacttacatgctattgctacctaactcattatctcaaaccattcttacgttagatgttagggcactcccaataagttctctcactacctatttattttacttcacatatttatattacacaatatatcaattttttttttatataatctaaatattatatctttacatacatatttattgataaaaacaaagaaaaatacagagaaaaataaaaaattaattaaagaaatgaataaagtgagaaagaaaaagtaaaaaatatattttttcataactccattattcattgaactatatctaaagaaaaatttcttaaaatttaagataaggtataataactaaaaatttaaagtatttgatgaagcttaattttaaactcttagctattttattttagcttttaacttttaactttaata

SEQ ID NO: 237443 - DNA, 785 bp, Cannabis indica
tatctaaaaaaaataaaaaataacagatttagcaaggaaattcagaaatttattgaaaagtagtttatatatgttatatatggtattaaattttcaaacaattacatttaacaaaattcgtaaattctaattaagaagagacagagtaaggatgattttcatcatataacaatgtagaagctggcttccaataatattagagtacttttatcggcaattattcttttcttcttattaattttctaatattattatcaatttacagattaaaaagtagattaaatatcatttgacatactttataaaagttatggatcaacccatcagttctctcttttttttttttaagtaaatcagatcatcttatgtcaatccatcagtttatttgtttagtgagtacaattcagactcttttgttttgtaaaattagtagaatatataaaattaacataatatttaacttctatcgaatatgcaaataagtgatataaagttaaaatataatccatttaagaaaaaatgtgctttaataatgtgtcaaaaaatcatacaaatttattaacacatatcaattgttataataaatttaacacaacatttgctataattcaaaaaaaaaaaattattcactataaatgcacaatttgattattgacatttagcttatttttattattttattaatatatttaattataacattaatgatgaattatttattattttttattgttttacataataaaaaaataaataatattaataataaagttattattattttt

SEQ ID NO: 237444 - DNA, 861 bp, Cannabis indica
ataaaatagattacattgaaatggagttttatttagggcataaaacccaacacataaaccctaaaaaattacccaaaaaaatgtgaacccgaatcgctaaaccaaatggagtgacaagatgcaagataatcataacctaaaaaaataacaaaaaaaggagaaggatgagacacttgctgtttgaagtcgagtagtcgagttgtgaagaattctgcgaacggagacgggatgaacgacgtgatgagttttttgaacacgtgaggtcgaaaagaaaatctgagtaaaaagaaagaatgtcaaagacaaggagggcatgcaaggtttcaggaagctgggatgaaaattttccggaaaagcatgagtttttgaaaagattgtgaaaagtggattctttaccgctttatactttgaacttagtaaccgtcagatcaaaatttagaagatccaatggatacaaaatgaagagaagtggaaaggatggctcattaatgcaattaatgtcccttgaaaccacaaaactaccaaaatcaaaagcatggatattttcaaaatggattatgacaatcatacccttagtaatcatttaaaaagcacttttcaattaaaggactttttaaggggcaattatcgagctggctaggcttagagaatctataggccaggtcaatcagataggagaagaaccatgcattactagttgttatgctttcgcacaatagagatgtgaattcctaataggacaagaagaaccacacgttgctggttgtgatacttttgcccaaaagatatgtgaattcctaaagtggatggatgactaggacagcatcctccctgccttccacgcagaagtaaattgtcata

SEQ ID NO: 237445 - DNA, 1151 bp, Cannabis indica
aatagtagtacctaacacattttaaacgtgtcaccttgcatttagttaacaaaacctactaaaaattattacattaaattttatgaaactcgatacttaattgcactaataacgatattaacatataataagagactagacattactggtgccttttaacatttctcgtaaatatttaggttagaattagaagttgactttaattcaaaattttgttgaagccgttatgattcaaatgtgtaatcattcatttaataacaaagttttaagttgatctaagtctaaaactctaataatttatttattcattgatagcttttccaatttccctaggcgtgggtagcaaaggggccagggcccattagataggcccacataacggaccaatacgaaacgacgtcgtcagaaagcttttcttagctaagctaagagcgtcataacagttcaaattgaaaatgggcgggcgagtcttcttcttcttcttcttctttcttttatagtttctaatccaaaacccaaaaaacgagaaagaagaaacaaaaaaccccaaattcatggcgaaagaacgctccaatttccgattggaagcgaacgagaacgaattcgagaccgacagtgatgtcgggattcattttcctcctcctcgaacgcctctcaacaccattgccgatccagctcagtttcattcccgtcgacattcctattccgatagaaagatcgattacggcaatgcaactcctccaaggccgagtcgtgtagtttctggagctggagcaaaggtgaagactgcctctaaagctgcgctgttatcatcatcgttgtcttcttcttctacttcgtgtgaggtcgaattgccgcattttgagctacagcacgattctactttctgggccgatcataatgtacaggttctgattagaattcgacctttgagtaggttggagagtcacgctacttgtttgaggcaggaatcaccgcacactttagtttggcttggtcatcctgaaactcgatttacattcgatcatgttgcttctcctactatctcacaggttattatacttctcttagctcaatcagttgttaacaggaaagtatttcatttgttactgtttcataacggtctgtttcatcttcctcctgtgtaggaa

SEQ ID NO: 237446 - DNA, 714 bp, Cannabis indica
agggcttgcttgaacaagatgtttaagatgctccgtcgtcgatcatcaccctggccaccattatattagctatttgtacctcaacaactaaaggatcgttgtgaggatagctgacatgataagaatctgattctccgaaggttataggttcacattcgtagtgtttagactttagaggatgttctgcaacctccacaactttagctcttggttcatgttgaagtgatcttacatacatttctaaggccttcctcaaattcccagctaggtgagagcctccaattacgatctccagcctgcctgcaactggcacatgttggaaaggtgcattgttcctagctggagcttcaagtcatacataccgctgaagagcaacatgatactatctgatgagaaactctatctcatcccacaattgattactcattagtgtcatgactgtaattgttgtggtagtgacagaatttgaagggaagaggtttgtgatatgacattattgactgtgtagtcgtataaatgtcctctcttggcaccaagagaatggagtaggtggtgaagcaaggctcatactctcgtaagggcttgcccacaaccttgggcttctttcctaaggggaattacttggcttaccaccgttgttggctctctttcctttgttctaacctcctttcttctcatttccatgggtctcagtagcaggggcttcaaagtctg

SEQ ID NO: 237447 - DNA, 1664 bp, Cannabis indica
atagattcttcaactgtcattatagaaattccatgacattctactagatgaattagatgatgtcaattctcccttctactgctccactcattctgttatcgctggcttttcttttaatttgactgaacagcacagtgaacaaggatggattcaaacctaatttagagactcatctaattccattacttgcatcaaaattggagacatctctggactcgacagataaaaattctacttcttctaaagatgctcatcattcaatgcttatgaaggtatgtcttgtgtttttaaacaggttactgggtttgtgttggtaacttctacaggatattgttaaaaagttaataaaaacatgtctatatttatcatccggctctaaatcaagtttctgttctgcataccctttacaatgcaaggtgaaacggctttttgtgtgagtgttaaaatcatatcacatatcacttcacaaaattggagaaaaatcatgaaaaaaaaagaaaaaagaaaaagtcaaaagcatttattggatgtgaaaaagagaaaacacatttttcattgtctgaaaagaaattggatatcatcctttttttcgtgtttgcaatctcttcactctttttatactagttttggaaatatcaatagtgtccatttaaaaggatattaataaatgcaaatgtttcttctgtggacttggatcgaatttaacacttgcaatgtttctaatactatctaacaatcatccgtaaatctcgtagctgctagctgggttctttctttttcattggtaactttttgctctcttttagattacatggtacttgtttggttttggatggatatagatttttacattaattaacccagatggcataatcaactttcttattcaggttttgtcagatgagcttagttgtgatgttgatgacataatggatattgagttgaatatttgtgatactcaaccaagctgccttggtgggggaaacaatgaatttattttttctggaagactagataatcttgcttcaagttattgtgctttgagggctctcattgactctagtaaatctagcagtgatttattaagtgaacaggcaatccggatggttgctttgtttgataatgaggaggtaatcaatccatatcaagtttacactgtagttttatcttcatgcttgttaattttcattgcatttaaacctgaaatgccgcgtatatggaatttaatgtatatctacctttctagaactacaatgtactattttattaaactcttaagttatgtgattgaaacaaatgcaagtataaataatggatcaaaaaaaaaaaaaagaaataccatttttaaatgtatcagtagttgtttataaattcatctagcctaaaggcagcttgttttttctttgaaaatgattgtcattgtgtggtctcttacaatttctttcgtcttggatcccagttttactcggttctttgcttatcagataattatgtatgtggagagatgatatatttggctcacaactattaattctaagtctaggtgggttcagattcagttcagggggctggtgctccaaccatgtttcaggccattagacgcataagtagtggtctaacagattcatatgctagtgaaggtgcttttgagcgcacaattcgcc

SEQ ID NO: 237448 - DNA, 1164 bp, Cannabis indica
gatatataatccaattcaatataatacaatacaatacgacctaatacggcgttccaaacgaaccctaaaagaattaactaattaagttggagaaaaaaggttcacacacttacaatatacataagttgatctgttgtattcacaggcacagctgttgttcacttgtttaatttggctccatattttgatgttacttacaggacaagtccttttaagaatgtttttctttaatatattttctttctgtttaataattatatttttgttaattataccattaatatatccatgcataacttaaattccatttgattcactattacaatattttctccttttttttaatatattttctgcagccattactattaattagtacgttaatatataaaataatttgactctacatttttgtatgctattacattgtgtccctataatatacaaatggaaaaacataagtatatacttggaatttgtgtaaaattgaatgtaaaaatgatagattaaactaaataaataaaaaaaaaaaagtttaaaaactaaaatttacatattcataaataataatactgattaaaagtgtactcatatttataattaaaagtgatataggtataatattaacttaagtttaataattattttatcttcaactctaattttggatccaccactaagttgacaactcaaaactcgttcaccatttttaatatattttttcatcctcagtattatttttcctttaatataaagacatgtttgtacagtacttataaagtctctaatataaagttttattcacagatggcaatgataaatatatacatcttaattattattagttttacccaatcaattattattttatcaataaaaaaaggtacacttattattatatttattgtacgactcatataacatttttaattagcacacgtaaacgaaataataatatcaaaacaaagaaaggtattacaagctcattgtgattattttgtttttttttgaacaaactcgtagttatatattaaagaaactatacttcataatcgttacacaatatgtttttcggtacagaattgatcggtattacaagctcattgttattattttgtttttaagactcaatcaaaagatgccatagcctaattaaaggctagt

SEQ ID NO: 237449 - DNA, 514 bp, Cannabis indica
aaaaaaacaaaaaaaaaaagacataaatgaaaaagaaagaaggcccacaaaagcatacatgggaatgcacagttctcttcaatgagttaacgacaagcctttcaatgaagaaagtggtggagtgagtggggatgctactaaataaataaacatacaattcttttaacataattatcatggacatgatcatgcagtttgaagagtttttgtagggtccaataactcataataatggaaaaagagaaaaataaataaaaaaccaaacaaacaaaaacaatgggtaatgcaagaggtggagtatctaattgttattaaatactaatagtgttcaatatcaataatatttagaagcactatgaaataaaatagttgacgatattcaataataaatatgaattgttgggctattaactcaagtttcacattaaaagaatatacaaaagttgttagacataagtatttcaccttctccattagtatgggccttttaagaaagtattcaaaaacaaaaccg

SEQ ID NO: 237450 - DNA, 838 bp, Cannabis indica
aatggggttttatttagggcataaaacccaacatcaaccccttacaaaatggcgctttaaatatagttacacctttttctcacacaggatcagattttttcctctctgccagcccatggtagtgcgcgtacgtactcttgggcacgctttatgcccaaaaacttgtgtagagactattttttaagggagtgacctttgtacaacacgtgccccaggtcgtacaagggtcctcatatgtaactctagaccacacgattaagaaggttcctagcagtggattgcagatcatcctttctgcaataccagccttagcaacatgtagaggacgtaaccctatgtaggtaaaggatatgcactttacccaatgtgtgcctatatatatcctcgttcttacaaagaggagggggactcttttgatcgattgttactttacaagaatacctagttctatttctttcaatacaaagttgttacattgtaatacattataatcttgtgatatctgccctaagaggctaatgatattgactcgtggactaaggatcattaacgaccaaaccacgtaaaaacctaactgttcatactatttattgcttattatttccattattttctcaaaatactgagtttcattgacctcaaaaaatggtcaactaacagttgggtcgcatagatctgatgtttgccacatgttatccaaacataataaaaaagtaataaacacaaagatttcttataaaggtttggcacccttgtgatagtgggttatgacctactccttttttagttgtactaatactgagggaaatactatccagatcactatagatgggatctg

SEQ ID NO: 237451 - DNA, 551 bp, Cannabis indica
ggaacattgtccaagttgaaacaatgatcagggtggaatatagcagctctagccaaagagtgagcaactatatttactgatcgttttacaaaataaaaagaaacattacgcaaagcatgaaataaagttttacattcgctaatcactcattcactaatatagaataaattttgtttcaaaaaaatatagaataaattttatactacaataaataatacatttttatttattttttttatcactcattaaggtaactaatagttttgttatattctcacgtttttacattttgttataaaaagtaaagttaattttaccattaatgtatttgagtacaattataaattttggatcaaatataatattaactattttgtaagctaaatttaacacaaaatatataatattaattaaaatagtcttttaaactacaaaattagaaagtctaaaattttagtaaaattatagtattaagctgaagcttgtctctttttgggcagacgaaagataattgactctaagaccctatgtaatttttctttttttttttt

SEQ ID NO: 237452 - DNA, 1301 bp, Cannabis indica
ttttgttagtctttgttggttaggtgtggctatgagtgacaaaatgtgtcactacttttttgtattagcttgtaaatatttataatctgacctaattaaataacaacaagtgttatactatttactacataatagagcataatactttagagtactagaattgtaattttttttacggggtgatcaaaattattcatgaattaatagtgcataaatctataatcggttagaaccttctcgaactaggatagctcatcgtctaactgaatgacatgttttgtcaaatcataacgtgcaaaattcttatcggttgcgaaccacgtgaaataaaactgcctctaaaaatttagactattttaataattttgtcgctaaaaacttattaaatttaaatataaaattttaaatagttacgacgtaaatattttcaaaaatattaaatatttctaactgttaataatagataataattttttgaatcatattttatgtatcattccaaattttattaatattttactttaatgtctttggacaaattccatcaataaaaatatacaaccttaaagtatgatttttaagtatccacatgtcatcgagccattaatatatttataaaataattagcttagtacctaacccattaacccaatacatataattgcttaagaaaaaaaaaaccaattaaatgatcacctaacaatttagccttcttcgaaattgttttgacttattgtttaaaataatgatgtacggttagtttgacatgtattgcagtaaataacaaatatgtttagttaaattttatacagtattattacgataataaaatttaatataatgcgaatcgtattatttaatacataacaaaatgattcatattaacttgtattataatacttagaaagggtttggagttgtttacaggacccgaatccaagttcgaacttagactcgcactcaaacactataccaagacccattcgaacctagaccctaactcggatctcgaccctgaatatggactcgggcctagacctggacactagattgggacacagaccagggtcccagacttggacactataccccgacctcgaacctagacccaaacttggggccagagtctaagtctagggatagagttcgagtcaaggtctatggtaaatgtaatttaattttacacaacttattaatacaagtcaataccatatacatactattatattaaataatattaatataatacgatctagctaacataatataatgttatattatacacttacaacttacaagta

SEQ ID NO: 237453 - DNA, 690 bp, Cannabis indica
ttttttgtaattattcattatttactattatataaaatcatattctataatttgataatgctggtgggcaaaattacctaaaaaattgcaattttcccttacctacatttaggcttcattttataaccgacgcaataggtgaaaaaaaaacatatttcaacaatttatgtgtcattttgtaaccgacggtataatttttttgtgaaggttttgaaatgccacaaataatttcgcgtcatttccaaatcgatgcataagatataaaagaagaatgtatattttgtgacagtttttaaatgaagataattgttttttgcgtcatttgaaaaataacgctaattaaaaaactatttgcgattatggaatatacgtcgattttctaaatcgacgtaaattctttaaatggcacttacaaactgacaagaattgtattttttgtggtagtgtcaattagatctcaatcttgagatggctatactttaagctatttgtattgcttgatttcattgacttgttcattaccagcttactcttaaggtctagcccatacttacatctgggaactcggtagtgaaattgagtgagagtgttaatcatagacttggacatctatgctttcataatttattaaaaagtgaaatgaaaatttatttaaactttgggtaaagacaataaatgattgaatactca

SEQ ID NO: 237454 - DNA, 723 bp, Cannabis indica
gtaaaaaaaccctgtgttcatttttgttatagcttttattttttctatgtggaattattaccgtgaggctcaaatttagttaacgaaaatttgcgttaacactgtgcataacaatatcataaagatattggataagcaaatagaaatttttgcatattgctctattgaacgtgcaaatgctacaatgtttcaagtaaccatgaatgatggaaagcgcctaactgttgatttggatacacacacatgcacctgtagaagatggcagctgacggggcttccatgtggacatggtttggccacaatattttttgccaaacatgaagtgtgaggttatattcaatcgtggtaccataaactagcttacaaaacagcttacgaaggtacagtgggcccagtcccgagcctagacaactggccaaacaaaggaagtaatcctatactacctccacataaaaataatctctccggaagcccaaagaagaaaagaaacttgagtactaattagccaccccctgttaaagaatgcagctgaacatacattatttataatatttgttctaagtatttttgataatttaataatgtaaaatgatattgaactataaattatatttgtgtaggttgagaagaaaaagggagggcgccctcctgtcaaaaatccaactaaagaaacaatcaacaagaaaaaaaaaaaagaaagacaaaaagactaggaaagtgcag

SEQ ID NO: 237455 - DNA, 977 bp, Cannabis indica
atttatcagaatcaatatttattttttctttaattagaaatattctaatactaataccataataaactttacaattatctaaatctctatattaaatatgcatataagctaagtgggttcatgttcatatatgaatagtattagtggtgtagaatggaatatttgtttggtggaatagattttccctcatctcgatttgatctaatctttcttttatctttgttttgtagatttaaggatatttcaattcatgatattaatgatagtaaactactttttattggtcataaagaaaaagcaatgtatattataatataaactacgtacggtggagtggagacatcatctgaatccaagaatataaatgtacatgttttatattttatacatctaatcaatattcggttctcacttctttaatttgtttggatttaattttctctcccactctcattttctttctttactctttaataaaggatgtttattacacatctcaaactaattaaatatatggtgatgattgcaacgagttaaggagtaataatagatgttccttactataattcaatattattattggtcaatagtgcataatattattattattggtcaccattgactaacaatatttcttaaaagaacctaacatacttaattatattaataacaagataacaataaaaacaatattaaatttacacgatcggtactttttagtatttctcttgttgggaatcatgggcttccatctcaaaaacaattggctggagtagtccatgttcttatatatggctcaatactttttagtactttttttttaatttacaatttgagtttccaaaatggttgcagcgctaattgcaataggggtttctatacaatttttggttgcaatttaagttgcagcgctagttgcaataataatttccgtgtaaaattccgtaaatatcaaaaaaaaaaaaaaaaaaacttag

SEQ ID NO: 237456 - DNA, 1548 bp, Cannabis indica
tggctttctttaggccaagtggaggaagtttattgctccggggccttctacacttggactaacaagcatgatatgggaaccagaatcttttccaaattggaccgtgtccttattaatgaagattggttagatcaattcccctacaccgaagcctgcttcaagtgggattgtatctcggatcatagttattgcatcgtcaagagcaacagaatcggtaatgtgggcatcaaacctttcaggtattgtaaccattggtccttccatagttgctttcgtgagcgggttttatgctgctggaacaaattttctgatgctaatacagttggtgaattagtgaagaagctgttgagagtgaaacatgttttaaagaagtttaatagggaagaggttggtgatgtagaaaagctctataattggtgcaaagctgatttatagatcctaataacagccacttgcttcaggaagagaataggctaggccatgagtatgctgctgctttgaaacaatactcttgtttccatcgacaacaaagtaaagtttcttggatgcagaatggggaagataacaccaagtatttccattctttaatgaagaaaaggaaaatggaaaatcggattacaacgtttgagtcacgtggtaaaattgttgatgactattctgaagtagttgaacatcttcttaaccatttcaggaactttatgggcaagaaaagttcagctactaggaggttgaatcaggattgcatccagcaagggccaactcttactttagagaaacaagccaaactcatcagatccttcactgaaaaagatgtcaagaaggctatgtttggaatccattccaccaagagccctggcttagattgatttggttcggggttttttaagagcctctggaaagagattggggcggatgtttctaaggccattctcaacttctttgaagagggttcaatgccgatatctttgaaggatgctgtcattaccctaatcccgaagactcaagatcataaggatgccagtgattatcgtccgatagcctgctgcaacactgtgtataaatgcatttcgaagatgatttgctctagactggaagaagttcttccttgtttggtgagtgacaaccggggggcctttgttaaaaatagactccttgctcataacatcatgatcttccaagacctcctcaaaggttacactcgaagaaatgtttctgcaagatgtataatgaagattgatttgagcaaggcttgtgacacggtggactggcactttgtggaagacattttaaatagcctttgttttccttcgagatttattcattgcttgcttgtctacttgagaggtatgaattgcttccttttacttaatggtcggattcaaggttcatttaaaggagaaaaaggtcttcgccaaggagaccccttatctcctctgctgtttgtgttgataatggaatacctatcgaggcttttatctcaggtttcgaacaaaaaaggctttggtttcaaccccctctgtaagaatctgagactaaccaacctctgtt

SEQ ID NO: 237457 - DNA, 1103 bp, Cannabis indica
ctcagggcctctctgtatgagtcttcgtttttcggtcccttattgatcttgtttgccacttatttataattacataggtcgggcggttacttataaagttgactgtgattttcttacaatgatcatcccctaaaagcacggggtttgattacatatcacatagtgtaaatgcggttataatttgaaaatcatatagctgtgattttctcgcttttattgggtcaaaataatcgtgtattaaacacgtctttaattgttgtatctggagatgtctcgaccgaagcttggttacaatgatctcaatagcgagctggggccattttttctttcggggtcgtcgatgcatgtcttgtaacgaccacgattcttaaagagttctttgaggctcatttgaatgttatcttttggctcgccagggctgtaagcctcgctaacgctaactggacaaagctataggaagtcttccatagccagagaggcacctcgcttacttgatctcaagccgatccgattgttacacttagtttgtatagtgtacgctaatgactttcacgattgatacgtgttgctttgcttggtacctcgctatttgcattcaatgatatatgatttctcgttaatatactgagtaccagttcgtatattgactccttgcctaaaacctttcagtcagcaggttacaaatatactctgatacttacgtaattaacgagttatccaataaaaagtgattgcatcgatccacactcctcttatcttgacacgtgtcctctgttgatatggcagccaaatttcgggtataacaactatgttatatactatcataagattaaaattattaaaatatcaaaggagtgtaccataaaatttctatatattttttaataaatttgtgcttatatgaaaaatcctacatgatgtattagtggtaaataattttatatatcttaatgaagtttggtttgaaagtcatatcttctttctcaaaataaaattaaatagttatatattattcaattatataattcatatttgttataattactcaaaataataatttatacaaattactatttttttcttaaaaattatttctcatagaa

SEQ ID NO: 237458 - DNA, 812 bp, Cannabis indica
aaaaatttcgaatagtttacaaaaaatttattttcaatactgtaagttatttaaaatttttcaaaaatttataaaaataatattacaactataataaatatcactgtaaaaaaaatattttaacatataattttaaagtaaaaattgattaaaaaattataatatgagattcttattagaattccttttaattataatagatagcagtagtattatgagcatagttataaatcatattcatgggagactcaatattttctttttttatacataaaatctaatatttaattacatacatattaaaatatagacgaataagagtcggccacctgtgtatttaaaatctaaaaactcgaacattgccttaagtagagccgctttccatctaaatccctcctaccaatgcagccaagccgttcgtgtatggaaagtttcgtacaccataatcctctgcatcgcgtcctagcgtacacaacaccgctagccaatcacagtaaagagaaaccggagataatcagagcccaaacgggctcggccatgagattgggagttgttggcggatctacttacaaaaccatcgtctctttgacgcaatctcaccaaacccgattccttacgatttccacccagaaggaatccatggcggacgattcgctcaaaaaagccgccaaacagctccaatcaaagcccccagtcgtcgccggtaaagatggaggcgagcctctcgctaccggatcggaaaaacctccgccgcctcctccgccggaaagcctttgcctggggattgttgcggaagcggctgcgttcgatgc

SEQ ID NO: 237459 - DNA, 629 bp, Cannabis indica
atattattattcttttatattgatgaacggtcctgattttgttactaacattttcttattaatataggatttaatccattacttttaaataagtattttgtaatataaattaaaggatcatttacaagctttatttcttacaagagtcaaagtgtgacctttgaccacccaagttatgaatattacacatctgccacggtctgaggctcggatcgtgacagaaaaatggtttcacaacacttgatttaattacctcggattgtgtcaccaaatagtttagatttattttaaataataatagtaataattatcttggtatttatatgtataagatatatttataatattagcatccaatcctcactacctggttagtttttggtcctcaaacctaagaaaatgcctccaaaggaaggaagacaaggagaacagttagagaagatgtccctcaaactaatgtccaacctccacaatctgaattccctatgaacgcccttctaaaagccttaagagcagttcccgctcaacagatggatcctgccgctcgacagagtcatcattttcaaatctttcatcagatccaagtgcctgagtttgagggtggacaagatcccatggtagctgaaagg

SEQ ID NO: 237460 - DNA, 1258 bp, Cannabis indica
aaaatgttattaaataaatataacataagagaaacgataacattaaaaaatagttattattaaaaaattataacaatattaaaatgtaatatttctttatatataacataataataatgtaattaaaacctatacaattacatttcacaaatgttattaataaatgtaacataatgaaccataacactaaattaatgttaactattataacatataacactaatataatgttataatatgctatttaataacactgaaaaaatgtaattaaatgtcaatacttttaattacatgagctgtcttaacagttgctaaaatattataaaatatatttaattacatttttccagtgttatcgtaaatgttttttcttgtagtgccttatccaagtgtaagtaaatcccatcgctgattatcacgtcagtataaattcagtgcactgataaatcgtggaactaaataattttgaagcatataatcacaattactttttattgtggcgacatcacaacaatttaactatatgttcaggatttaatagaacttatatattaaacatataataatgtgtaaagtgaacaaagcttatggctgagtcatgatatgattttttgatctttcttgaaagtaaatatgattataatgaaatcagattttatttagggcataaaatcccaacaccgaatcccagactcagactctagaccctgaatttagggcataaaagtttaggggtgtttataaaatacttaatctaattcaatccgcacgatcccattcaattacatttgcaaagtgcggatatccatattcgtgcaattttttttttttttaatgaataagatgatttttcattactccaaaagacattttgtacacccaaagcgcatcctcaaataaaaagtgaggacctcacttctatactatttacaaggaataatcaaaccacattttgtcactattagaaacattctttggccatatttgtgcacattagtacaagtgcggattgaatgttgattgacacgcaaaagtaactgattcagtctaatccacacatgtttttatatatttttaaaaaattatatatgcaataaatattttaatgtaaaaaatactaattttaaaaatctaatacatatgatacaaatatatttcaaaacttagtagctcaaatgtatatttcattcttatttataaggaaaatataatttaaaacaaaattaaacatttctttatacatacaattttttttttt

SEQ ID NO: 237461 - DNA, 950 bp, Cannabis indica
ttaagttttctgtatgaaataatattcaaaaggagtgggaatgaggtataagacttctaacctattttatttgttcattattatattatgttgtttgaatagtggacagtacattgggttcgtattatttaaacaatagatatgtgtatgttgtttgaataatagacagtacaatggattcgcattatttaaactatagatatggataagtagtttgaataatggtcggtacaatggattctcattatttaaactagttatgttgtttggataatggacggtacaataaattcgcattatttaaacaatgatatgattatgacatggttatgatataattatgatttgattatgatatgattattatatgcaatttgataatgtatagtagttagacattatttaaattagacatattgtagcttatgtgccatggtttgaccgagaagataatggttaaatacttgactagattgttgggtctatatggtagatagggggccatttagtagtgagtacaattttactgaacccagccctctgccagttagtccaatagctcgggtttattttctaaagtcagactcagacgtaaccattattgtgtgatttagcttagaaactagttactagttactagtgataaaattaagtttatgtattgttatttgtctaaatatgtgcatgtacattttagttgtgttttatttctattatgtgcctacctgacacacatttccttactgagtttagtaactcacccttatcaaattaccatgtgcagaccaaaggtaactaaaagtttagaaggccggtggcaagtggaactttggatgcttgtgtgtgtagactcgctgagggccgggtcatataactgcgggcggtctaggacgctttgttttatttatttatgatattaaattaattttgcaaatatttttatttattat

SEQ ID NO: 237462 - DNA, 1110 bp, Cannabis indica
ttttatagagttcaaagtattagcgctataaaaaattgaagacttagctagattcaccttctgaccagaagccaattcaaatttggatagcacttcaataatccgccgagcctcagattcagtagccttgcagtataggtagctatcgtctgcaaaaagcatatgggatactctaggagcaccatttgccactttacacccatgaagccaaccattttgttcatatttcttcagtaaagctgtgaaaccttcagcgcaaaggataaaaagatatggggataaggggtcaccctgccttatacctcttgtaggaatgattgggccaacttcgttattaccatgagtcacacaatagttagccgatttcacacacttcatgataagccgaacccaattctcaataaaaccaagctttcgaagcattgcttcaagaaaattccattcgattcgatcgtacgccttactcatgtcaagttttagagccatgaaaccttccttacctttacgtttcctctttagatagtgtaaaatctcaaaagaaacaagaatgttatctgagattagtctacctgggatgaaggcactttgattttcagagatgatggaatccatgaacggtttcattctgttaaccatgacttttgtgatgattttgaacaagacattacataaagcaataggccgaagatcagacatacgttctgggtttctcgtctttggaatgagaacaacattagcatctccacaatgatcagcaagagttccatgttcaaagaaacaacgcacattttccacaactttacctcccacaatcggccagcatttttgaaagaaagcaggagtcatcccgtcaggtcccgggctcttgtcagggtgcatttggaagactgcttttcgaacctcctcttcagtaactgcttgacaaagttccaaattaacaccatccgacactgtagttgatacacaatcgaccacttcagtacaaacactacccgaagatgtgaataaattgttgaaatactcggctacaacagattgcaaacccgagtcccatgaaacccaatttccattagcatcacgaagctcattcagctgattattctttttcta

SEQ ID NO: 237463 - DNA, 931 bp, Cannabis indica
tttttttttccattttagtgaaaaagtctaacatggatgaaagttcaggggtcatgatttagtacatgtcaaagttcgaggggcataatttggtagatatcaaagtctggagagcattgtttagtatataaacaatcactgaaatagtaaaattgaatgaaattagacaaaagtctttaaatctaacaatcttaatagttcaaggggcaattttcttttcatttagaaaaaaaaaatgtatccaaaaagattaacaatcacataaaaaaggaagaaaatttatctttgtagtttctaaaattgaaggtgtcattgttatcatatttatgaacacctctaaaaagatatgttctcttacttttattgaaatatttttcttcgttcaagctctttgctcttaaaattttttccgaaaacaccctaacagtgacttcttaattattttgaagtctttaaccaaagaaaagtctctatagttagacgctaaaattttaatattgataaatcaaaattgagccaaccacaaaggacactaaaactaatcgcaatatgaatcataactaaaatataaatactatacaaaactgtcaataaatgcatcaaacaagccataaaaatggtgcaatagtctactcactactacaaaatggatattttgcattggctaatacgttaattaacgcttaaactgatgccaaaaaagtagtgtaatatttttttgtcatttgggaactgacacaactttgtgtcggttcaaaacttatatttttcttattaatgtcagttttgaattgacacaaaaagtagcgacaattacaaaatgatgcaacctttaaaaaagcaaatagaagaaagggataattacactatatactgaaatttctaacttttttacttttatactgttgggcggaatgtttttcaaaaatac

SEQ ID NO: 237464 - DNA, 1272 bp, Cannabis indica
ttagggcataaaacccaacatttacttgaattgggtgggaaatcactcaaacactataaggttcaaaaatttgtgaagaaaaagaagagaaatttgaaaatagaagaggctctctatattttctaattttgtctatcaaaatagtcaaattaggttatcagaataagagctataatattctatttatatgatagctattagggttaggtttagaatttataatggaataaaaaaaaattggttttatttaaacccttatggccaaattccttagtgggccttagctaatgggtttcaattttgccattttattgaaacttatcttttttttttttctcaaatgctatgttttaattctaactcaatgaatgtcaattctatctatttaatagttataattaattatcaaataaatttttcatttaacttatttattaattagatctttcaaagtctcttaattaataaataaaccttaaaatctcttttcttcttaaataagcccttgcttagtgaaaactcataaataagacatagtcttattcaaaattctaattgactaattaaaatcaagtaattgagtttaagataatattatctcaactagtgtggggaccatgagcatgttgaacatccaaaacttcgaaatttcaatttatttttagaaagtgatcactattgactatggactacgaaattaggatataaaaatgtaatctttaatccattttaagaaataggaaattacttcaagctaaaagaagttttatttcttcattagattgtctcatttttgctcgaaaaggctcacagaatgcaaaaatgatcaaaattgaggatctccaaacatttttccttaaaaacacataaaacaaaaaccaagcataaatctgtagaataaaataataaaaaactaaaacacaccctaaattggactctaaaaatgcataaaaataaacttaacaaattttaatacacaagtatacgcagtcgaaacaagtaatataatgataagtaaagtattatttccacaaaaattgattaccaagtaccaatcaattaattctttagttctatttgatgaataataatttttggataaagagtgaataaaataatataataattaaaataacaataataaaaataaagattattatgatccccaactatcctttattttacttcataatgtaattatctaatttctcttcttcctattcaattgataagttgattgaagaagtttataatctggttaagacttataaa

SEQ ID NO: 237465 - DNA, 3835 bp, Cannabis indica
gtttttacaaaaacacagaatctgaaatatttacctatgttttatggtagttttcttaattgggttctttcaaaacaggtaccctttgatccatatgatagaatatgggattctgatatgaactatacaccatttcatgtgtcagctgggtttaagattcaacatagtttcaatgtgtctgaaagtcttaaggagagtcctccacctgccattcttcaaactgccagagtcttggctagaagagatgttttgacttacaacttgtctcttgatactcttggtgactgttacatcatcctatattttgctgggattcttcctgtgtttccttcttttgatgttttaatcaatggggaggttgtacagtcaaactatactgttaaaacttcagaagttagtgctttacatgttacaagaaaaggactaaaaagcttgaatatcacacttaagactgcaagcttctatcctcaagtcaatgcaattgaagcatatgagatccttgatattccattagaagcttcatcaaccacaggtaattgtaaacaatttaatctgctgcatacttgtagactattaggacttaggatccacattgaccaagtatgagattggttagtagtagtacataactactctaatgctagcttttgggagttagttctacccaagctgttgtaccaagtggtatcagagtcatccactctcaagtgggactgacgtcgcggatggggtgatatgtgaattaggcccaggccacccccctccaaaaggggatgtatccaagtatgagattggtttgtagtatataactatttgagtacccttttcttttaggcgagttctacccaagtggttgtatcatatccttgatgagatgattaacatatttaatacttggttaacttgttttctacaatctttttcagtttctgctcttggggttattcaacagtctactggtttagaacttggatgggaggatgatccatgttctcctatatcatgggatcatgttgaatgtgaaggaagccttgtcacatcattgtataaaacctttttgagttcttttttttttaatctctttcatcttgggttttgaacttaatgttctttctcttgttagggagcttccaaatatcaatctgaggtcaattagtccaacttttggtgacttactggatcttaagaaattgtaagtcagagatttgatcattcttctgtgataataacaaacatttaattactaatactatttaactcattacatccatccatgcttggtttttgtattcccaggaatttgcataacacttctcttggtggtgaaattcagaatttgggtagcttacaacatcttgagaaattgtatcatcaaacccttcataaactccattttttgtttttctcaatcatcttagaccattattgaatcaattattattgacaggaatctgagtttcaataggctaacaacctttggttctgatttggagagcttagttaatcttctaagttttgtgagttttgtttctatattaaccaagagaaaattgacattttcccatatattttcttgacaatattgttgcattctttagagcttgtttttcctttttatatccagggatttgcaacacaatagattacaagggacagttccagacagcttgggagagttggagaaccttcatttattgtatgaaattttcagaattcttacaatacaaaactctctcttctaatctcaataaacatgttgataatttttcttgacatgatatcgtctcaggaatcttgaaaataataggcttcaaggtgctcttccaccatctttgaacagagaaagtttggaagttaggtaaagaatttaggaataattgcaggttaagtatctaaaattttgagtttgttacgggcataaaactcaatgattttttttacggcttaagtaactcattgttagtgaatttgtaattttcatctagtttcgtcagtacagattttgagtttgtactgatgaaactggacaaaaattaaagttataccaacaatagatacttatgcttatactacgtacaaactcaaaactttgaatacttatgctgctatttatccaaacatttacatcacatatctttcatgcatataaatgcatctaaattttagtattatgacataccatttttcatgcagaacatctgggaatctttgcctttctttctctgcaatggcttgcaacgacgtgtcgtctaccccttcacttgagacaccccaagttaccatcttagacaaaaagcagcacaattcttctgcatataaccatttagctattatacttagtgtcactgggggtgccttgcttgctctactctgtatctcagtagcaatatttttctatgtaaggaataagaaaagtgctcatgaagtctcatacacacaaagtatgtaaaaccatgcaaaccccttttctcatttgaacttaattactttctttcttgctttttaagtgatcatttctttttcttgccattcaagatattgcagccgatattcgaaactggaattcagctaaagttttcagtcacaaagaaatcaaagctgcaaccaataacttcaaggaggtgattggccgaggtagctttggatcagtttactttggaaagctacgtgatggaaagcttgtggctgtgaaagttcgttttgataaatcccaacttggagctgattcttttgtcaatgaggttatctatgtgaactacacattgagtttaaggctatttattataatttaaagttactttagtaatggagtatgcaaataatataaacaaacacaattcaatttgatacatatcaaaattcgagggacatgatttgatacatgagcagtcactatactagggtccattagtaaaattgaactgaattgaacagaagtactcgaatccaacaatcccgatagtatatattaaagttttggggtaaaaatcataattaaccgaaattttatataccaggacttgaacagataagttctccttgttaacttcttttaatgcttttttccaatatcttggaatgttttcaggtgtgtctcttgtcacaaattcgccatcaaaatcttgtgactttagaaggattttgctatgaatcaaagcagcaaatacttgtttatgagtatctgcccggtggatcattggctgaccatctttatggtatgttaatgtgaatccattaaagcaatttcattgatctatttctgatatgagttgcagggcatccgttattaacacatatcaagttcatttcaggtccaaaaagccgaaaagtttcgctgagctgggttcgcagactgaaaatcgcagttgatgctgctaaaggttcctttcttttccataactataatgtgaatttctgaaagaacaaagatctcatatgaagaaaaaaaaatacatttcttttgaaggacttgactatttgcacaatgggagtgaaccaagaattatacaccgtgatgtgaagtgtagtaacattcttttggatgtggagatgaatgctaaagtttgtgattttggcctctctaagcaagtgactcaggcagatgcaagtcatgtcaccactgttgtcaaaggcactgctggctatcttgatccagagtaagattttctctcaagtttgtatactctgaaataatgatatgtatggtcacactatggtagtgtttgattaggaggaatgaaaatatgaaaataagaatgagaataaaaataggaatggaatggaatcaaatttaaaatgcataaaaatggtcatccttttattttaaaatagaata

SEQ ID NO: 237466 - DNA, 682 bp, Cannabis indica
tgacatatgataagtaccgggtgtaggtatgggctcaacttattagacaatgtgatatattagtgccaagttgtggcattggctcacctgattaggtggtgtaatgatattatatatgatgttgcattatgacacaggcttgcctgatcagacaatgcaaatatatgagcatatctatttctatgcatatggctggttatattacctactgttgaacgttatgtttgattattatatgataatgaaatgtatcattagctattttatgtatccttctttaatacttttctttttgagtctatatgactcacgggtgctctgtggtgcaggtaagagcaaggaaaagctagaatagccatgagatgatagtcttctccagcaatgtacatattgatcccaacgacctgtgtgccgagttcccaggagttgttttagattggctgtatctactgtattttgaattgttgttgtatattgtctttttagtagaccttttataatagtgatccccgaaacacttttttgctatcgaatgatgtccggttttagtaatatattttagtcaagcaatatcttattacgaataattctgacaacttcaggcaaaaagaggcattcgccaattatcgagatggtgcgatttgattattatttttttattgaatttagttatttatatctt

SEQ ID NO: 237467 - DNA, 1065 bp, Cannabis indica
tattttgttgtgtttgcatctttttcatctctcaaaactaagttaccattatccaagagctgaactagtggttcctgagcttgtttcgacgagtttgaagaccaaacaagcactctgttattactctgtccagaaaaaagcacaagatctcctttgtcgtttatactcaacgagccagatgaatccttgatcggttcacatcggtttgcaacccaaacaacagtttggttacctgtaatgttgttgtaccaaattcccaagtaacgattctttgatgaactagctgttggagtaaagaatcccaatccaaacattccttctttggataccaataaagctgtgttgtaattatctctcatgatttcggatggtctaagggtatcaaccacagctaaagttgttgtaaattgagaaaaaactctcaaaacaacaaaggtaaccaggaaagaaagaaactccataattatatgattaatctttctagcttatgatgatatgaaccatttattttctctgcttcaagtgatcataatgcctaaaaacatcatacaagagaaagggaataacttcaatctgagtaagaacaagaacatgaatttcaatagccaaaacagaaatataaaaagattcaataaaaggagaataaataaaatgttcatagaatgcaattaatttgagtagaattatatttatcacttgaaaaagagaaaaaggccacttgtcttagacatcaccccattataaatatttgagtatgataaaaacagaaccatagaatgatcaagttcaaaccagatcaatagatatagaaagaaagtgcagaagtgttatgtttaaataacttcaagaacatatgcaaacacaataataagaatataccttgttaatgcagtggtgtatgtgttgtggatttatgtttgtatgaatgttgttaatgatgctattaattaaagtcaacacagcaacagatctttaattgttgtgtgaattcaaaaagaaaaggaaatattaactctggaaaaatgcaagtggtgggtactaggtaggtagtagacagtgaaagct

SEQ ID NO: 237468 - DNA, 561 bp, Cannabis indica
taaaaaataaaaaaaaaaaacttagtatgatgtaaggatgtaaaacaataaatgaataaattaaaagactgctattacatttttcatataaaattagaataaattatcaaaatcataaataaactaaattcagatatatctacaactgaaactatatatttaattaagtaaatttataactcaccaaaataaaaaaataaaaatatatcctaattgaaatagtaattatttaattaaaaaatgataataatgtaacaagaaatgaaaaaaaaaaacaatttaatactctatatgagtaacagaaggaaaaaaataaaacatttaatactctataaagaaaagaaaaaaaaaagacaaataactttatcaaactaaaatagtttagaaggagttgaatgaacttactgcaataaatctactattgtatcttctaagcgatggattaaactgaacatgttcttaaaattaattatgatagttttcatactcactttattttaagtctttttttgtatataatgatatgggaatcgctcaggtgtaccgattagttgactcgtt

SEQ ID NO: 237469 - DNA, 3230 bp, Cannabis indica
aaatatatatataaatatgtatgggttgaactggttgtttttacatgtcaatccacatttaatccgcaatccacatttaatccgcgcaagtgtaaatttttaatttttcaatctaatccaagccaatctgcttaagtgtagatatctgcactttgtagattgaatcgtacattgaattagatcgaatattttatgtcaccctgttttttttttagcatttctagaaaagagtgtttttatattaacaattgggaacttatattttctgcataatctatacacattttctagaaaatattttattgtttataatgtactgtttatattggaagaaagtaaataagttgaacgactatacatgtaaatgttattagaaacctttgggaagggctggaaatcaaacttggccaaagacaaaaatgaagttaatcaaggacattaaagatgttgtatatgactatatgtacatcacattaatatttaacaaattttataacacataaaaatcaaggactaataacagtgttgggaatttcagctgcaaagaacccaactcatctaatcgctgtcatcactcccataatttgaacacaaagactgcagtacgctgccactgcacccgtcgggtttcttctcctccggttttgacttctttattaaaattgttgaagacttggtaacaagtctaatcggagcctcgggatcttttcgctttcctacaaataacaaacaacacaatggtttcacaattcaaattggtattattgttattattattgtatggagagcaaaaacatggtctatggtttgttttaaaaggcagaaataagaaaaaatcttacaaaattcaagaattaatcaaatggagttaattacctctggaagctccattggaaaccagaatagcactcgaagcctcaacactgctagttggaggacgaattagaccgataccattgttgtcatcatcatcatcatcgtcaacatcatcatcatcaatccgccgaatgaaatctttggaattctgttaatgtgtcatgaaatagaaacaagttattagaactaagcaacctacaaagttaaaaaaaaaaggaagattgatatgatatacttacatggaaaacaaccgactttattagtgcttcatcctcctcctccaatttcttctcctgccaccatattaatcataacaagtcaagggggtttcattcaggagaataaaaacatgtattagcaacttagattttctatcataccttttgagcagcggtatgttgcagggcctcaagcattgcatctacactgacagtagcgtgtctggactgcaaaaaacatgaaaatctgtattagtattagagaatacatatcacatagttgcttatgaaacttcaaagtttaagaacaattaccttcatcgacttcatctcatccaatgcagccatgatatccatctctcttttggagtctagtgttcggttctccagagatttcatagcatcccccacttcttctaattcccgtttttgtttttccttatctacttgctgaagagaaaacaaatctcattagaaaatgaaagagaaaaactaaaagaaaatcaaaatttatcattgatataatcacttctacaaaattccaagaaattaacctcgtcctcatcacgccaaggttcaaaatttctcatggcaccagactccacaacataatctgaattttgtgggtctgttttcattgcaagctcagccgagcaccgagtgcacttgaaataaaatctaaatatttggatacccaaataagtctgcaaaaataagacataacaatatagtaagtgttcactctttgaggctcaaacacatgcaaaaatcaactgaaaccctaaaaatgtactaaaaaatgttcataaggaaatttagtgagaaaaggaaaacctcgccaacgacgtcttccttgcgggaattgaactttgtacccttgtagatgtaattaccacacgtgttgcagcggatactcatcggaagcatcatccgaaccttaatttgctggttcttaggcctccgaatccgagggagctttgatggatcgaaatctggtgggtagtacttgttcagtacctttctttctcccattttttactttagacttctgtccatgaaacatttacaagtatgttagaaactttaccaaaaagataaagaaaaacttgaacaggattacaagacatcacaaagaagaaataaataatggagatctgaatagtgtgagaggccattttaaaaatgtgtacaaacgatacaactatgtaacttaatttggaagcagatggcttctatctaagtacaacaaataagctctttagcaattatgataccgtcaaataattatagcttaatatctttatgacatgcttacaaaatcagctacgcttatccaagttctttcccaaagtaataattctagctatacataaaatttaatcttggattggtatgatatggggaccaatcaattagagagagttgaggcatggacttgttactgtatggccaaacaaaacgccaccaaggctaaactcagtacaaagcattaagctaaatcattctactttgttagtaaacttttcattttggcttagagagagacagaaaacttttgttattcattttctactcactatagcctcaaaacactagacagaaagcttttgtcttaaagacagacagggcagttagacctctctacgctgttcatctgacccatacaatagtccacactcttttgactcccttgacactcaaaacactacttagagaggagacccctaaactacctaaatgtgcaggtgacaatcactagcaacacacagcatagccaaccatactaagtataagtatcaaatgagcaaccattgtgaatagaccttgaggagcagccactgatgttcccaaattcatggtcagttgtataacaacaagttccaaaaagaaaaccaactataacatccccaaatgtcaagaaatttatgtacttgaaaaagtaagacaagctacaaaacaataacttcaaaacttgtttataatcatcttatattatattccaaatactttacttagtcgatatgattgttttgctctataacacataacacacgtactagaacaccaccgacaccaatctttaataaaaataaaatgactttctttatgcaaaatagcatccaacgattatacata

SEQ ID NO: 237470 - DNA, 1694 bp, Cannabis indica
taaaaaattactattttctttgttttaggaacaaaaaactattgtgaaggaacaaaaaacacaagagaatgtttaaattcaggtataaaaaggaacatttaaattatttgtctaaattatgattaaagttttgggtttatttattttacactatagtatatatttattcggatattaaggaataggtgataaagaataaactcttgctactataatattatattaagattattgtatttttattttgcactatgatatatatttattctctgacaggatatattaagaaatagagaataaagtataaattcttgctactatagtagtagattaagattttagtatatttatatgtctcagaggtatatcttttcaatgaggtatggtatatacaaataatttatttttattacatatcaaaatgactatgatggtattgtttgttaggaacaaacaacaattgtcgaagaacaaaaatcacaaaaaaatattaaaatgtaggtataaaaaaggacatttagatcatttttgtatattatgattcgttcttggtatatttattttgcactgtagtatatatttattatgtgctaagatatattaacaaacaagaagttaaaaaaaattcttaatataaaattagattaagtttagagtatattcatattgttctaaggtatatcgtttctatgggatgttgtatataccaataatttaattttattaaatattaaaaagcactacaattgttttgtttgttaggaacaaagaataattgtagaggaacaaaaggcacaggaaaatattaaaataaaggtataaaaatgaatatttagattaaaagtatatgatgatttaagtttggaatattgaagttgcattatggtatatatttattgtgtgataaggtctattaagaaataagtaaaaaaataattaatggtggtatatcattttaaatttgtggtatatttattgtgtgctaaggtataatcttttttgaacatagaaaattgatcgtatattaatttttcactatggtatatctgtttaggtttatggtacatggattttgtatgctacaatttatatttattaacatgtgaatactaaagtttgatgtatatatatatgaaaacacacaaaacaaacatacctatctaataaagaatataccaataaatatatgattgcagactaaaatatgttgctacatgatattctaattcgttcaaccaatgatatatcaagttcacttttgaatatatcttatttagtgctatattttagactattcaaccaaatatgaaatataattagaaaataatttctaatattgtggtatattttattttttaagaacaatgatatatctagatttgcaacaggtttcacatagaataaagatttaacattaaggtatatttttattagaacattcacatattagatttacttttaggtatatgaggtttgttattcaactctattgatttgccagtatattactttgagagtagggtatattgtttctatgtgaggtggtatattaagaaggaactaaattatattacagtatattgctttttatgtgcggtggcatataaagaacaaaagacaaagatgtttattgtaagttttggcatctttgtacgattttaacagtgtggtatataatttttttaagtaacaat

SEQ ID NO: 237471 - DNA, 1125 bp, Cannabis indica
aaaaaaaaaaaaatcaaaatgattcctaaacatgctttaagttaatttgttaatttttaattgagttttttttttttattttttagttaaattattttttttcactaaaataggtgatgtaaataatttaattagtagctttttatttattgcttattttaaaaataattttttactttttttttcaaaaaattaaatcaattaattaataaaaatactataaaatattttttttatagtgtcatgtcaacaagtccttaggtttttggataggagcaaaaatttataagtgttatagtttacggtcatttttgccaaactaaataatttagagagcaagaatctaagagttcgtttggtatactttattaaaccgtattgtattgtatagtattatattaaattgtattttatgtaatacttttatgtaaaattatatgtagtattaacttttaaggacacataaatatataatattttagtataaattaaagtttaatgtagtattatataaaaatataatatataatcgaattcaatataatacaatacaatacaatctaatacgacgttccaaacaagcccaaagtgctatataattcaggggataacaaaactttttgtcccaaaaaatttaactaattgagtttttgtcatgccttacatatataatcactagtgtatacatttagggcacttctattgtatgggtgtggccttttgccaccgataggagtgtctctatttccacaagggcacttgaattgtaccggtgtggccttttcccctattttcacaataagagaaattatatagtttaatttttttttttatatgacactatatatattaatatggtaatggtttaagatctttcatcccttttaatgaaattttgaataatttataataatgaaaataaatttcaaattaattatttcacccacctattaaatagacttaaaataatcaaacatactttgtattgtcaaaaatgtaaattattcatcatttttcaaaaatttatgtcaagttataaataactacattactcatcattatatgaaaaatgagattgtaatacatctgtgcttcataaataggtagttgaagctgattttatac

SEQ ID NO: 237472 - DNA, 2362 bp, Cannabis indica
ttggaaaatttctaattttagataagaggatttttttttaaatatatacataattaaaacaatgtcattgaaatatatatgttgttgcagaaatatttataaaattaacaaatggtaattttaacaattacattagaggtgggtaatatttaaaccaatctacttaagctaaactggtccattcaattacaaaaagttgaatatcatattacaattacattgaatcggatgtaaattataaaaaatattaaataaataaggtttaccaaaataagtagaaaaaacttatgaagctagtaagtcaatggaagatacttataagtatcaatacataaaacaatatttcaacaaagaaaaatatatgaaaggaatataaaataattaactaaatatagagtttatataacaataaggtaatacatactaaaaaaaaataacctgtaagatattttttgttgactgcagataagcatcatcctatattatattattttgatttgttttattttgtgttgtaatactcttcgaagtaccatgtcccccaaaaagaattttctatccttgacgtgcttattaaagtatctcaccaccttttgttggtaggcttctaactttaagttggcccgatctcttctttcttcgattttgtcaagggattatgttaggcaagtgtggttctcttcttggtcgtagaatatcctcctatagagatggtggttctaattttacgggcagcattgcttcatagccttaagttaaagcaaatggtattttccaggtggtcatcctctcggtggtcctgtatgaccaaagtacttctggaagttgttcaggccagtttccctttacctcttcaagacacttttttagtgtgtctttgaaggttttatttacagattctacaattgcctatttacttgtgggtgaacaactacagagaagcatgtaacaatatcgtgtcgattatagaagccagtgaacatatcgctgtcgaattgtttaccattgtctgatacaatattctgtgggaggccgtatcgacagatgatgtttttaacaacaaaatctaggacattctttgaagttatagtggccagtagttttggccttagtccattttataaaatagtcgacatggactacggcatgttgtactctttcttttcccttggggagttgcccgataagatctattctccatatagcaaaacgaccatgaagactgcatttatatgagctcgtttggtggagctcttgggatcttagagaaccttttgcacttcttacattttttgacaaagtccattgaatcctcgattattgtaggccaaaaatacccttgtctgagtattttctttaacagactctgccccctaatgtgattgccgcaaaaaccttcatgaactttgaccagtagccgtgaagctttttctttggtaacacacctgaagagtggcattaaaaaactacaattgtacataattttgtctaagattagataccaggaaactttcctcattatttttcttgcttcgttcctgttttctaacaggactcctaactggatgtacgctgctatttgtgtcatctaagttgggctatcatccaacatatctaattcttctggaatagcggtacttgggtcttgtaggtactgaatagggaccatattggtcttgttcactgctgtgctactggatagccgagcaagggcatctgctgtggcattttcttctttgaggatctgtttgatggtgcaccttttgagatgacttagtaagtcttgtatcttacataggcaggccatcatcttttctttttcgggtagtgtattcacctaggacatgattaactacgagttgagagttactaaaaatgcctaggtactctactcgaactttgtgtgccaatttcaattcggaaataatggcttcatattcgacttaattgtttgaatatctgaaaccaaactttatggcaccatgcagttgctgcccctaggtgtaataaggaaaataactgcgccagatagttgatccgtgtaggaaccatctatgtgctacttccatgtcaatttttcttgctcttgctctcagttcttctttgtcttttgtttatgatcttatacttgcttagagctttcaggagttacatttgtgcattcagccaaaaaatcggtgaaagcttggccttttactgctacccttggctggtaggttatctcatattctcccaattcaatttcccatttaagcaactcactattgtcgcagtggctggttggtgtatactctaatgggatgagcttgaaagtaagaccttaatttccttgaagctagtagcatgcaacatgttggctttt

SEQ ID NO: 237473 - DNA, 1115 bp, Cannabis indica
cagttagaaccacagtcactccctaaaccactaaagttagatataaaaggttttacccgaagatctaaaatatgcattcctaggagcgtcagaaactttccttgttatcattgcatctggtttagacaagaaacaagaaaagaaattggtacaagtccttaagaatcacaaagaagccatagggtggaccatggctgacatcaaaggaattagtctttcagtatgcatgcatcgaatccatttagaaaaaaaaatgcaaagccaacccgcgagtgttaaaaaaggctaaatccaaacatgaaagaggaagttagagatgagatacttaaatcattagacgtggctattatataccatattttttatagttcatgggtcagtttgatccatgttgttcctaagaagtctggaattactatagtcaagaatgcaaacaatgaattaattcccactaaaattcaaactggagggagtgcattgactacaaaaagtgaatagcctcaccaaaaaagaccatttcctgttatctttcactgaccaaatgcttgaaagattagttggtcacgaaagctactactttctcgatggttattcgggatacaaccaaatcctgattgcactcgaggatcaagaaaataccacttttacatgtccttataaaacttttccttatcgcgcatgtctttaggcttatgcaatgcacttgcgactggtatggttgaatatttttttgaaaatctttatggatgatttttcaatttatggatcttcttttggtgaatgtttacaccatttgtctcttgtcttgattcattgtaaagaaaagaatttagtgcttaattggaaaaaaaaaatgttgttttatggtaaaacgtgggattgttttaggacatgtaatttcatctaagggaatcgaagttgacaaagctaaaattgatcttatttcaaaacttccaccacctaagaatgtgaaagaaattagatcattcttaggccacgctagtttctaccgaagatttataaaatactttagcgaaattttacggcctctgtaccatttacttggaaaagataatgaatttattttcaatcatgattgtcatattgcttttgag

SEQ ID NO: 237474 - DNA, 1496 bp, Cannabis indica
catcatgataccaatctaccactttaattcaaatatagcattagatagcctgaaggacttttccttgaactgaagatctctgattaagtaactcagacatctgcagagaaacaaaatcatatatacacatacatatatttatttattataatcccattaactgaatatgcacaggaaaaattcgtaaattcactcagcaccaatccaattcatacaagtttacaaataatagtttcatgtctgctaaactctagcctttattccttttggtataatctgaagtccaaatctaatttatagtaaattaactgtgatttttcaaataattctcattgaaaaatgttctttatgtgttataggaaccagtaagggcagagcaatgttaaaataaaaatataaatagaaaagattttatatccatttaagatgtacccgaggacaggagacacgggtcttcctttccactcaattcttccaattgtctcaaatattaaaatatcataaaatcttaaggttctaacataagcataaaatttatgattttgagcttcatacaatcatagtatgagtcttctttctttagactcaaatcagtcactttcattcataagaattccaatccagctcaaatttagcataatcaagttaaccacagagaaattcacagagagtaaagataaaactcttacatgattgaactcgagaatatccgatttgaaccgaattcgatctcccttatcacagcgaatatcctccgaaacaccgggaatcgtgagccctccaccactaccaggtatcaaaacatcccttttgttagcctcatcgagcaacaccaaccttccactaccatttccagtcaaccctttcgcgaattttaacctgaaatcactactaagatcaaacccttttcccaaagcttctaacgccctcaaaccaacgggcttttccttcttcacatccatagacgacgccacctcagttgactcctccattcccatcccaaacgaaaaaacttgctgagagagcagaaaaaacaattaacccatgcacaaaaagtccctcggaagatggaagaacaaggaggagcagaatccgggcgagaacggaggcgagtcaaagatggaatcaaacatggtagatgagtatatttatacgcaaggaagttgtttgacgaaagttcaaaacgaaatcgataagagttgaattttgtagcttcttacgtatatgaatagtaattttttattatttattaaaaaaatatttatatatacatatatatagacaggagatagtcagtcagagatagaggcttggtgatgacgtggcgtgtgttttaatggtgtaataaagacaaatgaatgaaagtaaatggaccacgcgatgttgacgattgactgtgagagccgaactaagctttttttttttcttttgcttaaaccgaactaagcttgaaagctgctctctcagtctctctctctctctctctcttctttaat

SEQ ID NO: 237475 - DNA, 675 bp, Cannabis indica
ttttagttgctgttgttgctgttgttgtttgatattgttaatagaagctaaattatgtttacatatgtgatttgagcatgttttggttggtagtttgttgattgagcaagctttgagttttagaactcaagcttggctctttaatggttttttttttttaattttgagcttgggtagttgttctattgcttggaaaatatgtattggggtataatatgcaggtctagaaagtttggttaagtttggaattgatatggttgagctttgaatttatttgggttttttggggaaaaccgggtaaccggttttagcagctggggttcctaaaaaattcaggttgtcaatttgcgttagttttaggtttctggttggttaattccctgctagtttagggtattgccatattaagttgcagtagataggtttttggttcaaaacctaagtctcggttgtgatttagcatgtcgtttatccatgttgttatcgatgtgatttaggagcttgtaattcgtcgagcagttgttccactcaggttggccgacacacctgaatttggaattgaggtaagattagtataatgtcatgcatatgttattacatgtttagcatacatgttgtttatgcctattagataacattaatagtagtaatagtataattagagttgtactgatt

SEQ ID NO: 237476 - DNA, 1496 bp, Cannabis indica
tttacaagttacctgatccacgtgtcccttttcgactggtccacgtattttgggcgaattcaggggcaacatggtctaatcaagattctcgtcttcactcaattcttaaagccagatatttcaaaaactcagattttttgtctgctcccaatgggtataacatctctttcacctggagaagcctcctttggggacgagaactccttaaaaaaggtcttattggaaaatcggtagtggcaataacattcctatttcagcttctaactggattcccaacatatctcacccaacttttcttcatccccttgacccttcccaatctacaatgtctttcttcatcaacccaaataacacctggaatatggaaaaacttttgcattatctcccaaattaccaagcaaaggctgtcgtccaaattcctcttgatccaaatccccaagataacctcatttggggacatcaccaatctggcatcgttatggttaactctacatatcaccttgcttcctcctctaccaatgtcaattccccatcctcatctgatcccaacgtctttaagcattggtggacatttttatggaaccttcccatcccaccaaaaattaaacattttacttggaaagctttccatcacattctcccttgtgcacttaacctgtttcataagaaagtcctcaaagaccccttttgtcacttctgtggaggcagaatggaaactgtaacccatgcacttattgattgcaacagagcccgtattgtttggaggcattcaaagttcaaagatttttttacaactaatagaggccaggacattcaagactattatctccaaggccttgccactttgactaaagatgaacttctcctgctcattagtatactttggcatatttggaacactcaaaatacagcactgtttaaaaagtcttatagtattgaaaatgtggaagagtttgttatgaattatttgcaggaatatcaggaggctcaaaggatcaatggagcagatacaccttcggctgacacaagtcaacagccctccaattccaagcctagttcactacacattatttcaaatgacagtatcagtttatttgtggatgcagcactggaacatactaattgtgtcacaggtttgggttttgtcataaagagaggctctaaccaagttttagcttctgcatccatccaaaaatcaagtgctcctacttctatatttgctgaaggtcaagctttattggaaggtctttcttggtgcctttccctccagatgcagcctaatttcatcataaccgattgtcttaacctcgtcacgaaagttaatggccagtggcaggacaactctgctctcttaagtcttgtttcaaagatcagacagtccttttccaacttccctgcagcctccttgcaccatctatcacgacaattcaataccgaagcccataactctacaaaggaagcgctcaggcaaaggagggacaactaaggggaacatt

SEQ ID NO: 237477 - DNA, 758 bp, Cannabis indica
tttaaattttatttcattcctattcctatattttcattccttccaaccaaacgcctaaaagtcaccttagttctttcgcaagagaaaaaaaagatgtttactttataatcaatcataaaaaaaaggctatgattagattattttactaaaaaataatagtggaaattacacattctaaaaatttttatacaatttgtggaaaaattatgtaatttcttttttattaaatggggaaaatttctaaaaaaaaatagaaaataatcagagaaaaattataaagtaactgtttaccaagagaagaagagtaattggtgactctcaggttacctaggtaattcgttactatttttcctatatttttcaattttttttttttttaaaaaaaccataaaaatgaaaaatttccaaactacccaaagtaaattttgagcaaaagagaactataaataattttatataataagataattagcaccaccttatcatattatttcaaaagcttaatgtaatgcttgcttagtatatactatacactcattacttatgataatgataatttaatactctgaaaagggtaaggtggtttcattttaattttgtttgtttatttcattttggtgaagaaatcaaagttggcatatcgtgttggaacaaatacttacctaacttgttgttttttttgtttattttggtcaccttcttttaatacctgttatcaaaaaaataacagtggaaaaagttagagagagagagagaga

SEQ ID NO: 237478 - DNA, 1166 bp, Cannabis indica
tacatctttcatctattgaagaccaaatcgaggtttgttctttatttgaggagttttttaattagagattaaggtgtcctacctaattttcgtgttcttattattttgtatatttttttatcattgtaattgtctaataatgtttcattggacgtgtaatacaaaaagggaagttttgtttttaagattctttttgaaaggaagagaccatttattcttttctttgtactaatttcaacaaagcgacgcctgtagaaattagattacgccattattattaacattgagggttttattatgtataaaaaatgtttttgtaatttatttatgaactttattaattgattttattttccatgtgtgatcttgttgattatgatatcttaaggatatttattgagaccaagttaaaaaacttcttatgatcacttctaaattacgttttcatttatgtgttcatcggatttgtcatgttattaatggtatttcacatattattaatatgtgactctttaatttcattttcaaataaaatctgtatttgctcacaatctataacagcttgatcgctagtgataattttggttattctatttggacatgtttttctatggtgaaatgaggtttaaatatataatatatagtgatgatagtaggagcatcaaattacatcacaaaactaattggtgataaagtaaaattataagtcatgttattatatattatctattgtaggtgatcattcaattaaattggtattattttacttatagtacattaaatatgttataactacttattttatatttagatccaattcaatacgtacatcaactcaaatttataaaaaggtaaattgtatcgattataattattcaatttttttaatattatattatttaataatttattattttttcacattatgaaaatcaataaccacttaaatattgaaaataatcaagatccaaataacatattcaacactataataaaatatttaaattttattttgtgcatattaaaatattttaaattttttataaatttacaaataattctaaataattacaactacacaaaaattaaaccaaaaaaaaagtattttataggcagaaacaaataagcagcgttgtgtgactacttttagatattattttggaatt

SEQ ID NO: 237479 - DNA, 687 bp, Cannabis indica
tcacaaataaagttggcatactctagaatagggtactcaaactagcaatttcaagctcaaccttttcctacaacgaaactttcacccctttcaattctacaatttccatccaattcagaactttagatacaggtttttcccattgtcacttcaattcataatcaatttcctgctttatcaataattctggtggctcttttgaaaaggcatctataaacccttgaaccacaagattgtgtcttagtctcactgatgttcactttgcaatatttaccacactaactgaatggttaatacatccaccccataataaaacttctgtcttaaacgctgtgcttaatggaattcagaatccttgaaccttgcccacaaacacgaatgggtcctcaccttctggttcaagaattaccatctttctttcacaatcgataattgcattaaactttacaaatcaattcattcttaattcatcctcaggatcctttaatgctagctcaactattacaaccaagcattccttttttccccacaactttggaagggatttgaaccacttgctggagataactagttcttcagtaaaaaaatagggtactagaaccacttggtaacacatccttaactttatacaaactcccaatcatccttctcgaaatataggaatacgttgcaccggaatcaattaaa

SEQ ID NO: 237480 - DNA, 917 bp, Cannabis indica
atagagtttatgatctctgaaccattgcggaaccatacgaagatgttgctcatgttctgcttctgatcgggagtacacaagaatatcatcgataaacacaattacaaagttatcaaggaaatccttgaatactctcttcatgagatccataaaggctaccggagcattcattaacccgaacgacataacaaggaactcatagtggtcatacctagtttggaaggctgtctttggtatgtcttcctcatggattctcagttgatgatagccagatctcaaatcaatcttgaaaaataccgtcttaccttgaagttgatcacacagatcattaattctaggcaaagggtacttgtttttaatagttagcttgctctgctcccgatagtcaatacacatgcgcagagtcccatctttcttctttacaataaaactggagtttcccagggcgatacactcggtcgggtgaaccctaaatccagcatcccttgaagttgtatctttagctcttttaattctgcaggagccatacggtagggtgcctttgacaccgattctgctccaagtatcaggtcaataatgaaatctatcttctgttgtggtggtagtcctggtaatttctcaagaaacacatctaggaattctttaaccactttgacctcctcgggtctgagtaacacaggttttccgaaatcaattacaaccgctagaaatcctacacatccactgcgtagtaaatccctagccttcaatgctaaattcttgggacacgagaaccttgaaccgatccaacaaaaaaatagttcctcattctctggtttaaaagttaccattttctatttacaatcaatactggcagaatatttggacaagtccatttcgagtataatatcaaactcgaccaaaggtaactccactag

SEQ ID NO: 237481 - DNA, 1863 bp, Cannabis indica
tttatttggattccttgtgaaaatttaagcaattttagttattacggaactcgattttgataaaaaaaaatgaaggagatatggtgatttgaaattttggggacactctatttctaagaattctggagaacaaatttcagaaccaaattaggacatttctatagaaagagcaatcctaattccttgaggaaatttgttaaaaccagatacttataaatatggtaaacctaagttttaactccatctaaaccctaaaagttaaccagaaaaataaatttttgccaaaacccagtaaagcaaaatgatgatgcaattgattatgactaaaaatataccaagaaggaagagaataaatacttactggttaaagaagtatgcttatgaaggggagagctctgtatctgggtttgagacgagcgacgagatgaaatctaggaacgtccaagattagagatcgaatgtgtggaaattcgtagaaagtatgtcaatgacaatgatggcatgcaaagtttcagaaacttaggatggaaatttctcaaaaaagctggaactttttgaaaaggcaataatagtggaaaaaaatgactcctttgccgtttaatacttcgaacttaattaccgtaggattaaggtagaagatccaacagataaaaatgggagagaagtggaaaagagggctcattaatgctaatgatgtgcttcgaaaacataaaccgccaaattcaaaagcatgcattttccaaaatgaattatgacgaatatacttgcggtaatcatttaaaaagtacttttcattgaaaatgaatttataagaagcaattgttatacccgaaattcagttgtacttcagaaggtgacacgtgtcaatctcagggaatatgaatcaacaaatttaatgataatgatgtcatcaaatgcaaaatggaataactcattaaatatagaataaatagagtatgttcataactcgctggctgtatagtcttaagcgagacaaggatatgtaaactatcaattcatgtattaacgagaaatcatcttgtctcggaaggcgtaatatcaagggagctataaacaacgcatagcgaggcatctacctcgctgtatgtaaagaggtattgacgaggagaattagttattagaacacttagcacataacccatgttacaacaactaagtgtaataacctgaatgatatgattgtccagtcaacaaggccttatggtcaaagagcagattcttaaatttattaagtacactgatgctcatgccattgctggaatacgagtaaactaagtcaaggtaagacacctcagcgacatacatttgacaatgtgttcctatccatgtcagcattgaccgccttaaagacggtttaaattaaagttgtgtgattttctaatattatctacacgtatttaaatggagcgtaattaaagcccataattttgaggaatattattataggattcgaatttaaatgtaattaatcgcctacctatattactgtaaatatgggcagattacacaaaagagggggaccgaaaatcttagagaaaagagggagtttactgattgtaaaaccctaattctgtatctagaaatatcttaataagatagaatcgtggactatgcagagttaactggaaaaccatgtaaaaacctggtgttattattgtttctattattcttctaaaaatctctcatagtttctgtgccaaatttattacgaaaataggctgataatcgttagcgaaaatctgcgttaatagaataaccaattaattttgaaaatttttggttgttgaaacaaccttaaatttcatttcaaaattaaaaatttaaactaatttcaaaatatct

SEQ ID NO: 237482 - DNA, 847 bp, Cannabis indica
acagtatcatatgccttttgaagatcaagcctaatcatgcaactaagtttattagctttccttccataatgtctcaccaagtcctaacaaatcataatgttatgcccaatatatcttcctttaataaaacccccttgggaaggagagattatttcaggcaagatatttcagattctagaactcaagagcttagttgcaattttacaaataacattacaacaagcaattggtctaaaatccttaacagtgtttggacatttcaccttaggcaccaaggtaattattgtagaattgatttcttttaaaatgttaccagagccaaggaaagataagactggattggtgacctcctccccaatgatctcccagttatcttggaaaaaatagctcgagaatccatctggaccaggagattttgccccaggaatgctgaaaacagctttcttcacatcatctttagtaaattctttactcgtcatctctttatgttcagcagataaacaagggccaatagaaagcactcttgtattaatcttccttctattgtaaatcttagtgccaagcagctccttgtagtactaaaggaaggctgttgttatttggttaggctcatgagttttgctcccgtccctttgttcaatagacagaatttgattagctcttattccttgattgatactcgaatgaaagaaagcagtgttgcaatccccatcttgtaaccaagcaattttagcttggaggaaggatgaataatttttctgagccacaaccagtttatcccgagcctctttttcttttccagtatatttagtgttcaatggctactggtgaactttcgattgccagt

SEQ ID NO: 237483 - DNA, 2346 bp, Cannabis indica
aagatgcctaaggtttatgagtttcccaatatctctaggaagctctttgagttttgaacattgattgagtttcagtgtttgcaaattcaacaaatcattcattgaatctggaagtgataatagactttcattcccagaaagatccaggtatctcaattctgtcaacttatctaggccacttggcaaagcattcaattcatcgcaagatgtaagttcaagatgccttaagttgatgagtttctcaaaatctctaggtagttcttcgagatttgaacaacaattgagtttcaacgtttgcaaattcaccaaatttgtaattgaattgggaagtgaccagagataaaaattctgtgaaaggtctaaatatcttaaatgtttcaacttgccaatagaattcgatactaacttcatacttgaatcattcaaatccaaacaacgtataaacttacaatttgatattattgcatcacaaaatgtttggtccttggaactaccgagaactgtacgaaactttttggcatgaaccaacagaactgaaagttcatatgctgaataagtattaccataaaaagacacatgatgagtagtttttttcatatttccttggccatttgaaatgacaaaagtagaacattcctctcctgctacttgaacagcaagatcatgcatcaaatcatgcattttgcatttctctataattccacattcatctacttcaacatcttgaaagaatgatccttccaacagaatcataaaccattcataacccacctcttccaaatattgatcttgacttggatctgttaacttgagaaatccttgccccatccaaagattaattaaatttctcacctcaatttttttatctttaggaaataagctacaataggcaaagcaaagtttcaaatgggagggaagatgatcataactcaatttgagggtgggtaagatatcatcttcacgttgataaggtatttttgaaaattccttatctaaggaagaccactctgattctaaacttttcccatgtaatatatttcctattgttttgatggccaaagggattcctttacaccttttcacaatctcctttccaatctgcacaatgctagagttatctagctcttgtgagccatcttcaaaagccacctttttaaacaaagaccaagattcaacttcatcaagaacccctagttgatagggttgttgttcggtagttaagaatttagcaatgttttcactgcgagtagttattacaactctactcccagcattttcattacttgttattaaatcttttaacttcaacaacatagcatggtcttcctcccatatatcatctagtacaagaaaatactgatttccaccaagtacttctcgaagcttctttactaacagttctgttcccatgtctcccgaaatagcctcaccttttgcagactcaataatacttttaataattactctgaagtcaaattgatcagatacacacacccaaatccttaacttaaattgtttttggacttgcccatcattataaatacttttggcaagagtggtttttcctagaccacctattcctacaatggcaatcaccgagacactctcgatcagaactctccaataaaagattatcgatgataactgatctatccttgtccctcccaataacatcttccttacgtacgtagaagtcagcatctctcactcttctagcagttagagtagtttcttgacgtccttgctccaaaatgaagcttttatcattggaaatagaagccagttttttcttgatgccttgtattctacgactcatcttgaaacgaaaagcaagttggttggagctggaaaaaaaggtgcacacctgtggagttgtataattttatttcattttcttacaaataatttaaatcaaattctttttatgttagtttaatgacttattttcatatcataacatgaactcatccagaccacatccagacattgatctgaacccaaacctagaccgccagacctcgaacccagcccaggatctcagacctaaccccgagtccggattcgagtatattttaaactacgaataatatattggtgttgagaaatacgtacctggttggccattgggttttgaggcatgatgagttggcgcctcaaagcttcagtgttgaagtcgtccatcaagtcatctgctttaaaaaccacagtggtgagcctttggagccagttcttgacttggttgttgtgagactgtttcttctcagcatccaaaagcacagcttggattgttgaaatggtttctttgagatcttcaagctcatcctccacaccccaaaccagagagat

SEQ ID NO: 237484 - DNA, 752 bp, Cannabis indica
gatcaatctagccatccatcgcattttccgttgtcgccgagcaaaaattacaaaaattacatatttcacatattaatcaaacaatacccctagagtttaataaaatctccgaaattgagaaattacaactctaatatttatttctaaatattggggtccaaaataattaaattcataaataataataaaataatagaaattagtgcaaattgccttttctaatccaatttactaaggcggtcgttacaacaaccatcgtctgattgtgtaagtgatagtgtaagaggtattttagtaattaaaagtacatgaaaagtataaatgatgtccacattatagaagtattttataaataaaatgtcaatttatatttttcatctaataattcttaaaaattaagtaccatgtaattataaatagataaaaatttctcatattaattattaaagtgaaatatttaaaattgatactagttaaataattatattttttaacacctacttcttatactagacaagggagggaccattttatcatttctctttaatattataaaacaacacccatacataattcttttaaatttcacatcacatttttattatgaaaaatactaatggacaccataaggtgttaagcggggccaaacttaaaatttagtgagttataaaaaaaattggacccttatttaaaaaaaaaatatagtatttttaaaaattaataaaaaaaattattattttaaaaggaaaaaa

SEQ ID NO: 237485 - DNA, 1032 bp, Cannabis indica
agggggagagcctcctctttctaatggataagatccttgcttggaacgtccgagggatcaacagtacgcaaaagcaaaaaacagtgaagaacttcatttcaaggaatggagttggtttagttggtctcctcgagacgagagttaaggctccaaagcttggagccttatatgtaaatatgtttcaaggttggtgtttcacatcgaatatagcgtggcacaaaggagggaggatcatcatagcatggaatcctctaagttttactgtaagtattttaagatgtgcaagtcaatatgtgcatcttttagtatctacagctgatcataaacataccttccttgctacctttgtttatggatttaatggagaggaagggaggaagagtctttggaaggaccttaaggagatgtctaggactgatccgtgggttctatttggagatttcaatgacatactagccaaagaagagagaattggagaccgagtaagacataatgggaataatgctttcctggaatgtgtgaatcagtgccaattagaagatgttaaatacagtgggagttattatacatggagtaataagcaagatggagcggatagaattttttcaaagatagatcgagttcttgctaatcagaaatggatagatagatttcaaatggctgaagtgttttttgcgaatgaaaggttgtttgatcatacccctgcactactcaaaattcatcctgagagaccaagtggccgaaaacccttcaagtacttcaagatgtggagtactcatccacaatacaaggctctgctggaaaaaatggaaggaaaaaattgttaggacttcaatgttccaagttgtgtcaaagctcaaggcattgaaaccggtgtttagagagctgaacaaaggtgggttttttgatttacaacaagccgatatccaagcttgtgcaaggctggctgagtgtcaatcgttgctgcacaataatcccctcagtgatgagctacagcgacaggaagcaatggcgagaactcaatatgctgaa

SEQ ID NO: 237486 - DNA, 743 bp, Cannabis indica
aatctcattaaaatcaccaatacgtagccacgacctacgcacctcactttttatattccttaacaattgccacaagaacttcctctgtgtagcattcggatgcctataaaaataagtcaatgtccaaggtagaaaatcctgtctcgccacttcagccacgatatgtcccagggagctggaaaaaacatgaacctgtaactcctctttccacatcaatagcaacccaccactaagacccaccctgtccacagcttaaaaatttgcaccaaattgaagaactgaacacaatctttccgcttgcactctagttaatttactttatgctaaaaagataatactcgggttaaattcttgaaatgggattgaagagcatgtaatgtccaagggttcccaattccttggacattccaactcagtattttcattgtgcttggcggccttgcaaagcaaggttcgccgcttcaaattcagtgtcctgaagtgagaaatctgtgttttgagaaatactcacctcattgtttaatctagctacagtcaactcagtcccattcgcccctatagatgttccaaagataaaagggtcaccctctcccgccatatactccatgtccctatccatttccgccttcattcctggttggggagttttttccaccaaagtttttccatgaacctggtgtgctctatttttgataaagagtttctttctttgtccataatttgctcaaaccctgtcattctct

SEQ ID NO: 237487 - DNA, 624 bp, Cannabis indica
cttttgaaacaggttctgccccaagtattaggtcaataataaaatatatctcacgtcgaggtggcaaccctggtaattcctcaggaaacacgtccaggaattccttaaccattttaacatctttatgtccaggtaacacgggtttactggaatcaactacaatcgctctacacacccactgcataataaatccctaactttaaatgctgagattcttgggacacgagaaccttgaattgaaccaacaaagacaaatggttcctcattctctggttggaaagttaccattttttgtttgcagtcaatactagcataatacttggacaaaaagtccattccgagtataatatcaaacttagccaatggtaacttcacaagatcagcgctcaattctctatcttcaattctaattaacactgacctaaccaactttcttgatataattaattctccggtaggcaataaggttccaaacccaatttcaaaaacatcactaggcctatcaatctgattaagaactctcgatgatacataagattgagtagcacctgagtaaaataaaatagtaaaagcaaaactgttgataagaagctgaccagtgaccactgaagggctggcgacagc

SEQ ID NO: 237488 - DNA, 1161 bp, Cannabis indica
ataaagttttttaaaaaaataattttaaaaaaaagttaaaaatgatatttttttatgtctttaaaaattaataaagataaatagttataaccactatctcttttttctgttactttatccaattcatttcttacatattattattattattttttttttaaatttcacctttattaaagaagctcaaaaaactacaaagaatgatagaggtcagctttacaaaaattaactaaccaattgggtaaaaagttgagaaaggattgagataacttgttctcaaggctcctctttgctaacttatgagcaatctcattatagtttctatttacaaaattgagctttgtacaaaaaggaaaacgctggtgacgctttatcttgttgtaggtgatacaaacatcacttagattattgtcttctttcttgaaaccatccaccagctgtttgcagtctgttctaatctcaaagtagctgctggtttcaatcgggcaggccttcatagcagctaaaactgcttcggcttcagcaaggatcacagagcatatttgggggatgaaaatcatacttggtgctataggtttaccacatcagcccctccagataaaacccaatcccactccttctttgccattatccagagctgcatcacagtgaacgcagtacaccccttcgggggggccaaccaacggcctagattagtagcaggcgcagtcttttctgtgcataggagatctctgttgctggtgttggttgggtagctattcaacacccaatctattagccgagccccttccattacgggaagattgttccatcttttatttctgttctcccaaatggcccaaagaattttaatcacctcctcaaactcctctttggatagcttatgtcgaatctccatgagaagatcaaacatagagtggctgtgactgtctcgaattagcttatagtaaggcagacatttccaaactactttagccttggaacaagaccacaaatcatgagggagagattcaacatacctaccacactgattgcaaaggggatcaattgtcatgcccctatgaatcaagtttagtttagccgggagccaattatggcaaagcttccaaccaataacttgatccgggggagttgaagttgccaccacatcttccaccaagc

SEQ ID NO: 237489 - DNA, 1314 bp, Cannabis indica
gcggccaatttttggtggggtgaaaagaaataaaaagatacagtggagtacttggaataaaatgtgtaaaccgaaagaagaggggggtttagaatttcgaagcctaatggagttcaaccaagccttactagccaaacaagggtggcggctaattcacaaaccgaatactctcttaaccaaggtgttaaaaaactgctactacccggagacaactttcctcacggctaaatgccctcaaggagcttctagcatatggaaaggaataatttggggaagacaaataattcaagagggagctcgttggagaattggaaatggtcgtcacagtcgcatttgggaagacaaatggattcctaggcaaaatggaacaatattatttcggcatccgagtttggctcctaactctactatccacgagttgttaaatgaagatggtgaatgggataaagaggctatacatacacactttcattacgaggatgtcccttggattttgggcacccccgtgaacataaatatggaggattctctcatatggtcgttcacatcaaatggtgagtatgtggttagaagtggatatagagtagctcgggaattaaaccttagtcctacccggtgttcgaacatggaacaaacacatgagtggtggaaaaaatggtggcaacttaacctcccccctcgaatcaagttatttggatggaagttatgtcataattggctcctagctaaacttaatttgactcataggggaatgaagattgacactacttgtgatatgtgtggtaggtatattgaatccttaactcatgctttgtggtcttgtaaaaaggcgaaacaggtgtggaagctgctgcctttatacaaacacatcaaagatagcaaaggtcagtccatgttcgatattctaacagaattcaataacaagctatcaacagccgagtttgaggaagtcattaagatcctttgggccatttgggaaaacagaaatcagaaaaggaataataagcaagtcatgaatggagaaaggctcatagattgggttttcaatagctattccccgccagtcattaatccgaagcaagggaatcccacaccaaaaatcaataaagaaggcacctggttatctcctcctgaaggtatggtttgtgttcattgtgatgctgctgtaattccaggtcaggtgggcgttggtttggggttcgtttggagagattggaagggcaacacgctctcggctgggatgaattttctccctactatctgtccggcgatcatggctgaagcagaagccattgctgctgctttgaaggcgtc

SEQ ID NO: 237490 - DNA, 795 bp, Cannabis indica
aatgatgatgtaagcgtgtaggagtttttttgtaataaattgtgttaattggatttttaaagtaaaaatttctaaattaattagtaaatcataatctgaccatattttataatatttattctcatcacattttaatttgtgataatataccgtcaaaaccaaaagtcagtgaaataaaacaaaatcaattttaataatttgtaccaatattagaaatattttaatattaaataaaaatattctaatagagactgctcttgacttttctaagtaaaaaattcataatatataagaaaataaaataagatattgttaatcgctttccaataaatttcggcaatacattccatggaaattacacaagtgaatacttaaaaaatcacagtcgttatcttttttgccacatacagtatagtttagctagttttttttttttgttttttttttttttttttttttaagtttaagaagttgttctatatataatagagatgttcattaaaccgcccaaactgcacaaattgtccgcaccacaccgtataaaaaatacagtttaaaatcttttccgatacggttgtggtttgcatttttgctaaaccgcgcggtacagtgcagtttgcgattttaaatttaataattgcggctcaaaccacaccgcactatatattacaaagtcacaaatttatacaatatgtttttcattctttttttcatataagaataaatatatatatatatatatgtatattactttattttttagagacaattcaatatagtgacttgatgattatt

SEQ ID NO: 237491 - DNA, 687 bp, Cannabis indica
aatctgagcttggttcagaaaaagaaatactacgattgattaaaaattgtgataatcttcagcctgtggtttattcaaggaaaaatacctttgagaaaaataaaaatcaccaagtcatacctgcgcaagatcaatcgttggccctgagtgatggttcaacaagtactcaaggtaattctattaccactgctcattcatctcctattaatactattcttctagatgtttctgaaccaggtccaatcgcatctgacttagatgatcttcccattgcatttagaaaaggaactcataattgtatagatattatattgccgaacacatatcatatgatcatttatctaaaacctatagggcattgataactattcagagcttgttgggcctagaaacatataggaagcattggtgaaccgaggtggaacgtggctgtgtctgaggagatgagtgctttgaaaaagaatgggacttggataattgttaaattaccaaaggggaagaaaattgtaggttgtaaatgggtgtttactataaagatcaatgctgatggtaggattgaaaggtacaaagctagaatcgtggtgaaaagtttcacttaaacttatgggatagattgtcaagaagttttctcctgctgcaaaaatcaattctaattggccattactgatggaattattttactaggat

SEQ ID NO: 237492 - DNA, 2288 bp, Cannabis indica
ataaaagtaagaatgtaacaagatatattttagactagagttttcttgtttattaatttcttgataatcgcagatttgatttcttcaatgttttgacgatctttcttgtttcttgactttatttccaggtgttgttgaatcttcaccgagctttgataccactgtaggaaatgcacaatacccaaagtaacccaacaccaactaccccaaactgggtcaagccttggtccccctcaaaacactgtcgtttaaaggtagtataaaaaccactttatattgctgcaaaccctagcagctcactttcttgtctcttcaaaccctagtagccaaaaatcatcttctccttctcctcttcttgctaaaaccctagcctctattattctccaagctatgtcttgagcatacagcccctttccttcacacttgcagtaatgccaaaccaaaatatacacaagaaaaccacaaagatctaaattgatttttgttataaggactagaaggataatatttttattatttttggctgcatagatcttgatcttgccttaaggatggatatacttgcttttcttatggatactagtactttcgagcaaaggaggatttttgagaagtgggaccgttcaaaccgcacgagtcttatgatcatcaagtgcggcatacctaatgcttttagggatgcattgtccgaagaggtcaccgatgccacatctttccttgctaaaatttagaaacactttgcaaaaagcaataggcagaaaccagtactcttttaaagaaacttatttctataaagttaagtggcaaggaaaacaagtattaagaaacttatttccattaggttctaacaaaacaagctatctttctgactgttctccatgtgtacattggaaataaagatgtaaatccaatattacttataattatgcttaaacaaactctgactttacagttgcttatgggtggaggcagttcattctctgcagggccaaaagggaatgtatttaagatggagtaattttccttagtcttccagtttcttcttttgttaaataatttatcatgttttagttttacaatttaaatgttatttattgacaatataatatcaccataatatcactttctttgatttccttataaagtgcactataccaacagatgcagtccttttctgcgttcaacaacatcttcaataactctagtctattgagcatttatactagcatcgtaacttgtaaggctcacactttagaattgtctaggtgaatgtagcttgttatttgttgatttattagtaggatcatataggatctacttttcttttctatatataaattttaggctcttaccttcttctctcttcctttattattattattattatttttctttttgtatataataacagaatagccatgactcattgagtagatgtctatgttatttatatttcaattatatgtgaaataatagctctgttatatgaattagttaagaatttatcattttcctcttgttcaatttgcaaggatggaccgtgcaatgggttacaacattgtgttgtcctctgtaataaaaaggctggatctatccttataatttgtgaattcttcattaaactctacttattaatttgcagcatgttcttttaattttttagttttgtgtataaatctatattaaataatgcatttgaaaattttatttcacataactacaatttcattcgtataaattaataattacttagaaatttaatttttaaccataaataatattttttagggtaaatttagggtaaatactgttatacccaaaatttggctgtacttcaaagagtgatacgtgtcaaccaagtggaatatgaaccaccagatataatgacgattatatcatttaatgcaaaatggaataactcattaaatatagaactaatagagtatattcataactcaatgactgtatggtcttaagcgagataagtatacacaaactattaatttctgtattgacgggagaccatcttacctcggagggaacagtcctgaggaaactacgggtaatgtacagcgagatatccacctcgctacatataaggaaatattgacgagacgaattagctcttgaaacacttagtgtatattccacattataataactaagtttaacaactttgaaacgtgtaggacatgattgtccagtctgcgaggccttatggtcaaagaacagttcttaagtttgctcggtacactggagctcataacattgctggaaggcatatgatt

SEQ ID NO: 237493 - DNA, 600 bp, Cannabis indica
tgaaaagacttgctagaaacaacactgggccatggctttgtggtggtgacttcaacgaaattagaggcattcatgagaaacttggcggaggagggaaactggggtacataatgaagaattttaataataccatagacaagtgtgcttttcgagaactagaagtggagggcagcaagttcacatggtgcaatggaaggacaacgaatatggtgtttgaacgtcttgaccgggtgatggtgaataacaagtggtggaagatatatgcagtagccaaagtgaaacatttaagtaggtggtgttctgatcattgtccgctattcatgacctttaattctattccgaataaggaggagactaatcaaagatggggatataggttccactacgaaaaggcttgggcggataaagataaatgtcaccaaattatcaaagataactggcaacaaggcactattattggatcggctacagactttggggagaggattcatctatgtggtaacttactggaacaatggaataaaaagcaaagaagggacaatcaagctaaaataaaagagttgaaaaaagatgtagaaaagttatcgcgagaccaaacaa

SEQ ID NO: 237494 - DNA, 2690 bp, Cannabis indica
aacatgacggacataccatcaaccccggggcttttatcatcactcatagtacgtagagcagtacgaacttcttctgctgtgtaaggagccgagatgatattctgggaagcatcatcaattgttgttggaatagagtcaatgatagtacgaatagcatgttcatccacctcttggctgctgaaaagagactgaaagtatgtggtaataatgtccaacatagcagtggtactggtttggttattaccattagcatcacggagtttcttgatacgattattggtcgatcgagagtttgcacgctgatgaaaaaactttgtattcgaatctccagatttcatccatgaaattctagctctttgatgccaatagtcttcttctcgagctaataattcatccaagatcatttcagaattttttaaagcctcaaaatgttgtggatctgtactggaagaattttgcagagcagctacatggtcatgggagtccttaatgtctgatttcagattgccaaaatgttgaaagtgccacttttgaagatctgaagcacagttggaaatattggcggtcaattgagctaacgggcaactgttattatgattccaattagacaaaattatgtcagcacaatcatcttcctgcaaccagattttttcaaagcgaaaccttgacttaaactttgggacattgatctgatctaagacagtacaaatagttgctttgagggcccgatgatccgaattataaaagtccaaatgtcgcaaagtaggaacaaggaaagttgaatcccaatgattattggtaaaaccatagtcaagtctctctttcacattgccattgccttggctcttattagtccatgtagttctttcaccttcaaaaggtatttgagaaagtttacatgcatcaagagtggccctaaaggcagtaatttgagaagcattcctggtggagccaccaattttgtcatcatgagaatgaatctcattaaaatcacctagggccaaccacggggacagaggtgctatatcgaagcatcgacgtaacaaggttcaagtaagatgcctctgagaagcacaaggatgcccataaaaaccagtaaagtgtaaggatggaccatcattactttccataaaacaatcaatatgatttgtagaataattattaatagaaagagtgatatgggacttccaaagaagcataagtccaccacttagaccaagccgaggtacttcaatgccatgagggaagtgtagtttatttcgaaatctatcaacattaccagattctaacttagtttccataatgaagagaacacaggggccttgctcctgaacaagcaagcgcaaatgtctgaatgcgcacgggttccccaatccccgggcattccaacttataacattcatggctgtgcgcggtgttgcggagcaacaaccgctgagacatcagactgagactcctctgagtacagatcactggcgctggaaacaggcagagtagaagtactagttggtgctgaagaagccaactgagtagagtgagcatttgatctacaacgtttaagaacattgcgaagagactcagagtcgatttgccttttaaattgcttgttgggattgatattctctgtaccaatatcatactcaagaacagctttgccttttgataaagacagaggggattggcctgctgcagaaggaagtgtggaaacaatggtactaggagtggagggaaccgaaggaaaagatacaggcagtggtggagagtgagggaaatatttaacagtttgtggattgggtggataagttgcaatcatgggttttaatgggaggtatggtgggaaaggaataacagaggcttccttagatgaagtaacaccagttgtcattggtacagtccgaaaagttgatacatgggtggaagaagaagaggaaattaaagatgaatgtggctgtggggggttcgaatactcacgggtagtcagattattaggcaaatggagaggaattgttgatagatttggtattgcagcagtgaaagactttttagcaagtcgagtcataagtggccaaactcctcctttaaagaaatcagtcctataacgatcataattggattcaggcaatggagaaccaatcatagaaggaccatattcaagcgatggttcaacaccattgtaaatttgttcaaggaaagtatgacaagattcaaaaggatgtcctatagttccacactcaaagcaaaattcaggcaaacgctcgtagcgaaattcgagccaaaattcatcttgagaatcctgtagtttaaccatctttcctcgaaggagtggcttggagatgtctaggatggcacgaaaacgcaagaagggtccccaaccttcattcaacgaatcctcatgaacatcaacataagtacccagaagattaccagcccattcagccatctgtttagttttacttaagaatggtaatctgtgtagttggatccagaaaggagtaaggatcatagcttctggactggccgcatgaagagcagtaggagaagagagtacaataaggtgattttggaagtgccaaggttccaagagcaagattttcctcaggtctccaagacagccaaaggaaacaaggaagagacccgagtgatgattagtgatagtgactggaaatcggcctttccaaaaaccactcatc

SEQ ID NO: 237495 - DNA, 782 bp, Cannabis indica
aaagaaatgtggttgaaatctagtgtaaatggcaagagagaaggggacaccaactcaagattattaaacaacttgtaaagcgcccgaaaagtaaagaacacaatctctaggattgagagagatgacaacttaattttagataaagaagaaattatcactttcattcgattccaacttagtaaaatgaattggagtaggggtattcataaaatacttaattcaatcctattcgtacttatacgaattgatttgtattgaaaaatttaaaatctatacttgcagagattaaatattaatgacatgtaaaaataaccaatcatatttaatccacatatttatatatatttgtaaaaaaattacatttataattaaacttatagaaactctgaaactgtattgaattttaaaagcctaagtttctatttatagaaaggtaaaatgactaatgtgcaattaaacttattacaaattgtatgtgggtaaaaatgtcaatactaatagttaaaaccggagtgacaggtggcacccgctgattggttgctttgagtgaggcagtgccacgtgtcatcctttgattggttgaaaaatgagagcaagtggactttttgggctgaagaggaatcgagcagatgaagcccagtcgcgcctcaggcgcgtgcgtgacacgcccagaccaacgacgtcgtgtgctacacgcgcgcgtgggtcgggttggggggaaaaggagcagttacttctagtgtcttctgctgcacgaactcggaggtgccacgtggcaccta

SEQ ID NO: 237496 - DNA, 1050 bp, Cannabis indica
tgagaaggccaatggggttcggcagctgtacaattgtgcagaaagtaagacttgaacctctacatccttcttttgtctgtgaagtgtgtctgttaggatcccaaattgaccaagggattggttagtagtatataactacttgggcaccctcctctcttaggctagcttttgggagtgaatccacacaagtggttgtataaaatggtataaaagccatgcacccttaagtgggattgacgttgcaaaaaggggtgagctatggattaggtccatagtaggccaccgtagagtgggccgccatggacgtcgactccaaagggaggtgtattgttaggatccctcattcaccaagtatgagattggttagtagtatataactacttgggcaccctcctctcttaggctagcttttgggagtgagttctactcaagtagctgtattaagtaatatcagagccatgcaccgtgaagtgggaccgaagtcggattaggggctatgaatggaaggtgcagcatgcagaaggggtgacctgtggattaggcctagagtaggccaccgtggatgtcaactcccaagggggatgtactgttaggatccctcattaaccaagtatgggattggttattagtacataactacttagtcaccctcttctctccggctagcttttggaagtgagttctacctaattagttgtatcagtgtcacaccatagaattgccctttgaatgcatggttttattaccttgacaggcctcccactttatactcaataattgaaaggtttttaagatgataaacacctcatgttcaaccccaaaagtcttatccaaatgtttatagctaaaggacgccataaccatgaaaagattgtagcgagaactcactatgaacatttttaaaatcatttttttttctttttgaagaggttatgtggtacccttgatgggaacattaactttggtggatggtgggtgtagtaacgtccattctcttgatactaggtgaagtcgtcacttgaaaaggtgggtgtagtaacatcaaacatt

SEQ ID NO: 237497 - DNA, 2780 bp, Cannabis indica
gagcagcggtatcctactcatgaattgaactggcacagtcatttttgcactgaaagtttggcgccatcacctgtacgcaaaaagtgcaaaatctacacagatcacaagagcctcaaatactttttcagtcaaaaggatttaaacatgaggcagcgacaatgcttggaactggttaaatattatgattgcgagattctctaccaccctagaaaagcaaatatggtagcagatgctctaagtgaaaatggtccagggcaagtctacaaattgaagaagattttattagagttggctgaagatatgacaagagcggggattgagttcgtggttggaaaacttgctaatatcacgttgcagtttgatttgttagaaagaatcaagacaacccagtagagtgatcctgaactgtaggagttcaaagaaaggcttgaatttaggtcagcaaaggaattttcaatttcatcagacggattactagggtataaggatagggattgtgtaccagccgaaaaatgtattagataggagattatggagactctcataccacacaatattccttacatccggggacaactaagatgtatcaagatgtaaaagccatgtattggtggtcaggcatgaacgatgacattatggagtatgtatcgaaatgcctaacttacaacaggtcaaggtagagcatcagagactagcgagattacttgaacctctgaagattcttgaatagaattgggaagatatagccattgattttgttgttggattaccaagaacaatagggttctatgattctatttgggtaattatggattgatatacaaagtcaacacacttttttttaccaatgcggactacatatatggtggatcaatacgctgatatatatgtcaaggaaatagtttgacttcatggtgctccaaagtcgatcgtctcagatcgagatccaaagtttacatccaagttttgggagagtttgcaacgagcaatgggtaccaatttaaagttcagtacaacctttcatcctcaaactgatggtcagtctgagaggagtattcagatacttgaggatatgcttcgggcgtgtgtattagactttgagggtacctggaaaagtatcttcctttgattgagtttttgtataaccatagttatcaaagtactattggcatggcaccgtacgaaatgctttatggaagaaagtgtcgttgacccattcattaagatgaaggcagtgaacggaagtaccttggacctgatgcagtccaaagaacgagtgcggccattgaaaagattcgagctcgtatgcttgcctcacagaatagacagaagagctacgctgaccaaagtttagagatatttaattctaagttggggattttgtcttcctttgggtgtccccaatgaagggaatttggaggtttggaaagaaggaaaagctaagtcccaaatttattcgcccatttgaaattctggtaagggttgattaagtagcctatcggctagccttaccctctgctttttcaagagttcataatgtgttccacatctcaatgctttagaaatatgtgtttgatacgaaaagtgtcctaagctatgaagatatcgagcttcagacagatctgtcatatgaagaacaactggttcaaatcttggacaggaaggaaaaagtgttacggaacaagactactctgctagttaaactgctctggaggaacaacaaggttaaaggggtgacttgggagttagagttgcagatgcgggagcagtatcccgagctattcaggtaaattttgaggacgaaatttctataaggaagggataattgtaatattctagaaaatataataataattttttggcatattttattgaatatgtgattatgctgatattggagtaagattataatcttacttaagttaaatgtgtgataattagtgtgaaattaataaatgattaaacagagtggaatttattaattacgaagattttatcagattatgtgggtacagtagataccatttgtgaaataaaatatttttaggttcggcgaccttagaaactcgacgaagtggtcaaaaatttcaagggaattaagttgtgttgtattagaattatactaaactaggttaaaatgttgaggaggaggttgaacagggaagttaaaaaatgaccaaaatacccctaggttatattatagtctaagttttaaagggaggggtagagtagttattttacaaggttggattcttttatcttctagtgtttttttagggtgagattttagataatattaagtgtatatgttgaatattatactaaaagataagggttgataattaagaaattaagaaatgcttaaagtttgctcttcctttctctttccttcgaaaacctagaggccagataaatcagaggagttcttcatcaaatttcttcaatctctagcaaattttactactaagttcaacctagaagctttgacgtaagctctttactatgttgtttgaggattttttcaagttttaagttagttttaggttaggattttagaattttggggctgagatattaataaattggaatttagaacaagtttttaggcttgatttagagattgtttaagcttaatttggttaaaaatagggctgttagctttgtgttagaagaattaaggttttaagagcaaaatttctactcaactatggtaatttgcttaaattaatgaattgttgtaaattgatggcttgaatatattgtttttatggtatgaaact

SEQ ID NO: 237498 - DNA, 2661 bp, Cannabis indica
actccctcttattgtatgctgcacgcttgatgtattctaccgtctaatcgaatcttgttgaaacttcaagtgcccgaactccctttgatcttcttgaagagtgcttgctcccttccgagacaagacttgaaaagctatctcccaaaagcttgtagaaccttctcctgaaagtagcactatgttcttcttcttttgaagacttgattacggactcaagacaatacaaaattcataaatacacacagagagagacgaataacatgtttctaaaacaaagactcttttttctaaagatataaatacaatttaaagtgaatgaaaaaggaaaaagatacaaaacctagctgctataagatgtatttataatcaaaatacaccttattgagagctcatacacggtctgaaaaagaccataactcactagataattctctaaaataaattttcaatcaactcaggaaaatctgcttccgtacctatagaatcgtgagcagtaagtgtgactgtccttttatagaaaaggaaagtcttggttcagttttttgcccaagaaatctaatcaaacattttaaaaaacttacaaatgatcggatatacacagtaggatagatagatattagttaaatcatcaaacttactatttatggcttactttccataaatagaaaagcaaatcatatttcttaccttatataattcaatcaatataaatacaaaattatagaaataaaatacacaactcactcgaaaatgaataatcaatttataaaatatttttgctaatctaaaaatgccaaaaataaaattaacaataataaataatattatgtatataattttaattttcttgagtatgttgaacttattcacaaattaatacttataaatattttttttgtatctaagttaactgtactataaattttttaatatgaatttataaaatattttaaatataataagcatgtatatcatggtcgaccatatagttgtgtaagttgggttactggatagagctcctaaaaaataaatggcccaatatattgtttctttaatactttttaagtttttatttaactttattcttcaaggggctaacaacttgtatcaaagccttttatagtctattttcaattttcaaagtccattttcaattccattactgcttttaagaaaaaaaaaaattcattacttcttgttattattttttttgaaactttattggaatcactaataagtttaataaaatagttcgtgttttttttgtattttgtaaaatatataaccgtatgataatatttaaaactattaaattgcattttttttcttagagatctaatttttaaaattaaaacaggacttcgaaaatgtttaaaacggccgtgatgtatatattatttaaaataaaaatatataaataaaataggtaggaaaaaagtgtaagaattttatattaatatataacttaatattattatcctcaataatatataatatcttttttaaaatatattttttgaaagttaaataatatgttactttaatcttaaattatattatttgttgaataacaaatagtacaacactttacacttgcataattatccgatacttcctcttttgtgccgtgctttcatgtaacatgcatctcatatgtgaagactgaaggtgaagcaaagtgaatggggattttggttgttttttagtaacaaccagccaatatcaaattggcagcgttaaaatcacgcacaagtatcgagggatttgcatgtgattggttcaattttctgtaaaatttcatgttacatttccacattttatcacatagattggatctgtagcgtaaattttgatatgtttccagctcatgcatcatcaccttgacacaaaccactttttttgtcttccaaaaaagtacttcaatccaataaataaagaaacaaaaaaaaaatacttgtgaatgaaaagtttacgagcactttcaaattttttttaatatattctttaaaatatattattaaaacttattttatgtattttaaaatatacttttacataatattatatataagtttgtttaaaataaattactaaaatcttattttctcaaaattttattatatttttttaaaatatatataaatatatatatataatatttgtatgtacacatatctctatacaaaaataattaataaaatatatttagactaatgaatagtattctataaatatagagtatgaaaagtatattttaaaaaaatttaaaatgtaaaaaatgttttgagtatcttctctagcctatttttaacatgattctttaaattttgtaaagtttctctattttaaaaaaattattgtgagtgatctaaagtgaggtctatacaagttttcttcaaataaaagtgtttgagataaatatgattttttttatttattttaacaatgtttgataaatatgtttggaaggttgtgattatatgagaatcgtgataacactctaagtagggtttatttagcgtatgagctaataagttgtaagtaggctggtccaaacgatttggagacctttattttaatatgtttactgagtttttcggcaaccaaataactattgagtttatgcaagtaataaaaacgcaaaatggcaggaatatagac

SEQ ID NO: 237499 - DNA, 678 bp, Cannabis indica
aatcacgtaatacgcctatgttagttagggtgttacagttaagccctttcagccaaaggttcaattttattgtcgagactaccccgtttttagatttattctataatttaatttagattgaaagtgaaattcaatttttgttcatgttgattgaaattatgaatgtttaatttcaatgttggtacggaaagattcaatccatttttatttctaacataaacttcttagtacatctgattaccataaagactatgttgaactaaatgtaaaatgggatcagttcacgggtcagattcatgttaaagaaagagcttaatatacatagcttcaaatctgacaattaagttcacgatttcatgtgatgagtagtgagtctttttaattaataaattaattatatgaccatctaacacaacattacaagtttgtcctcacaagtttgaaattatctcctgtttgcatataaaatttgcactagtttgtcctcacaagtttgaaattgtctcctggtaattggaaacataatcattattaacttgaatttatgtttcaagttatatatgtacttatatatttattatgtagtttgattaattaaagttaattattgtattgtataataaaatgtgtttattttttttataggctttggcggtttgcaagtgtttaaaaagaatt

SEQ ID NO: 237500 - DNA, 1044 bp, Cannabis indica
aaagtgttaccaaacgccacataagaaactaattaattaaataatagaagggcataataggaataaaatttagtaaacactaaacaacccagttactcagggactaagtgagtacagtgcccaataatgaatctttcctcttttctttcttacagttaaacttaaagtacagagacgccagttcagttaacttttggctgcttaccagttaccagattcctccatttctaatattttctcaggaaaatgtttcaggtactctcccttttatcagtttctagtacgaaagtttaatcctttagttacaaagaaaattacccaactacaccttaacattttatgggtctttgttgtcatagatttatagctttttctttcagcattgacaaagcaatctatataataggttggctacgctgcaaaatattatgattgtggatatttctgtagttacccagatgatatttcgtgctgaaatgcggagactgatctgcattgtcggccttttagtttctcttcttgttgtttcacagtgttggacttttccatttgggaagaccctttactttttatctgctaatatgggttcaaatcttatgctcatttccaatgctgctgataatgcaaacaatttagaatcggctaaaatttatgcagttgaagtagtggctggtaatgattctagcccttctaattcgaagtataaatttgaatatgaaaatggtgtggataatgaggattacaatgatttagaatcagatggtattagcaatttgagcaaaatgtccatatcagagaagggagtaaagggttttggaatggaatcagattttagtagatacaatggttttaatcaggttagtatgaaaaatgagagttatgagaaagaagcagaacctgcaattggttcaagaacaacttctagtgaagctaggaatcaagttgtttctgtttttagagacagcataagagatttggatataaaaagagaaaatgagaacaggaagaccgagttgcgaacaaccactgattcagaaaatatgg

SEQ ID NO: 237501 - DNA, 3008 bp, Cannabis indica
cagtcagacatcaagaatgttttcgccaccgacgaggcatgctctaaacaacacctcaccacctgaaacaatcaatccgaaaacacaaagctaagaactttcccataatttcacactcacaacaaagattttccataattcacagtaaaccaaccttggttgggtcaataattccagcagccatcaagtcttcgtactttccggtggcagcgttgtatccgaatttgaaattgtcggtggaaagcacctgaagagagagtacaaatgctttaattcatcacccataaggaaaagattaaaactttgatataatatcagttgatgatgcataccttctcgctgaccacgctaccgttaacaccggcattcttggcaatcaatttcaatgggtagctcaaagctctcttgacaatatcagctccaacctgaaatttatacaaaggtgagtttcgactttcaacataaaaaatttccctttctaatcgaaaaagacgataccttttcctcgtcatttgtaaggctctctctaattgcatccacctttgatgccaatctcaacaaggtgcatccaccacctacaacgataccttcctcaacagctgcctgaaaataaaggaacgaactttcaagctctactcgtctcgagtgaatgaatacaaggaaaatagatagtttgcgagaaattaaattacctttgttgcattaagggcatcttcaactctcaacttcttttctttgagctctgtctcagtttgtgcaccaaccttaataacattgaaaagattaggccacaccgaaaccaggaataaaataatcgataacaccctgaagccttaacacgactctaatgtttacctgaatcacagcaacaccgccggacaattttgcgattctctcgttaagcttctccttttcgtagtcctgctctgcagcctgtgataaagtacaactaatttaagctaccgaaactacattaaaaaatttacctcaataagattcttaatctgtgcaactcgcttgttaactgcatcttgggtacttccgtcaccaacgattgtggtggtgtcctttgtaagcaccacctttgaagcatgtccgaggacctcattgcctactttgtccaaactgagtcccacctcttctctgatcacagttcctacacaaaacaagaaaaagacaactatcataagcttcgttataaataggtaactaagtaatgtgacaaattagaagttaactaacctccggtcaaaatcgcaatatcgtcaaggtattggctcttgcgatctccgaaaccaggagctttaagtgcagcaatcttcaatgcccctctaagcttgttcacaacaagagtagccaatgcttcttgttcaatatcttccgaaataatcagaattgggtatccacccctgatggcttcctccaaaacattgataagatcccttgcatttgtaattttcttgtcaacaagaagcagctgcacaaatatgcacccgaatcagtacacgcttaacaaaaatagtaacatgtggttgttaatagttaaaagctaaaatcaattactatagcattactatatataccttgcagttttcatattctacggtcatcttctcgctgtcggtaacaaagtaaggggaaatgtaacctcggtcaaattgcattccttcaacaacatatagactgttttcagcacttttcccttcctcaagggtcaccacacccttccttccaaccttactcatggcttcggcgatcattctcccgacctcgtggttgtttcctgcactaacagcggccacatctgcaagctcactatcctcaacctggaatcaacatcaccaaatgataagtaaccactataaaacaaataaaccgaattgactaataaattcaaacaattcgcttacctctttcgacattaacttgagttcagcaacaagagctttggtggttttctcaatacctcttgtgatcaaaacagggtttgcaccagcagctaccacctgaaaaaacacaaactcccaacaatagttagaattcatctctccacacacaacataatatcaatcatatatatgaactgaacagaaaagaacaaacctttactccttcagcaataagaccttgagcaaggacaacagatgtagtggttccatcaccagccaagtcattagtcttagcagctgcctgtctcactaatttagctccaatgttctcaactgggtcctctaactcaaccttcaaagtttaaaaccaattaaagggttgcacttgaattgttaaccttatctataaaaaattaagaacattaatataaaaattacctctttggccacagtgacaccatcattaacaatcttaggtgaaccatacttgctctcaaggacaacattccttcctttaggaccaagagtgacaccaacaagatcagctagcttgttaacaccagtctgagaaaacaattgtaagtcattattaatacaataaacaacataaagggaaatcaaattaggtaaagagataagagataaggaaaccccacctgtaatttcttatggctgaaccatccttgttgaaatgcaactctttagccatagctgaaatccttggagaaggggttcttctaaccacattctgttgtcttttagcaaaagaacatgaagcaatggatgaagaagaggaaagcttttggaacttgttatccaaaactctaccacttggtgcagctaaggaaccagcagaagacatggctgcaaatgtagatgccatctactctctctatctctacaatggttaccaaaacataatcagataatgtttcacttgaattccacaaaattcaatccaaaatgtaatcatttcatttctatcctcaaaaccaataaacccaaataaagaaaaaacaacaaaataacaaaaacccagataaggtttcagttaaattcactcaaatttaatatgccatttcatttctatcacaaaaacaataaaccccacaaaacaat

SEQ ID NO: 237502 - DNA, 1509 bp, Cannabis indica
agaccttcagccatccacaataaaatcatctcttcttctgtgtattcataatctttaggaaatatagcacaataagagaaacaagacttcaaatgtgaaggtaaataaaaatagctcagccataaagctggaagaataccaacactctcactctcatacaacccccatatatcgttgtttaatatgtcctcccaatcctccttattctgtttcccacgtaaaagaccaccaagtgattttatagctaaaggaagcccattacacttttcaacaattttttgaccaattacttgaagatacgagtactcatgtgagttgacattgagtgcagcacatttaacaaataattgccaacctttgtcaaaagatatagtgcttagaaaataagttgatgacttagtttccataattgatgcaaccttattgctacgtgttgtcacaatgatcttgcttcctgggaatcctgattgaaaagtactttttatgacctcccatctgttgctatcttcggcccaaaaaaccgcaaaaacaatgagaaacgtcttcccagttaaaaccctcttgacttcatttaaaacttcaaactcctcttcaatttcacatttggcagatgtgaccttcagaataattgctttcataactttagaactattcaccttttcatcgtctcccacagtaacccacactctggtattaaacattttaacgactctatcatcactgtatgcaagctgaatgagagtagtctttccaataccgcccatccccactatagggatcactgacaatttgtcaccactactcgtatcacccgaaagaagcaacttaacaatagcttctttatcaacatcccttccataaacatcagattcttctaccaaaggaccacataccctctctggcttcttatgattttttacacgttccaaaccaagatccttattgtccagaagaagcttcagtttctcaagtgtctcttctatctcgggttttatgttcttatcaaaagaagttaaaggagttgatgagatgagtctcatgagtgcctgacaagtattatgcatgcatgcaatagatcaattgattttccataggcactctattccaaataaaatgtataaaccaaactgacaaatcaaccaataaaatcaaagccactgaataaactgagttacgatttcttttagaaaatatactacatttaatctattattactttttatcgttaagataattgatttattagtaccttactagcacaactgcagctgctatgagattcataaggaccaccaccttcaagttcgtttcgccatgcttcagtgtcgatcttgtaaaccaagtcgtctgcatcataaatgacatctttgagatcatcaagccattttcttactcttgggtctttgatgagcttctcctcggcatcaatgagcagcagatcagctgaggacagcaaagttttgaactccttcaacagcttgagaatggcatcttttcctttgaagaagt

SEQ ID NO: 237503 - DNA, 501 bp, Cannabis indica
attttggttcctgtttgtttcctacgaaggtgatgattacgactcctacctggtcactccctttagacgattgggtcaagatcaactctggctttagagttggtagcgactcaatatatgtggtggccctggctagatatcataaagaatcaattttgtgggtggctagcaacattctcaacaattatctgatctgctcattagagaagcgacgacatgcttgttagctttggaattatctatcagttggaaacattcttttgtaattaatgagagtgattctgagacgataatcaatacgctaaagggaacttgttcctatttggtattgataactatgtgctttattgtcaacatctctcaagacttttgattagttataattttttgtttattcttagaatttataactttgaggtctataatgtggccaaataaacttttgcacgtaatgtaataagtatgatcaataggtattatagataacttattttgtaatga

SEQ ID NO: 237504 - DNA, 973 bp, Cannabis indica
taaaataatttccaacattatcaccatacctgttcttaatatgttctgagggacttaatgctttacttcaacatgaggaattgttgggcaatcttaaaggtttatctattgctaggggggctccttcaatatcgcatctccttttcgctgatgatagtttgttgttctgccaagcaacagaagagtcttgccaagatgtccatagaactcttgattattaccaccgtgcatcaggacaacttcttaatacagagaagactgttatgtccttctccccgaatacttcacaacacatcaaggaacgattcaatagtgtgttaagaatgcctatttgtgctctccatgagaaatacttgggtctcccatcttatgctggtaaagacaagaaggaacttttcagtggtatcaaagatcgcatttggaaacttatgaaccagtcgcacgctaagctattctctattggtggtcgagaagtgcttctcaaagctgttgtccagtccattccaacatatgctatgagctgtttcagtcttccaaagaagttttgtaaccagttagaatccatgatggccaacttttggtgggggtccaacaccaataattctaagatccactggaagaaatggaagttcatgtgtaattctaaagcagatggtggtatggggtttcgttctttcttgcacttcaaccaggctcttttggctaaacaagcttgggggatcttggatattccttcctctttgctagcaagggttctcaaagcccattattttaagaatgggaattttctttcagcaccaaaaggtattctgccttctctcacctggcagagtatatgtgatggaaaggatttattgttgaaagatcttcagtggaaaattggtaatggtcgaaatgtccgatgtgcttctgatccttgcttacctgggaatactaccttcacaccatacacttacagtggtgatccttcttt

SEQ ID NO: 237505 - DNA, 1132 bp, Cannabis indica
gtcaacctgggttgttttcgatccagttcagcaaaaagtatttcaggcattcttttcatcatcaaaaataacaaagatttaagtaaactaaggaagaaaaccacaaacttgagtccctaaaaacagggtccaacactcaggttgacctagggctacgcctagcgcccaggttgacaatcaacttgggacactaccttcaattgctcaaatgccaaatccaatgcgaccattgaatctaaaatggtcaaaaatgggggaggagacctcttccttaagttcaaaaaccttgaaagtatcaaaaacgtaatctcaggtgcttaaaaagggcccaatgcccaggtcaacaaatggcctggtttgctgggttttacttatcctaatttaattttgcttcgaccatccatctagtttttcacaaataaaatgatatatgaagttagagaaatcaaattcacaactttggatttctcatttccagcacacccaaaagtaaagagttttgagtcacccatttttgcaaaacagcaacatttccgagaactggtgaccagctttgccagaacatataaatggactaagtggtgtcaaaagatcacttaggcatattaaaggatatcccttggacatttatacactttcccatcgtccaggttgacgttagatgtcaacctgggtactaggatgtcaacatgggcactcaatgtcaacctaggcgttgggacttgaacttccttcagtaaaacagccataactcactcaatttttatacaattgacacgattcaacttgagtttgaaagctattaaattctctatcaagtcatgtctcacacccaaacgtaattttgaagctattatcgtcaaaatttaccctaagggagttacaaaaataagctttgggtaacctgcagcgagactcgtcgagcaccaaaaattggccatcaccaccgaaagctaattttacagttagatcatcatcaacggtggaaaacaacttatttgtaattatttcctatttttgtgggcctccttctcctataaaaggagagttctcttagctcatttttcacattcaaaaaactacccacaaggtcatagcttctctctctctagagtttggagtttctaatact

SEQ ID NO: 237506 - DNA, 1125 bp, Cannabis indica
atatgtaaagccgattgactgtcacaatatagaccaatagcagcagtatgttgaatacccaaactgaagagaagacccttcaaccattttaactcacatgtaagagaagccatagagcggtattcggagatcagataatgtccaagaaacacaaaccgaccagtgagtgaacgatgagtaagaggacatgctgcccaatctgaatcacaccatcctgatagagaaagagagttgtcagttcgtaatatgatgccttgtccaggagagcccttcaaatagtgaaccactcgcaaagctgcctcccaatgttcttgccttggttcttggaaaaattatgatagaatatgtatagagtatgccaaatcaggacgagtgacccacaagtaaattaggcaaccaatcaagcgcctataagactctgggaaagacaaaggatccccagtagcatgagcaagacgatgattttgttcaatcggaaaggacacgggcttggcacccaaaaggctagtcttagagatgatgtcaagagaatattttctttgacaaagaaaaatacccttaggactacgtgccacctcaataccgagaaaatatttaaggaccccaagatccttcatatggaaacaagtgctcaaataggtcttaaaaagtgataaagcagcggaatcatttccagaaataataagatcgtctacatacaccaaaacattaatttgaattgcacccttagcaaaagtgaacagagaataatcagcacatgattgtgagaatccatactctttcaaagcagtgacaagcttggcaaaccaacatcgaggtgcctgcttcaaaccatacaaaaattttcaaagacggacacaccatattacgatcggatgactgaaaaccaggaggaagtttcatataaacttcctcatcaagatccccatgcaaaaaggcattatgcacatccatctgatgcaactcccaatttttagatgctaaaatagctaagaagacacgaattgtcaccatcttcgccactggtgcaaatgtttcgttatagtccatccctacaacctgatggttaccaaaaataaccaaacggtctttaagtctctcaatgctaccatcagaattatactt

SEQ ID NO: 237507 - DNA, 901 bp, Cannabis indica
ctcaaaagttctctctctccctctcgctaaacgacagtacacccacatcccaccaccaccggcttcacctccgacgaccacccaccaccaccgatagcactgcacgaccacgcacgaccaccaccagcaccgttatcggaccccacagtcgcgaatatgtccaaggttagtttttcctcacttttatctatttatttaatttatgtatgatttaggctaaattgtaagagattattgataggtttgtttagatttgagttaaacctctgtgatttgtgagttttgcttagattttagggtggatcggtcggatttggattttttcagatctaaggttgaagacatcgggccaatattggcccgataccgtccgatgggttacaaacgacaaggcccgatgggtccgataggttacaaaaggctagggcccgatgggtccgatgctccacccgatatatggatccgatagtgtcgggtatgtgggtccgatgggatttgtgggggtcctatggggcccgattgcaggcccgatggtcccccttttagtttgtttcaatttttttttataatatgggtttggttcgattatgggtctgatgggcccgattacaggcccgagggtcccccttagtttgtattttcatttcaatttttttataatgtccgattatgggtctgatgggcccgactgcaggcccgatagtaccccaatttttgtattttcattttaatttttcctgataatgcccgataggtccaattatgggtccgatggggtccgagtgctttatttaattttgaaattttattattaattattaattattgttaaatttttcattattttattaattattagttattgttttattattaattattaattattgttttattaatt

SEQ ID NO: 237508 - DNA, 1132 bp, Cannabis indica
tctcgttcaattccaatgtatacgatattgtctagttcaattccaatgtatttaccagcattatttataagtgatatttgatattttttaaaaattattttttttaagttatataggactcgatacatagtagtataacaccgaagaagatactaagcacaatagtgtcttttagcaatttttaataaaattttatgatattttcttttaagaataattaattaactaattaacaatctttaagagaaaaaaaagcaatattaatttcatgtacataaaactatttttgatgagagatgtaaaagtggagctatatttaacacaaaaagtaattttgtgatattacattaacttttattattacactctaatgcataattgtaaattttgatacaaaatttaatatatcatttaatgcttatttaataatttattaacaaaacataaaattataataataatgcaagggtaaatataaaatgtaataataaaataataaaaatattgcaagtcatttaatgtaaaagagcatgttaattaaaatttaataataaaatgtttaaaatgacataatgataaatatataagcataatatttattttgatgcaaattttgcatcatagatcatctcaaatgcaagataaaaaatttgtgctatgtttacataaaaaaataaatttgtgttatatttagcccattatttacaattatatactctaatatacagatgtaaaaaaaatataattattattgatcatcatttaatattttattgaaaataaacaaacaacattatttttttttattttttagtgcttaaataatgagcacctctaatgatactctcttatttttttttttttttaaagtagaaagttaaaatagagagccacttttattattaaatgactaaagttaaaataagaaaagttaaaaaataataaaaagaaaatgtaataaaataaaagaaaattaaaaaaatacatttttgtatatttttcttacattttcctttgttttttcttttgtttcattcccgatcaaaatcacataaccataaccatgaagtttctctactttgcagccaaaaaagaaaagtttctcttgttagacttttatttgggcttacat

SEQ ID NO: 237509 - DNA, 1812 bp, Cannabis indica
gcctcctcccatttccaattgcagttttctttttatttttcattttcagagtccgaaagacgaaattacccttgcttgtacgagatctcgccgcggccatggcttcctccaccacggcgagtgatgacgtggccacggcagtgaaacctctcgccgcgcctactgactcgccccaaaaccgtctctctattctcgagttatggccgcggccatggttaggcttgccatggccaaaagtgcaccgagcatcaattttgcatttttcttgcctccacttgtcttttattgcacttatgtaacccgggacttccataacttcaagaaacctgaaaacatagaaaagaagcgtaattctgtcctaaaacatcaaaaagtgaacataattgtgatccagaacataggctaaaattagcctaacatttacccactagacctcaatgcttggtctttctaggtgacaaattgggactactctatgttagatgatctcagggtttgttgtaagtttggctagcatatccacaaatgaattttggtccctcaggacttggtagatgttgtagcctttgaacccttccagcacccccgggacatcatgacacacctagcaattttttcaccattcatttggtactcaccagagatttgatttaccaccagctaggaatcactatgcacttctgtttgatggactcccacttccttagccaattttaagcctgctagcatagctttgtgttctgtctcgttgttggaggtgcagaaactaagcagcatttgcataccagacagcaaatttttgagatggatggatgaccaagagtacatccttcgatctcatccggtgaaactagactgctataacagagaagctagtgacctgataaggcagtttaataaaagaactgccagacgaggtcaagatctcattagagatcctcttacagggagactaattggtaggatcggggagggtttgcagataaactatccaaccaggttcctctggagccaggatagaccttcctctgcccaaaggaggacaagtcttgccacgaagatctactgactagaacagccagatcctagcaaccaatagtctgggggccagccagggatctgtggcacaacaacacccccaattagccaacctttggctggccagccccttagtggtgcacctctatccagccaaaaggtgaactctcatcctagaagatccaagagtgagtaacccaaaggataatctttaatagcctaggtccgagaacgagttcaaacactcaagacgaatacagcttgagaagtgagaccaatcacttcagatacttagatccacctaactctagtaagtggtgtgatcaacccctatcaatgcacatacgacaccagccaattaaggaagagcgggcggctaggccctaccgagcatagggttggtcagcgaagaataacttcccagagtagggctagccagccatggatagctcccctacctagggcttgccgaaaaaagccaactactaggcttagggctagccaaccttgaacataccctctccccaggtatgattgaccaagctctggaaaaatctagggttgcaacccaatcaagaggggccaatcaaccaagctcctgccacagcagatccttctgtgcaagcagacttagattaaatatgagacatgctcaagggctgagctggcccgaaaccattagaccttaagttggataggttaatgggctcatatttctaggcatacatcaatgccttgcccttacccaagctcaagatgccaacttggaagatg

SEQ ID NO: 237510 - DNA, 547 bp, Cannabis indica
attcaactgaagacttccatagcacaaaagattgcaagcccaagttaagatgaatgaattgcgaaacctccagtagcaccactatcacattaaatgagaggattcagaaaatacttggagtacctatatacaacgcatttaggtgagaaaataccatcatcaagggagaaaggaagtcaatataaaaatgagcatataaaaataaacataaaccatgctctgctggtcatgtattgatcaaaagttccaaatataaataagaaaccattttgactaatgtcaaaaagttgaaacaaccagaaaatttgtttaacaaacgaaaagctagtagacgaaattttttagcaaacagcactgataaagtcaccagccatataagagaattcataaaacaatttgatggagcaagcacactgacccaatttcttgtgtaacttgatggtaacagagtacaagttttcatcctaatatcaagaaaattcaagaaagcaaactaaatgatacgttgcagtaaagtagtaaataaagtaaaagggtacaatgaaaa

SEQ ID NO: 237511 - DNA, 629 bp, Cannabis indica
ttagttacaacaaaacttgtgactagaagtacaaatgttgtgactaaaagatatgtggctaaatttattagtcacaaaagacacaattcattgtgattaaatatatttttaatcacaatacttattgttactcaaactaaattaataataaattgtatctaaatattatattttagtcacaaaattattacgtgattaaaaatttgtcactaaactaattttttagtgattccaaaaaaacaaatcatcagtttgttaaaaaatattatttaagaagtgaaaaaaaactttagcaatgcactacgtatatattatatattattgagaatcatgaggttccatcttaaaattaattggtaatgagtagagtagcctgtgttcttatatatgatgattattttttgctcatcaatcttgaaccgtatcagaggatcagttgcctgtaagggatatgcccctgataccatgttaagaatcatgaggttccatttcaaaaccaattggtaatgagtggagtaacccatatttttatatatagctcaattctttaccatttattctatataaaagaatgtccacaatatatataaataatatatccgattggtatcaatatatgtatatatata

SEQ ID NO: 237512 - DNA, 2075 bp, Cannabis indica
atttatggtagaaatcgattgttttgttgcaatatggtgtgaaatctgttagtcagggttagatttagggtggcattggtcggatatgtattttgggaaaatctgagttttttaacgggtccgatggcccgtccaatgcactccgatggttcaatgaagttaatttttggctggaggttgaagacatcgaaccctaatgtgggtccgatgcagctcgatggtcggtccgatgcagtccgatggtccctgatgcagccccgatggtccgtccgatggtccctatgtattttttggctggaggttgaagacatcggacccaatgtgggccgatgcaacccgatgctgtccgatggtccaatgtattttttgttgtggtatatagtggagtagatcgggtgggaaggagagagttgatgtaaatagggatgatattttgggaattacactaaagttgacatatgttaaaaatattggtaagtataaatttaagagaaattttttaaaacaatgtaaacatatttaatcaaatttcccatcactaattcaatgtttctatgcccccaccaccactctttcgttggtagttagtcatacatatataatagaatggtcattcaatcttcgaggaaaaaaagcctcagctcaacagtagtacgtacttaacgccaaattgaattaataattgatgctgaagaagcagtttcagagattgtgaatgtgacctcaattaaattttgatttttctattattattatgatatatgtaggcctatatagttggttggtccacaaagagataatataattataaattatagagaaatagtcagggtgatcagcagtaaatggaggaaagagttccgtttttgcttagccaattaatgttattatttatatcgagtactatcgatatatttggttttagctaggtacgtttctaacttagataaaaagtcagtcaccactcactcgatcaccacaggtagcttcacgtgaaaacatgtcatcaaaattaagtatagtaattaatatcttgatatacatcatgtcaacaacaattagacgataaatcatgaaaaatgaggcattaattaacattttattaggtcattttccttgacattagggagatattttcttggctatatttaacaagaagtaacaccatgtctagacacttccacactaattaattattatattataaaatgtttttattttcattttcagcttcattattagttgttaacctaatccctaaattcattataattatggcctttgtcttcatacaatcatacaatctattattttatatatttatatagatcagaagaatcacataccgcaatatatgtaaatcgatattctcatgtttcatttttttttttctttgagagattttaacaatatatttacattaaaattattaatgatcgatagtgtttatttttgttaaagaagaagagaagagttatattttcacacccaccatacgatgtcaaagtgtcaaacttattcatttatattaattatacagactttatataaagaccttaatttgtctgataaattatgatccatctctgtgggtatattaatgaagtaggtcctactccttggtgagtctttatatatggttagttacattcattatttgatgtgaaattctctgttcaatgcataattattggaccattacctcagcaagtaggtttcttgatcaattaagtaacttttaattacaatattcttctccattattttatttcacgtttggataggatgtgattaaaaagattcctaaacatataagtaaaaaaataaagggattttttcaataatatacttaaaatacaaattaatttcaaaaataccttaacaaatctcatttacaataataccttgccacgtctttaaaaaataccttaatttgaaattaatatggcctgaaacgaaattaatctcaaattctactttttatttttaatttacctccgttttcaaaagtaactatttggttacttagttataatgttgataagaaactaattagttaattttacataaaaaaa

SEQ ID NO: 237513 - DNA, 617 bp, Cannabis indica
tccttaagcctctagcttaataattttaacgaagaattgggattgttttttttttatatagaaatgtcccaatctggttcagaagtttattttccggaattcttagaaacagaatatcctaaacaacttgcgctcccatacaaacccagaaatttccaacctcggtccaaattagaaatgaatgatgctagaattagagaccatctaattaagtcgatccaagaagagactgccagtcgttatagtcgattcttgcaagatatttttgagggcaagcgtcgttttttgcgagacgcagcttggcgtgaacccacaatagtagcttctattccacttgcgagacaactatttttacccgaagtcacttttacttttaaactaggagaccttgattttgaaattatgtctcctaaaccttgcaaatcattgaccccatagatcccaatgtcactttcgaggttgaacttatcgaatccaaggttaggtcgattggggcctatgtaggcggcatcttaaaatcttttgacatgaagcagaggaaaggttgtgtcataaggtatgtggcacctgggggaattcagctacttcctctaaaaagggtaatacgcaaggagtgc

SEQ ID NO: 237514 - DNA, 1757 bp, Cannabis indica
gcataacaattgacaagaccggagagaaaggcaaatccaatgttttatatggccctttatgctttcaattataattataagcaaatcaagtaattaaatatgtatattttctccatacagcttatacaagatctaacaaattgatatagtcaatactttagaaaaagaaagagcattcagagcttagtaacaagaaaataacctagcaagacgagtgtaaaacaattgttttgaaagcagattgcacttttccacggttgcagggtcctggatgtattgcttgttctcctctaacaactgtttgtaatagacagatccatgtttggaaacaaactgtgatgcctgacaagccttagactgcaattgtcgcaactttgatgccattgactccaattgtctaaaatttaagaacataaactcaactaatcttaaatgcagtaaaaaaatccatacataataatattacagttagtaaagcaatcccattttcctcaaacccattatttggttgaaaatggaaaaagggaagcaagaatgtaatcttttctgagttataggtgataattttatagatggagaacaatttttctgctagtttgctaaacaaggatttaacactaataattttgtaaacatcaaaaagctgatttcaaagcctacattccaaacttcttcttcaagcatcattttagcgtccaaagagcaacaaagacctaaactatcagacgatgaaaaagtagactttgtgagcaagtacaacaaatgtcacttaaaaaatcattatgaacattggatttcttgttcttacttttaattaaaacctatgaagaatttgagaattgcaatgcaacattataaacagttgattggtcatacccataaagcacccaaaggactaatgttttctttgtaattagaccacatttccaaactttatcagaagcttttagaagaaatagagcagctaaaaataaattatcaatactacacttcctcgttaattaaaattagcatcaaaatcataaacccatatagaatttcggccaagaaaaaaaccaagtaaccgactctcaccctacatcttcaaaacactccgattaacaaagaacttaaaaaactcgaatacatatctgtatgtataacttaaattcagatatatcccgaacacccatgattctgatggctggtctcaaaagtcaaaagcaatcgcaaaccaatattcaatcacataaacacaacaaaataaattaaaaaggtaaccaaacacacagcaatcaggaaaagacgaatattcattttcaaaattaagaacatggaacaatcacatacacaaacatatcgtgtttaaaagaccagatctaaaacaaaacaaaattactaacgaaaaagattgatgagctgtaaatcgaaacagatcgaattgcaaaatcgaaaggaattacctttgtgttgattggattcgaatgcaaaccaatagatacgaagagtgagactttgctactctacgccgctaggagctgagttgtgggcgatgagaaagtattgggggattagagctttagaacgaaagtggttttacttcagagatgggccattttgtaaatatcaacatttttaagcccttcgttaactttcatgtcttcttacttacctttccctgaactgaaaagttaaaaaacgggcctttaagtggtctgtacaactgctcattgggctttaagcaagcccactccatctgatttgtagagtatttcaac

SEQ ID NO: 237515 - DNA, 903 bp, Cannabis indica
atttctttatttctccatatatttctaaaccacttacaaaaaagccacatttataaaataaacccttatatatattgttaaatttaatatacaatgatcaacataattaatgcttataagtattcaaagatcaaacattcaatcttagagtattgatataacaataaatatacttccaagattttgttctccaataatctttgtttgggacgaaattttggtgggtcaacgagaggcccatgatgctagaaaaataggaaaggcccactaaatgaacataagtaaagcccatgaaagattcaaaggatataataagaaagttcaagaatattaaaattcagtccagatacgggaatatgactgaaaaagtaatcccagagataacttgaagagtatcattgacggcatcaatggtgaatggtcatgacgttctatatatagtgaaaaagttgggggttcctctattagtatacttacatacacatgtcaacgactacacagacacgacttacctaaacgtatctattagaagtcattttttttcagattgtgggaagccaaaggtgtatttggtcggtgagagtcattgttttcatgtatgatatacatgttaaggattgttattggttgttgaatacatgcatattttggataactctttgatatgttcacttgttgatgcaagccagtggcttaacttcggtcttatgttcgagtggatccagatcagtagttatcatcatgttttatgaatctcaaatgtctcactacgttttatatttgtatcctgacggtacaatatgatacataattagttttataaacactagtgctttttgagatttttgtctgttgacaccattgcatactgcatagtaaaagcacatatatgtgtaattatgt

SEQ ID NO: 237516 - DNA, 688 bp, Cannabis indica
taactatataatcgataatacatagtattactatctggccataatgggatggatataatgtacatgtactaacatgctcggaacccatgaatacgctctcaatgtctttacaccagttcattgggtcaagacatctaatcctctctcattgggtatttaggcccagtaagtctattatttctcttaaaaaggacacaatcccttaatacatcatgtagagaaataaaatagaaatgttagagggttctaaaggaagataaagaaaaagtgttcatgtacatcctaagcattttctcttgtttatttttgtgtgatgaaggttgtagaaagctcaaaaataaaaagcatcttaagttggcatatttcacaaatataagtttttattgtatgacttaattaatgagtataattattgttatactttatactcttcacttataattattattaggagtttatatagtgttttccttgaaaaagggagcatcgtggtcgttccccactctgtatgcatgtctctttttttaggaggattcgagtaaagagggttataggagtaagaggaaaacaaggaatattttgttttctccattttatttcttaataataaaaattggattgtaattattgtaattgatttaataagaaaaaagtacaaagggtagcctagccatatcgttgagagagt

SEQ ID NO: 237517 - DNA, 784 bp, Cannabis indica
tttgagacttggaaatatttaaaacctggggagtttaaacttaaagttggtaatgtatcgagctagaggaaaagctaggcttaagtttcagaatgattttttgattttagataatgttttgttcattccaaattttggtaaaaacttgatttttgtttcatgcatacaaatgaaacaattttaattgaatttttcaagttttgattcaattatttctcgtaatggagtgcaattatgtgttgctactatgcaacaagggcttcatgttcttagaccagaagaaccatttgcacttattaatgaacttttaagatagttgaaccaagaaaccataaaagacaaatgattgagaatgaagacgaaacatatcatggcacttatgtcttggtcatataggctatgatagacttcacagattaactaaaggtggtccattcaaaaatgtcaccttgggtgaattaccaatttgcgaatccttcctagaaggaaaaatgacttaagagttctttctctataaagggagagcgtgccaaagaactactagggttagtacattcaaatctatgttgacccctaaatgtcaaaaccagaaatggttatgagccctttgtcactttctttgatgatttttctagatatggtcacattgtccttatgcacaagaaatcagaaacatttgaaaagttttgagaatttctagcattggctcaaaacaaattggaaaaatattaaaaatcttacaaaccgataggggtggagaatatatggatattcagttcaaaga

SEQ ID NO: 237518 - DNA, 1179 bp, Cannabis indica
gcataacaagcttagtgtagatgctatagtaagaagtcatgttaataaacatagatatgaggccataattcaagattctcaagatagagttatagcaggtttccattcttctgcgatttcaagtttttctccaatctttcctaaagcaaaggctcttctctgtgctttacactggtgccagggaatccatttttctatcaactttgtggtctcagattgctaagtgttaatcaaaaatccttaagaagatgagagatcattcagccttgtctgatctgatttggaaaatcatcgactctttgtcctcttttcctattgccacaatccgattcgcaccaataagcaacaacaaattagcacataacctcacccaagctgcattaggaatagataaagagtgaatttggaataattgtgtttcaaatcttctttagatcttgtaacttgtactctcttcttctatcctctgtcacaaatcttgtatttaaaaaaaaaagtcataaatgatagggttttgataaatagatcaatttgattgaaatttatcaaaataaataaataattaatatctttgaaatttccttatttgtcaaatttacttatttttttttaatttatttgtttaatttatgttagtttagcatttaaaatataggtagagtgtattgtactttcatatactttaactaggtaacaatgccgcgagctgttcaaatatttataaatatatattttttttaaatataacaaactaaaaagcaacattaagaataaaataggaagatattgtctggacttttgacctgagttgctctactgttatgttatagagtgaaagttatttcttgttttgtatctttctgtatttcaattgttcgtttctagtcatggctgatcatgagatagtggatttggaggcggtttgtggttacaaagttataacggaaggagaggatgatgatagggtctgttatatgataccgggggggggggggggaaagaacgtattgattttgatgatcgtggtgcctcgtggatcgatttcttactaatcgatcactgaactatgtagagtcctaccctttttcatggacagcccaggaccaaccagtctcagtcttcctcctatggtttcacacctcaattaggcaagcaaactgagtatcaacactagttcag

SEQ ID NO: 237519 - DNA, 1075 bp, Cannabis indica
ggtccgagtatcgggtccaaggtcccactcccagtcccggttccagtatgggttctgttcttagtctaggttcaggtctcacttgtagtccgggtctggatcccattcctaatctcggtacgagtcctagtctttggttcgagtctgagtttttgtacgagtgtggttctaggtccaggtcccgagtaacgggtcctgggttccaggttttgggtcgtaggtcctggtgcaagtttgcgtctgggttcgggtttgggtctgggtatcgatcccgttctaggtccgggtccgtgatctgttccacgtctagatccagttttttgtcaaggtcaattcctgttccatagtccttattccgattcttcttccgattttgggtctcgggtctgagtttgggtttggatgctttgtctagaaattgttctagatttgggtcttggtatgattcgaagatctagacgccgaatacgggttgggtccaagcctcgggtcatgggtcaagatccagatcccaatctttggtcccgatcacgttccacttcggatcttgggtctcagtccgtgtccgtgtccgggtcctggtctaagaccaagacttgtgtcgggtcttgggtcccaaccccagtctaaagtcccgattctagttttaattttgagtttgagtgcccaatctaggtctgggtcctgggtacaggtctgagactctaatcccggtccaggtcttgggtctaggtctgtgtccaagtttgtatctgggtttgggttcgtaacctgagacccaatccaagttttgattcgggtctgcatcacagttaaggtctgggtttgggtcttagtcagattcaagttccaagactcaaaccaagactcggactcagacccaggtctgggttacgggtctgggtcttggttaggttctgggtctgagtccagctcaaggtcttcgttggagagttcgggtatgggtcccagatcaaaacacgaactacgagttaggttcaagccccgggtccagatctagttcacggtcttgggtccaagtctagttccacttcgggtcccaggtcccggtcca

SEQ ID NO: 237520 - DNA, 750 bp, Cannabis indica
ttaaaaagtttggatcatagggtaattaaaatagtatccctaatcaaaaaggaagtctaacaaaagaattttctatttggttggattagtcttgggagtaattttcttcagtcatctttttaaatgcttataataggcttttatttgtaggctctttatcgactattcaacagaaacgatttttatttattagtaggtttaagatggattttggatgttggacttcaaaagagcgctttttcctcttgactctttgtcactagtttctgctctaaattgtgaatttgtgtattataatgaattatgaattatgaattttattttcagaaattaaagttttagcatgttaacgcaaatttttgctaaccaaaatttgaccctcacaatgataatctcacacagaaaaaaataaaagcagtaaaataagagatatggacacaagcgatttttttacgtggttttgcagttaaaattcaacgtagtccacaagtcaatcttattatatttctaatagttttctcaggaccttttttgtatgattttttcgtctcccttttgatcttgcttgccactatttataattacatagtaggtagttaattacaaagttgattgtaatctttacaacgattatcccctcaaatcatgggatctaattacatatcacgttaagtaaacgcggttctcatttaaatttcacacagctgtgaatatctcgcttttactaggtcaaaatgagcgtgtattaaa

SEQ ID NO: 237521 - DNA, 661 bp, Cannabis indica
aaaactccattcttaggctaataaacacttgtcctatgctggtagaatccaattaattcaatctactttgattggattaaggaattattggatgagagtctttcttcttcctcaaagtgtgataaaagagattgagaaactttgccggggcttcctttggggattgaaggataatcggtctagagttcagtttgttagtcgggagagggtctggcttccaaaagcctatagaggtcttgggtttaaggatggaactaaatggaacaaagcttctttagctaggttcatttggagcttgatgaataaaaaagacttactttgagttaagtggatcaactcgatttatctcaaagggaatgatttttgatcctataagatgaccatggatacaagctggtattggagaaagctttgtaggctgcgaacaacctaaaccaaagcagatatcattgcagcaaggggagggaaattcaaattcagtaagatttattgtagcatgcttcaccaggttgtgttcccggcagcaagggcgatctggaacggcattaatgtgccaaaacatgctttccaactttggcaagcagttcagtccaagttgttaactagggatcaattatgcagtttgaacatctctattcctaacaagaactgtgtggtttgt

SEQ ID NO: 237522 - DNA, 1091 bp, Cannabis indica
attgaagtatggtgctctatttacgctcaaaccttcaacatgttattttgcgaattacttggaaacaccatgctctagattgtgaaatctgatcaaataaatgagcacttgctctaataccaactgttaacccaagatatgtttccaagagggggtgaattggaaaattaagctaattttagtaaattaaaacttttaacacaaaactatgcaattaatcaacttaatcaagtaaatgcaagtaatatggaaagcaattatatagagaaaataaccaaacttgtaaagtaaagagtttaagggtaagaaattctaaactctcaatttttacaaggtccggtagaactaagccccttgcaaccttggtcttcaaagctatagacctagctttgagttccacaatcgagtcaagtgaacaggcttgactaacccttacaactgagaatctttcaccaaggtgtttcgaaatctcttataatagttttgcactgccaaggactatcaacctctttctcggattgttgtagtgacaatctcactctaaccaggttgtttacaatactggtggcaacctcacctcaatcacaatttgaaaatgtgtttggaattgtaagcaaatttaactcactctagaagtatgatgaaacaataaaaaacctagagtgattaacaagcacacttaaagaaataaatgcaaattttgcttaaagtgtgtgaaaagtgttttgttagattttaaacttgggagctcattaaatctcttgaataggtttggtatatgaaataaatactcaagcaacttaaatttttgagtaaaattgagtgtatatggtgttggagtgaaatatagtcgtttatagctgttagtacgcatttcaaggagaattctactgtgatccaaaattctagattggaaccaaaattctaaattggttacaatcagaattctggattccaaacggaattttggatggcttacagtggcaaaattttcttttttaaaactaaaacgtgcaaaatttcttactcgtttatccgatttcagaaattttaatttttttctcttaattaaatgatatgtgattttaaaa

SEQ ID NO: 237523 - DNA, 812 bp, Cannabis indica
gataaaagaaagattgcgtgggtcaaatgggagagtgtctgtcaacctaagtcaaaggggggattaggcttcaaggatattcggctctttaatcaagctatggttgctaaacaagtttggcgtctgctccaatcgccggattctttggccgcccgggtgttgaagtataaatattttcccactatgtccatactggaggctaaggatcgccctggatcgtctcatttgtggtcgagtttagtgtgggggctggagttgttgcaatcgggaatgaggaaaggtgtgggggatggtcagagtgtgcatgcgtttcgggatccttggcttcccaggccgagatcgtttcgtcctatttcgcctgcgcctagtgatgatgtaatggtttctgacttgattggtgccaatggggcgtgggatatcactttgctatccaattatttcttgaggatggatatggatgtcattcttggcatcccattgcggggtgggcggtgtgcagattggtggtgctggcactattctccgaatggttgttatactgtgaagagtggttatgctcttgctcttgatttggtgagggataggaatggtggctcttcggtcgatcaggctcattggtggaatggtatgtggaatttacgggtcccacaaaaggtcaaaattttcttatggagaatgtatcaccgggccctcccgaccaattcccagcttatcaaacgaaagatcccggttcagccgctttgtcagagatgtggtgaggattcggaaactccggagcatgcgttggttttttgctcggcgttgcggccttt

SEQ ID NO: 237524 - DNA, 982 bp, Cannabis indica
tttttgataaggaaacggtgtctacaatcgtcaaaggcgggaaaccttcgggtatagggaatgatagatgggtttggactctagagaaaaaaggacaatttacttgcaaatcggcgtatctgtctcaagccttggacagagctcagcaatgtgcagtttctccgacactttggaacaagttgtggaatagcaaaatcttggagaggcataagatcctttggtggtgcattctctctaatgcacttcctattagatttgtgattggaagaagattccacattcaggatgctaactgtcatttgtgcggattaggggagaaatcaatagaacatcttttcctgtcgtgtgatgtggcaatgcattatggcgttcttcaccatggggcatatatcctatatgcaatgcagggattcgagttcgggactgggtcaaattcatatggaatcttaatactgggattcgagtggatgaagttttcttgtatgcttcgattgttgttgaaactatctggagacttcgtaatgagattattcataacaactctcgtctggatgtcttgaaatgtattgattcgatttgtacttcttatgcagaacttcattatgttttcttgccttctccaaccccttctttggagggaatctggaagcctcctcctcaggattggataaaattaaattgtgatgtcagggtaggcttggatagtatgtgcattgcggtggtagctagaaaccatcagggttctgtggttcggattcacacggctcagttagactttgtggacgctttatgtggagaagcagcggcttgttgttcagctgtctctttggctcttgagctaggtttcaagtatgttttggtggagagtgactccagaatagttattaatgctctcaatgggacggagtcttattgggcgattgagaactatgtctccttttgttctatatcctctcccacttttatttgttgtaattttgtg

SEQ ID NO: 237525 - DNA, 1385 bp, Cannabis indica
gttttcctttgccttttaggaggaaccacttcgtcagtagtaggtagtccagggttggttgtccttttcttcccctaccggtccatgatatcttcataacccatatctacaaaacgagacaaagcgttacagttattaaataggccgatgaaaaagggaaaaatataattttccacctaagggatttatcaaaatcactagaagccgagctatcactagataaaggggtagagggaccataatagccactaaaatccctacagcctgtaatcttgaatatatcaaaaggctcgattggttctaaatcccatctcgcatctatgtgacctgccctatcttccatagtatcgtattgctcaattataccaaaaaatgactcgtgatagttaacctggacattgaatctagggtaccagctatcaaacttatgagcaatgcggtccacgagaagagaattccaaatataaaaattaaggcggaagtcttcaatggtgactaatgtactacgctcagccctaagtagagtaggagaccaaccacattgattacctcgggatcctccttcatcggattcccgaggggcagtgctttgaaggtattgtgcttgagccaagcgatcccaagcttggccttcgggcggaacaatgatctgttgccaagaagaatgcttgggaaccttgtaatcacaagtatattcgttatcagcgagaaggcccactgatcgcaggttagccttgctgaagaggaaattgcatgaccgaagaccatagggaagagttaacaagcgcctgtgcctactaaccatctcgggggtaggagtaggcctcgtcaagagagctatcaaaataaacaaaacgttggtcagaaacttgaaaaacaacgatcgatgtaaatgagcaggatgacaacaatcacttacggaggtttcgaaacgtggttgtgccgatgagtgaaagaccagatgtccagaagaagttgttcttgaaggacactttatttcgaaagtttacaataatttttgactcgctagaatgagtacctgagatagaaaaagcccactgcagtgttcttcctcgatggaacgaccttaactgagtaaagatactcaatctctactggtgtgggacacccccagttcagaattttgtacaagactttcaagctagcgagaatcctgtaggagatgggagtcagctggaacatggcaactccaatgtggtttatgtagtctttgaagtagtccagaaggggaagggtggcacctgcgctgatgtgctcaaggctccaagcgcccatactattcgaaccactagtactagtctcacaactggtccccaagttatttcttgcaaagcgtacaggggtagctgttggaaattatttta

SEQ ID NO: 237526 - DNA, 958 bp, Cannabis indica
aaaaaattagtgttaattgcctttattaatccaaattactaaatcggtcattacatacataatctcaaaatcactacgtacgacctttccctaagcgaagtaggattgtatagctcctagactttccttcacaaatcacggggttgtaactgtcacagcttgactgatgcccccatgatctcattcttctttttttttagtagtgaatagatcaacccagatattcgtcgcctttaatccacttaggattttggataatactcataaattgtctcacttatactaacactagatcacttttaataaaaagattttgttctccaaatcaaatagatgaatacctccattagctactcatatcctgtattgcacttgggaatatctgaaaatttaactcatattatcatttctctaatctttctaccccgacaaatgggttaccacttaataacatacctacagagtctattcaaatttcttgatgtctctaactgaatgtaaaatatttaatatctatatcaattgaaataacaattgtaatatttcccttcaaattctaagttgagtcggctgaaggaccgataaaagagtccccttgagtcataactggcacttgggcaggacccatacacttttctccgtcaacattagtctttcttaattgtgggtaggcacttttcagatgacccactaccccacaagaaaacatgatcttgctcaatattggctcaattggtacctttttgcatcttgaacacttagaataaggtcgccatttcttattctcaccttgaccgctatgctggttactctagaaccttttttttcttaccccactaattagtggttcattaagattttactccctgatctcctcataagttggctacatatatttcaccacatccattggtacaacatgaagtgtcggtaatacaagaatagacacaagacgagc

SEQ ID NO: 237527 - DNA, 1856 bp, Cannabis indica
tcccaatctcaccctcaagctcaagcaaatatggcaacaaacaacaactccactgatacaagctggtaccccgattcaggagcaacaaaccactgcacttaccaggcccaaaatcttggagtcagcacagattatggaggctcagaccagctatacatgggagatggaacaggtttgtgcataaaacatgttggtcaatctcttcttttaccaaataattcttctgaaccccttcttctaaacaacttgctgcatgttcctgaaataactaaaaatctcattagtgtgtctaagtttgctcgggataataacgttttctttgaatttcatgctgatatgtgttgtgttaaggacaatttgactcgttctacattgatgatggggaagcacaagaatggcctgtattcgtttgaatccagccatgtcaagattgtccctccacctcttgagcaacctgtccaagcatctcacaccagtagccttagtgtttttgactccccagaaataaaaaccacttatatggttactgtcaataatgccaaagttgctgtgtctagatgtggcaaatgtaattctgaagttcacaatgattttaccctttggcacaatagactagggcatccctctgagaaaattgtaaacaatgttttgcaagcttgtaacattcatatcagcaataaaatttccaatttttccatatgttctgcttgttgtcttggcaaaatacacaaatttcctttcctaaggcatccaatactgttatttcagaaccattgcagcttgttgtggcattttccttttccttttccatatgttctcctattgaggtcttgtttaacattcaacccgattatacaatgcttaaaacctttggttgtaggtgctatcctaatataagaccttataataagcataagcttgagtataggtccactccttgtattttcttgggatatagtctcaatcacaaagggtacaagtgccttgattctaatgggagactttacatctctagagatgtcatatttgaagaattttccttcccatatgacagtctcactaagcctacaccttctagttcttccaggtcttccatagtgactgctattattcccaaatgttctcacactccatgcatctactccatgtctgatctaatgagttcccataatgagattgatcaacctgttggcactaatactgtaccttcttcactgcttttgccttctaacagttggtctcccagccaacattctgttttgcctacagatcaggtgtctgcaccagatgtcatccctgctgctgcactcagtttacctcagcctactggtgttcaaccagatcagtctctcgagttacaggttccagctgcatctgatacttcagcttctcctaccagtcagtctcttcctggtatggttctccctactgcagacaacaatgtggtctcatctgctgttcacacaaacacagatgctactcagacaagcacctcaggttctcaatcacacaatgctcatcctatgaaaacctgatctaagtctggcattcacaagccaaaggcccttttagtcacaagggaaccgtgctcccttcaagaagctcttagccaacttgtttggaataaagccatcagtgatgaggtcatggctttggtgagaaacaaaaacctcactcttgtgagatttaccaccaggggagaaaagggcccattggggtgcaagtggggtatataaaaaaagaaagaaaaatccagatggttctgttctaaaacataaggctcggcttgttgctaaggggtttcatcaagagtatgggtttgatttcactgagcttttagtccagttgtcaaaccg

SEQ ID NO: 237528 - DNA, 685 bp, Cannabis indica
gtcaggatctcacaatgtcgagttctagaagagtgagtcactagagaagaaaatcacctagagtgaaggaggaactaggccgcccaagtaacaattgtccattagtcactaccaagcatccaaccaagggcacgtcggagcccagagatgagtctatgaagcctaatcctagaggaaaatctaaaaaaaaagagtttagtttgatatcacccaagagaaaatcatatataattataacactgcaatttaggaagatcacttaatctaaaacacatttatttataagttaaaaaatctatattgtaagaggaattttgtatagtatatagtttttgtgaatgtgacaataattgtgccaagagattttaaagagaagcattttgaaaatatgattggttgggtgtgaaatcaaggacttccaaaaggttctttatattttcttttcacaaaagggtaaggtatgactcatttttattttctttgttgggggggttaaaaagctatcttccttcttcttcaaggttcattttttttggttaaataatctttatatgcaaatcgccaacaatatgaaaagactacttttttccacatttttttctttttccctcattgctttagtgcttgtctttttctcttggaaccacttttattgcaattatatgaaagaattttcataaacaac

SEQ ID NO: 237529 - DNA, 1499 bp, Cannabis indica
ttttaaataataaaaattaaaaagcataatttagaaaattgaaaatatacctatttatttatataatacttaaattacaaattttttttttttattatatatataggtgttgtttgttggatttggagtttgtctatttagataatttcgaacttgttattttttttttattattattttgtatactttgatgtgttgttacagacttaattataattttttgttgaatatttcatttcagtatttatttaatgagttttttatggctaaatttttttaattatcgtttcacttgcatttaattttcaaagtttgaatttcaacggtaaaatcttctaaagtattgaattcagtaaatttaaggtgtcatccaattaacttcaactataaactgcttatatatacattcttgtacacgtgtcatgcttatattggtacacataatattattatttaaaaatttattttaaaactaaataaaattataaagataaaaaatattataaattttaaaatatttttttgtaatttttaaataattatattagatgtaccatataaacgtgctacgtgtacaagagtataaacctaacaaattatattgacagttaactataaaaaatagataatattttatatttgttaacaatttaataatttggatagttttactattaaaatttgagtttagagaattaaatacaagtaaaataataattgagatgatttaacaactaaaaaacttatttaatttaaatgatttattttttatattttaataaattattaaataatttaacgcttttattttatatatgagtcggtttggatgttgcaaaaaatataacctcattttttttctttgacaaattaaataaatgatgactttttattttgttttaggaagggaggtcaaaagaaaaagtattctaaattcgtttcagatttcaacagtaatcacacattataattatgtatccgaggtctgtctccgaattggctgtcaaactcataaaaatgacatgtttttaaaagaaaactttaatactcggagacaaaagtgaaagaaaaaaaaaatcgtggattttatttatatttgagtaaatattattttgaattctgtattttacaaaaattatagattggactctttattttgttaaataataaaatagattctgtattttctaaaacaaaaaaaaagctttaaattaaattttgataatttttttaagggtaaataccattttggaccctctgttttacaaaagttaccaattggaccctgtgttttgttaaatgacaaaatggaccctgtattttctaaaatagtacaaataggaccctgaattgattttttgtcaaaataaagtttaattataatccgatctaaaagtgctatgacaaaactgtttacattttttgtatctgttcgtattaagcattgtcttcaagttggttgtattaaaaaaaaagttatcaaaaattaagctcagggt

SEQ ID NO: 237530 - DNA, 1339 bp, Cannabis indica
acattcgggatcatgacccgagtcttattttttagctgaaagtaagttaacaagagtacaggctcagaatttatgttcaaccttaaactttggacagaattactgggcagtggatagagttgatttgagtggggggttattacttttgtggaaggaggaattgagtgtaagagttgatgcaagctctcctggtcatttgctagttcgggtagcgggtcaagatttctttccttggactcttacttgtttctatgggcatccggatgctacgcaacgaaaattttcgtgggaactattaagaaacattagggaagaagttgttggtccgtggttgtgcgtaggagacttcaatgagatagtgagcttagcggagaaggtagggggtcgacttagaagagatgtggcgatggaggagtttagatcggtgattgatgcatgtcgtttgattgatttttgttcttctaaaacggaccttacgtggtgtaattgacatgagatgaatccggttatggaaaggttagatagagctctgtgcaatgaggaatggctacgggcttttaatggcgctgatgtcatggtgttggattggtgggaatcagatcatagaccgttggttgtggatatgccgattgatactgaaagagaacggtgtggtaaggtgaaacggaagagtcgcttccactttgaggaagcatggtgtgaagaacctgaatgtaaggagatagtggagagggtgtggactacggagacattggtgtcttctacggggggtttagattgaagactaggaaggtgggggcggctttacatggttggaataaaaagaagaagaggacactacaagagaaaacgaacaagctgaaaaaggctatctcggaattatcatctcggtaagacgctaatacatggggggaattgaaaacattagagaaacagttaaatgttgtgcttgagaaagatgagaaatattggcggcaacgaagtcgggcattatggcttaaatggggtgacttgaatacgaagtattttcatcgaaaagcctcggctaggaggaagaaaaatgagatcaaaggattgatggatagtatgggtatttggtagacagacattgatatgatcaggaagttagtggaagattattatggaagccttttctcggcttcttcccctcatatggatcaagtagaggaggttttaaggagagttaggcctaaagttacaaatgacatgaatgaggaattagtgagaccgtttgtagctgaagaggtaatacatgctgttaagcatatgaatccggttaaagctcctggagtggatggtttgcccgctttattttatc

SEQ ID NO: 237531 - DNA, 993 bp, Cannabis indica
atcgttgaaagggggtgaatcactataaaagtctcgtgttcatctttgttaaatttcttctcggtaaactggtttactttgttcgacgatcatctgtgatcatctcgcttgtctacgatcttcttagatccgttgatagaaaaattgcgtcaacattaactaagggcaacaataattaaacaaaaaatgtttaaacgattatagaaaatattatgaaggataaaactcagacaaaaaatgtgcaagttttgatgtacgaaataatagtggcataatctttgagattcgcttttgtacaagagataatctcaccattagacgcggtaatgacagttgttcaatcaagagaatagtaatatagataataggagccttgaccatttctatagaaactatttctcatgaaaacccaacaaaacaccaagcaaagtacttgcattaagcctaaccaaagaaggggaaagagaagcatcgaaattgagaaagaaagtacctagggtaggcgactaccaagttggaccagagaaagcctatattgtaaccgtgattattattccccattatttgattgcctacttaccacgccatgctggcagttaacgaggtggatatagttatataaataacttaggtatagggtgataattgaacaatcgttcccaatttgcaccattatcatccataacagtcctaagtttacttatttgattttagattgccttaaataaaactaataagtttaaaatattacaatctttcaaattatgttgcatcaatagaataagagtatttcatcataaggtgttgtcttacaaaaagttagtgatatttcattatcatagtgaataaattaaattatgtgggatttaatacttaattctaccaataacaacacgacacttaaaacatactacaccgttgatatttttaagaagttctcattaataaaatgaaattgaagctatcatgatcaatatgcttagatgaaagata

SEQ ID NO: 237532 - DNA, 849 bp, Cannabis indica
ggcgaaacctccttaaatttactttttttttttgtaaatttaaggtttcagttagatattaccgtattaataccaactggattacttctgtatcgacttcgatgttttactactacatatacacaagtgtatacagtggtaatccagatgatatttaacggtaatatttaactagggtgtcaaatttgcaaagaaaaataaacataagaggttttgccaccaaaataagataagggggttaagtgtataaaattgaaatatatggttcgccgcaaattgctctttagtaaatgatgacttcgtcatttattagatgatttaatatttatttcttaaagttttgtatagatttaatgtattttctctaagtgtataaatttgtgcttaaaagacaattttttaatggactgagaactttgagcaaatttttgataatattttcatcattttcttgaagagctttatgaaatccaaaatgatatatagagttcgttaccactttttcaaaatattaaatcatctcatttggagtttagacacaaaagttatgcatgttttactgagcaagatcgaagcagtcatgttccaggtgacacatgtcgcccaatttacgaaaaaatacaaattttagcacgtgcggataaaaagagataggaaaacccccgattaactaggttcaggcgacatgtcgctacaaaacggaatgatttgcacgtgacggataaaaagaataaaggatcccgaagatatggtccacctggccttataaggcgacatatcacctgatgcacttttcaaatttaaatcctaattctaaatggcatccttcctatctttttaagcctatat

SEQ ID NO: 237533 - DNA, 1482 bp, Cannabis indica
cgagtataggtggtatccatgccctccatgaagtagtactcgtcaacaaaacccccgatcttgctaacatccttgtccacggtgcccgtcagccacttgcagtccggctgagagaagtagaagaaccccgacctgctcttcttaggggtatacttcaagtcaaaaagccagttgaccttgtgtggggacggcacaccccatccttgaatggcgtaaaggacggacagggcaaacaagtacttaatgccttgggagtgaaccgggtaagacaaaggcaaaaataatcaacaaccctcttgaagtacgggtgcaaaggcagcatcgccccttgcttagtgtgggcacccaaccaagtacagaaccctttctttgggttagttgcccggtgattcgaagaagggacgtaacactcaagtccgccaaggtacccagctttatctaggcccctcatgcgcccctcgcttattttggacggagggcacacccatctagcccctaaagcactttgcctcctgtgggggaccacttcagtaaactcctcggtgacatagtcttccccctcgaccaagacatcaccctctgcggatattggctacccggcctcattgtaccctccaagatttgggggtccgatcactcttcttcctcagcttcggaagggctattagggcagacgtcatcctgctcctctatctcttggatctcaatgtcccctttgtgctcctcctcctcaagaatctcgaaaagccctgtaaacctagggcataacttgcccttttttttaatcgtctgatccccttcatcggagatactcgtaggaacacatgatctcatacttgaaattctacatttctgtgcttgggatctgcataactcattttcctactctgagaggcaagcattctggccttgatcttctctatggcttcattagtctgttgcactaattccagacctaggtatttcttttctcccgtttcatcccaatgaataagagatctgcacttcctgccatacaaaaactcatagggagccatccctatagtactttggtagctgttattgtacgaaaattctatcagtggtaggtacatgctccaagagccttcgaaatccatcacacaggctcgcaacatgtcttccagtatctaaattgtcctttcggattgtccaacagtctaaggatggaaagttgtactgaatttcagtttggtacccatagcccgctgaagactctgccagaatttcgaagtaaacttcaaatctttatctgatataatggactttggagcgccatgtaacctcactatctctttcacgtataaatctgcatactaatccactataaagattgtttctactggtagaaaatgtccagaccttgtgaatcggtctaccacaacccaaattgaatcgtacattcccgtgtttctaggtaacccaaccatgaagtccatactgacatcctcccacttccactca

SEQ ID NO: 237534 - DNA, 781 bp, Cannabis indica
aaaaaaaaaataaataaaatagttcagtctatttttaaaccaaatacataattacttttagcataattcaatctttttcagtccaattcagtgtaatcttgagtaccaaacaggtcatgtatgtaatgtaaaaattgaaaagcaattgtaagatttatactttctctctgtttcaaaatggtcacaatcttcttcatttactccatcgatctaatcaatttttacacgaaaaatcagtgtagaaaaattaatacttaagtttttttttttgagataacataaatgacttcttaaaaaaacattaaaagaaagaaaccttcttttctttgctaataatatatagataaaaatcactagagagagaaggcatgttaactgcataacactgaataagtccttcacattagtgttatttctcttgcaaaaatgtgcgacgccaagttcaagactacggaaaagttttggcacgcatgatgagaaccatgaagggaactagaaaagggaaaactaagaaaatatagtaccattttttcttttggaaaggaagatattcaccaaaccaaccaaacaaatacaatagaaaaggccaagtccaaaacaacaaaaaggactagcaacctctaaacttggagttgatcaactgaatcgcagctagacaatccagcgcaatgcaaatttttggcagcttcttttctacggccaaatgaaccccagctctaatggctgtcaactcagccgcaagaggagaaagaggccacaggatatatataatcagttcgag

SEQ ID NO: 237535 - DNA, 1335 bp, Cannabis indica
actcacaatgtaaacggaccacccgttccaggacaacccaacctgagggtggcccaagcactcggaccactcgttctaggaggacccaacctgagggtggccctagtacacaaactactcgttcaaggaggacccaacctgagggtggccctagtatacggtccacacgttcaaggaggactcagcatggaaatggccaaaaccctagagtaagggacgaagaacccaatcttggaggtgctcaacccatggattatggttcttatgatcctacaaggtacatgcctatcatcgaattagaaaactgccatcttaggcgacgcttagaggaggcaaactagtggaatgctgaattggagcgtgaggcagccgcaaccagagcagcacaggggaataatactcaaaatcaacctgaccttggagtgagaagaccacgaggcaggcctcgtggctcacgaactaggaggcatgaaactactcaggaggatcctcaaaatgctcaggaagaacaacttggggaaactgagggaccccctaataatgagcaacccgaggaaactgaggttccccctaaaaacccaaatgatcagccagaaccatctcatagaaatgagaataggaggcgatcgaaaaccagggaataggaaattcctcgtggaaacgaggaaaatcctgggacacaacttgggggacataggtcacaaacgaggaaccaccaatgttcttcccggacccatagggaaggggcttgtacaaatcccagtggtgaaaacacgacgaaccatgcccaagggggaagaacggggcgtctcttgactacttggagaggagtctcttgaaagcctaatcaaccactttctagtttcaatgagaaagaactgtagggttgttggcgagaacccaattgtattgctggtcccaaatgatacctccgcgatatgggtctcataggggaatgcataggctctcatggcatggcaggcttctggtttcctagagggaaagttgggaatggacctttgcgtagtcaatttccagcactgatgtccatgtcagtaagtgaaagtcatcctgaattttgtgatggcaaaactttcggctttcactaggaaaggcaaaaagtgcacagggaatttagacactgactttgcttgcaaaattcagagcgaaacacattacaaggtgcgcgagagtcatgttgaatttttatgaagcaagcttcagcttccgcgaaggaaggctaaagttgcataaaaattcaagcttagactttgcttgaaaagaacaaaaagagaaagcatcacggggagtacgacagacttcaagcagtccttc

SEQ ID NO: 237536 - DNA, 1413 bp, Cannabis indica
tgatatgtacaatcttcatctatagctttagactctcactgcttcggttctagcttttacctgcacatacatgcaataactgtgaatcgacaaactcattgagaaaagtataataataaacataaacatatatctagacggtaaccaggcgcccatacaactaatcacgatctgataactggattaggaacgttctctacaaagtatgactaactacgaatccaacctatactcagtactctagtcgtactgatgtggtagcagttaactcatactatgtatcaaatagcctagcatatatatgttggaatctctgtgcaactctatgtacacttcactgaaactctgatatgctaatctgatggctattgatttgcgtaacatgtgtatattggtatctcggtgcagctctatgtacacctcactgaaatcctgatatgttattctgacaacaactaacatgtacgctaaaccatgtatactatatatgaaactgttatactaatcttaccttaattttgaatgcaagtatgtcggtaactctgagtgaaaactactgctcgacgatttacaggcccataagtctaacatacgtacaactgataagtgtttactctagaacacttttctaatgtctgaaaagaacctagagtttttctaccaaactatgtggtggagacaccctaaaataaaatacataatttggctcgaatttatatatgatatcgtagagctcgtcataagctttaaaatggtatatagaacgtctaaaacggacacctgagtaaaatgttatggccaaaatactaaaatcggcctttctcgatgcagtccaaccaaaatcccggttggtacagtcctaaaccaaccaaaatttcggttgtctgcgcagaaaaacacgacaatttccaatcttccaaccctcataacttggtctaatcaaacccaaacgctaccaaactttccaaaatctcaacacaccacataaggaacctattacatagcttaaacacaaaaaattatactaagaatcaagattcgccatggaagagcaaagtttgagctcttaagctcaaactttatctaaacaacacaacaagaatcaaactaaacttaattcaacttaaataacaaccaaataacttctaaaatcataaccaaactcgaattaaacctatagtacgtaacccaactcaacaatcctccatgaaacctaaccttcaagtttaaaaaaaaggagaaaaagagggaaaagcttacatgacaaattacttaagctacaactgttgaattcctctagaaatggtctcaattgaataagaaaattgttgggttctcccttggttctaattttgaataaatcctaatgtttatctaatattcaataacataaattcagattaactaagctta

SEQ ID NO: 237537 - DNA, 1484 bp, Cannabis indica
aaaaaaaaaaaaaaaacgacattccaaatttgaaataactttcatatataaaatatattttacatccgcgaaatatataaaaatatattttatatattttaataaatgaattatattattacaataaccttagaaagtgaattgaccaaaatacactactacacgtagttcataattaccctactacttctacaaacaagtctaacatgagatcaattaattattattgattttgctaccaccaccaccttagattttttttatagaactatatttacatacacacatacatatacatatatcattttctgtgtatacactaacactaggttaaattattttatcattctctcgagtatctataaggcttgtatactcgaagtgtctagactcttgagtctttcctttcttcgtagaatcgttctgacttggacccttagaactcctctggctcaaaactagcttatattggactctagagcttctgttttttggtttgtttgtctggtagcggcactgaatttggtttgtaccgctcttaattcgatttgtaccactctaaatttggaaaaactaacctatgcagctggttgcgcggaaacacttagtccataacagtaggagttgtaaaggcagtttccgaaggccaaaattgatggagtagtcatctgtaaagttttagttggtggtatgtttgtggaaggtactagaaatactccataggcttgagcataagcttcttctaagtttgtgaatccttgagctcttatcaagacatcaatcaaagtatctgcctttttgcgttggagatctccccatagcaagaaccatgtggttaatcttgatgtcaaagccaccatcttcatatcatcggttaccttggttttagtagcaacatcaatccatcatacgctggatgttcttcttcaggctttctctggttgttgtttgacactggtcagggaactagcttccaggtcgaaagcctttactgctacaaactgctttttaaacaatgcttgtagatccctccagatgtggatcgatcccagagataacctcttccaccagtgttctgcagacttgcttaaagttagtgaaaagtaaagacattttacatcatcactggatttagcgacttgtatcatgcaattgtacttggacaagtggtccctggggtccgttctgccttcgtaacattctatttgtggcattctaaagcgctccgacagtgttacatctatgattcttttaacacattattctgtatcttcttctttagaatccaacctcgtttatctcagtcaagtttcgagattagcttatgatcttgttatccttacgaatcattatatttataacataacacgaggtcattacatcttttgactgtcgtctatcctgaggtagaacatttattttattcatcatatttattattttcctcaatcttcgagacctatccacatgccatatttataatt

SEQ ID NO: 237538 - DNA, 1035 bp, Cannabis indica
tttcctaacaaatcgaatgttggcttcctttatgtgttaattatggaaacgaaaagttgaacgcaaatttagattggatctaaattatactttcattagttatttaatggtactaaaggataaagaagtaattagaaggataaaagaatattttaaccaaaactaattacgaacgaacactaggagggcttaccattggaattgattatatcaatggacactgcagtaaaactaagtaaatataattctataattactaagagttcaattttatatttatagtagagtaatcgtgaaattaataaacaagattatttgattgattagattcaataaataaatctagttcattggagattaggattatgggtctatggtccctagatcacaacggttgaccttgaaaagtgatcaactgacaacgaggttgtatggatctgatgcttgccacgtgttacacaatgagaatgaaaaagtaaagaacacacataattgttatagaagttcagccccctttgatagcaggtaatgacctactccctttttagtagtattgataccaagggttaagactattcagatcactataggtgggatctgatatagcacccttaagtatacaaagtatgaattaatgttggcaaatctcaagtgttgagaatgcttgtatgggtgtatcagacttatcagacttaggcttagagcttggaggctagtatcagattcaatgacttagttaaagattttaaacctaattctcacttagtgacttggttatggctttcagacctaggttttctaggttagatttaaggcctttatatagaaagcctaaaccataatttacaacttgaaaccgtagatatttgtatattaaattagttaatataaaagaccaaaaatgcccttgaacatagataatattaagctattctaatgggattttatgtaacgtcctcgcttcaagcctccattgggtccttacacccacagaatgaatggctcttatacacgagtacgccactctggctgctt

SEQ ID NO: 237539 - DNA, 1837 bp, Cannabis indica
ttaagcgtttatatattatattaacataatttcggactcgaacccaggatttccacttgaactagtcttgttattaaatattaataatgcttaatactttctacacatgtcaccttattattagttaacgataatttataaaattattatattaaattatatgaaatccgatatttaattgtactaatatcgatattaatacgtaggagggtgctacataccaataatatactttagcatttctcatatataatgagcattgcttacgcctaatattatagtaatgtgacgcattatgagtgattagtaattttttatatttttttattaaatcaaaatatataagacttggatggaaattagctaatggggaagagtcattatggacaagagtcttctgtgccaagtattgggagaatggccttaactccttttggaactccgaatctcccaaatccttatcctttggagctcggagtatactagcttcccgagatctcattcgtaaagaatcgtgctttcttattgctaatgggagatctattaatatgtggcatgctccttggattccttggttggagtgggatcaattccgagctgccttcaatcctatgatagtcccgaattccactttggtttcttctctcttcaatgaggatagggagtgggatttccaactttctgctatttggatggtcccaagtgtagcaagttctcttaatttgattcctagacttcccaataaccatgaggataagttgatatggaaggatgcgactagtggggagttctcaactcgagtggcctataagtcaatcatcaaaagtcgaagggccgaaaatgatcctatttggggtcatatctggaaacttaagatctcggaacgtatgaaactcttcctttggaaacttgggagagatatcttgccttttggagaaagacttcagcgtatttttggcaacgaggtgatgtgtgctatctgtgatgaacaggaagattccgcggttcatttgttttgccattgcccgcttgctaaatccctttggttggcaagcccgtggggagtccggagtgaagaactgaacctctatagctccctgcagctcttgaagtggttgcttgagcctccccctttgttgcaacatggaaactttgaggtggaggaattcagaaagtttggaatctctctctgtttcactctctggtcagtgaggaatcaagcttttcacgaacatgttcgaccctccttcctcatcacctttaatcggattaagagcttggtcgctgagctcaattcggtattcatctctcctcaggattcttcgattgaccaatcttctctggatgctggtctggaagtgttgcagggagagtttgtggtgtttgttgatgctgcttgcaaagatctcaggtcagttgcgggaatcattgtcactaaggctaattccgaggttgttgaagccttttctgctcaacttcaggctgttctacctctggaagcggaggcttgggcgcttcttcatgcggtgcatcgatgtctcagccaaggatggcacaatgttacttttgcagtggactgtcaacttctggtgtggggcattaaggctcgaaagactccgaactggagggctgcaggggtgttcgctcggctcttggatgctctagattgtatcccgtcagcctctgtagtttggattcctcgtaccgggaatgaaaaagctcataagcttgctaagtggtcctttaattcttatcagtttggttttttcaatgctgaggagttggcacctcttgtggccatctaaaacctttttgtgtgttttggtttgtttgcctt

SEQ ID NO: 237540 - DNA, 873 bp, Cannabis indica
tataagaaaaatataattgagtaaacataaaataataaaaaagtaataatatagtatagatttttgttgggccctgctcttccaccttgtcgggccgctacctgtttgactcctgcattagtatccgctttgggcataagctagcgctcacggttttatttttgggcacattcctaaaatgcctcatactaatggagtagtgtccatccttatataccaataattattcccattcttagccaatatcgaactttggttgcattcccaataatttaaacttcaacctcaatatccaaatatacaataaaaattattaagtataaagtctacgttttaagttaaacactaaaatgtttaaactttaaatacaaaatggtttaactgataaatgtaatttatgtaatatagtaaatacacttttattaaaacatatataaatcggtttattcgggttaattcaatatatttattgggcggtttggattttcattctattatttcgggttgtattttttatcggtttattcagtttgggtttaggcggtttattcgggttgggctgtttgtaaattttgttgaacaccccctagttgaaataataaaaggagaacatggcgttgtttggtaaaaagatcaaagcggagtgctcgtcaaaatcgtatcgtagaatccagagaagaaattagtttacatttttggtgtattttgttgaaatgtctaactatttttgtgtatgtgtctaaataaatcgtaatggtttttctttacaaaaagtatgctgtttatatatgtaagttttagtttaaatggattttagtcaataaaaaatagttgtagatgttggattttaatccaacaatctcccacttgggc

SEQ ID NO: 237541 - DNA, 1156 bp, Cannabis indica
cctcatttttaatacttctaagccttactaaacatgatgacaaggtctcctaccccatttttgataatgtcacattcaatggtcgtattagatttggcatttaagaaattgtaggtagcatcccaggtttattgtcaacttgggtgttgtgcccaacactaggtcaacctgggcattgggccccatttctaagggctcgagtttgtggttttctcccaaattttacttgaataatcattatttctgatggtagaataaatcttggaacactttttggtgaacttgataaaaaacaaccaagattgacaataagtctacttgggcgctgggtcccaatttttgcccttttgttttgtccctggaaacagtttaatctcaatattttctaaaaatagagaagatgctcaagagaactcttgaaaaatccatttaaaattgcccaagttgacaaaatgtcaacctgtgcgcagggccaaccccaggtgtcaacctaggcgctgagccctatttttagcactcaggaggtgttatttcttctttgaatgtatctctttccctatttttgatgaataagaagaagttgaaaaagtcagatctttgatttgatacttgtaaggcgctcagattaatagattgtcaacctgggcgctgggcattgggtgctcgaggtcccaaggtcgtgggtgctcaaaaatgaaattgctcctactttgattctgatgcctcaaatatgtctgtggtatgtctaattgatgtccccaatgaatgttttgacccatttatgctaagatggtcctgaaaactgaaagcatagttgaggttgtcaacttgggcactgggtgaaatcctaggtgctcaagttggccttcgagttgcaagttcatctaattttagctactggagcttggattaggtggatccatgtatatatggtacaaaatactaaaataattgttagttggattcaagttattgaaatttgaacttccattctagagttcctaatgtcaacctgggcgtagggctagggacccctcctaggttagcctgctatgactcaggactactgaactcctagatgtcatctttcttgccacatgtcaaacattgatgtccacatcatcaaggctactttttttgtaaacattcccccccc

SEQ ID NO: 237542 - DNA, 977 bp, Cannabis indica
tatatgtttatttattaaagattaaattttatcacttttgataaaccctttgattagcaaatgttgcacagtaatttttaaaagcactgtagcacgcctaaactagtagggtgttacaattttagtattagagccgccaggttgtctactaaaccgtcaagatatgtaaaatcatcatcagatataagctcgactcacggttcagtaagcctttacatgttttagcagctttttataattagaaaagcatgatggaaacatgttagtgatatattgattaattatgtgcatgtctaagatctcatggatgcggtcttaagtttattatgttgaccacttcctagttaaactaacttatgggttcacaggctagtatcatatgaatccccggagaaatgtacaaagtcagggtaatgtggttggaactagtggccgtcaaggccgtcaaggccaccaagaaccccctcctttgcgtggccaaagtagaggtcgtggacaggctcatggtctgggtaatgttaatccaccacaagctcgtcaagtttgggagcattggtttgctgagttgcaggctagaatacagcaacaggatgaggagattgttaggctgaggcagcaaggccctcaggttgctcctcttccttaggttggtattgcaccagtaccattgttgccagcggaggatcctatagctggcaacaggttagtaccactatatgagcgatttcggaaacaaagacctctagtctttctgggaggccctgatgttatgaaatttgagcaatggctaactactatgaatcgaatactaaattttatgggagtcaccggtagcgacagagtggccttgtgccacatttcagttccaggaagatgctatgatatggtgggagttagtatcgcttcactacaggatgttcgctgttatgagctgggatgaattccaggatttgttaactccaagtattataatgagg

SEQ ID NO: 237543 - DNA, 1800 bp, Cannabis indica
acagttcattgggaagcctgcaaaagattattgagataccttaaaggaacaattcatgagggacttctcatcaggcctgccccacaattttgtcttcaggcatactcagatgctgattgggtgagttgcccagatgaccgacgatccacgggtggttatacaatcttctttgggggaaacttagtatcgtggtctgcaaaaaagcaacctgtagtggctcgatcgagtacagaaagcgagtttagggcccttgcaaacacagctgcagaactacgctggctatgctctgttctcagtgaactaaaggttgatttacctaaaccaccaattatatgggttgacaacttaggagctgcttccttagctgcaaatccagtgtttcatgctcgatcgaagcatattgaaatcgatcttcacttcattcgtgaccaaattttagcaaaacaagttgaagttcgatatgttccttcatgtgaccaaacggcagacattctcaccaagcccctgtccacggatcgatttcattacctcaagcacaagcttcatgtgtgtccaacaccctttcgcttgaggggggatgatacagttactactgtttctaactaactattagttagtcaattagttcatgacagttaatactgttattttgtaacagttttgtaacagttttttcagttgctttctatttctttcttttcttgcctttgccttgtattcatcctctatataaatgaaatcatttctcaaggctagttagcttttgctagtcttgaattgcaatctcatagattggattcttgtagatctaagcatagataagctcttacaatgctcaacctcatttgcattcccaccatctactatgatccccgatccatcctcagccacagtccaaaattccacaggaagagtcaaaacagagtaattagaatcgtgaaaagtcctttggtactctccccacctcagcgtactgttgaacgaatcatgtacttccactgaacaaactgctgataactctagagctctgaaaaatagactgtaattatcaacatcagcagttaaggtcatgggttcaaccaaaacatcatttatcatggaagtaaccctcctagacacatttgtatcttgtttacgaatcttactcgcttcagcggccaacagtgcaagatgttgtaataatctccccgtcgaggttctcgaactgcaataccgtcgtagtaaaccctcttaatcgcccgagcaagatttttgtagctgtttacatcttgcttgaatatataacctctaactcttctttcatcccaaatgggaatgaatctagcaaaaattccttcaggatcctcaaggactcgccaagtttcaccaccatctgccccccgcatcttctctccatctccatcattgcctccttctctttgttccccaaaaaccgcatcaattattcttccctgattagtttctgcttgccttggaaactaagaatgcataaatccaaaatagaatttacttttagaatttgaagaataagatgaatgaggttccatcccaaaatcaattggctatgggaggagtagctcattttcttatatattctattatctttccacacattggcaatgtgggactctctaacatctcctcaagatggtagctattttagctcataagcggctcgtttttttagctcgctatccctgatcacaagtggttctttttgctccacttttcggattggtaattttggatttttggtggctcttttttatttatttttggctcactatatccccgaatcac

SEQ ID NO: 237544 - DNA, 1065 bp, Cannabis indica
aagtttcaagaaagaaaaaaaagttggtttaaatgagacaactgaactagttgtgcctcctaaataacacaaaatatataaatatagaattttaaaattccatgtaattaatgtcacttttttttttctctttcaaattaagcttttattagtagcaattagagtttaatatatagaaaaaaaggatactctttaatccaagctaataattatcataaatctccttttatagtctaaatcccacaccaaaagtgccatgtagcagttatgatttcttaacaaactttctcttgctaattaattctttttcaaatttcctcatctccctctctttttcctttatggttcatcttcctttggttctctgttcttcgattcatacccaattttttttagttttccttattattttccgtattacaccccctaactgctggcttttgattatggatcctctcattaattttttgagcacaactctatctctaactgaggaagagagcatggtctttgctcttccagaagatgttgcgccaactccgactccacattccaatcatgtttttctagttagagtactcacggacaactatttccataagtcgacattcattgatcaaatgagcggacaatggaaggatcattaccctgctgtaattgtgtaggggacaaactcaaggtgatgaataaagaacattagcacttccaaaatcattttattgtaatgcacacaccagatgttctgcagaatgtttcaatcaacagtttactccattttaggttcagatttattgcttgcattttctaagtaagtccaaggctctggcaacagctttgagcgaacttatcggtgaattcatagagatacataaagattcatttaatgaaggattagagttaaattttttattgtcaagccacttcctcgggtcgaatgataagtctcccaaagattaaagacgaattttggatagacttccgttatgagcgtcttccgaaattttattttgaatgtggtttactgtatcacacctttaaaaaatgtattaaattcatggagcgtat

SEQ ID NO: 237545 - DNA, 2919 bp, Cannabis indica
cctgcaatcatgcatagcagacaggctattggacaacagaattgttgcatccgaagcacttccaggtacggcgttgctgtcgacaacctgtatcagagccgaaggcacgccggaggaatggtcactgtctgggttgacaacagaggcttctgggtttggcaaatttgcagtcgtttttttcaccacaaggttggcagtatcctcaaaaggacagacttcccctatccctggtaaagaaaccaccagaaaacgactcacccgttcttgctccatttccgacaggtcttcaaccacttgttccaccattcgtcttttccctggacattggtttcgttgttctctagcctcccaagactcaatggccttcatcgagttatctattttccaaagttgtttgaatttgttatccaccgtgaggcgtttttgtattatccactcttcaaaccatttaggcagcaatggagagaaaggccatcttgcatcgtcgtcgtatttcatccatgagccaaacattgggaagaatgcaccgttgacatcctttataaccgtagggggcttgaagcagaacttttgttcatgtgatatgacgctgcatttgagacagaacttggggagtttttcgtatttatattgtatccataagtccttgatagattgccttttcatatagaagcccgagaacagaggtttatcaatctcgactgtggccttgaatcgcagtgttcccattccaaacgagccccactcgaagtctatgtatcggagtagtttataaactgtcgacactttagctgcaagttcttccaagttagttttattccattaaaaaggggggatgtcgcttagtcttacccagaatggtgatttgtcgaattgaactttagacggagctagccatgatggccaaggcatgataaccaacagagcaccgcaaatgatccaagggcgtctattcagaacattccatgcatcctcattagatgcgaacgtgaaatgtaggatcccctcatcatcctccttccaactccattctttgaaagaactccaggcttttttcaaagttccagcaatagcttttcgccttagtttccctttgcaaatgagtttccccagcaaaatgttactttgaggctcttgggcttcggattctccaggatcaaggcgacatgttaagtccttcgtggtaatctgaactgtgtcttcgaagaggtggctaaggctgttgtctgccatatcaatgttcactcgtagtagcatccctgaaagaagtgtttttgtgacgatgatgtccacagcctatctgcaaagtgcactaggctctggtaaaaaaaacttccgatgaagtcacactttgtagtggtggttataataatgtatagagaaattaatatataactaattaataattattgtatgcaacctttggaacagtactgatggtatatataataagctatatatactagagtttgtcaaagatataaacaaatacaatagtagagttcttgaatatagaaacgtccaaataaggctgaggactcgaggtttataatattgtaatattgtaaatttacatgtacatctaatgtatataaaagattgactttgtctaagaaaaacaattgtagtaaataaaaagttaattagtaccaaatctctatttcggattgaatataaaccaagaaaaaacaaattatatagatagcatacaatatgtatagtgttagaataatatgaaatgaatctaaaggtatgaacaatcctataaatatggaataatgaatatatatatatatatatatatatattgaacatatatgtaaaagaaaagattgagattatattgttagaaattttatatgaaatatataattgtgtatatgaaaatgaatatgtacacgatataattaaaggattgaaatactattatttattaaatctttgagttttaatcccacacaagttttgaatccgcaaaaaaaaaaaaaaaaagtgattagtgtgggtattcgggattctaagctctctactctctttagatagatttattgtgttttcacaaaacgagtagtgagctcagggactgagactctatatttatataggtgagattttccatcaaggtacattaattgtcaaaatattttaacaattaattagaaaattaaattgagaaatgaattaattggtgaatcaaaaactgacaaaatgtaaaatatttatatttattaaataattgatttagaatcaattgtaatgaacaagaaatatacatacacccaaaaatcaattaaataattttatatttaatataaaaatattataatattcttccacttactcaatatgtaagcccaatgttccttattacttaataaacatatgaattataccaataagtccttattatatttcgagtattatctttcatgtattatgatatatttattacataaccatgtacttaatgtggaaatttacttaagcgaaaaacctcatgtttcttttggtcctctaataataattttctcaaatgaaaaggtacacgtaaatatgagaaaagatcaaaattagagtttcttgaatatttttagttgtacagccaaaaattgcattattgataattatatcccatatttacgttatgatccttgaatttgtgttacgacatgcatttagtcaaggatatgcgatcacccaatttattatagctagcgtgcttaatgaccacttatcacgccttttatggctaaatacttaatatcgatatgctagcttcaactagaactgttatagttcttatccataaatactgtagctaaatttatcgcaaaattttcttaatgacctaaaatataattttgaactctaggcctaatataaaaatctataatacatcatacgagatgtatcctcaaa

SEQ ID NO: 237546 - DNA, 1144 bp, Cannabis indica
ctaaaaaaacaacaacgaaaaacaacaataaaattaacaaagaaaacaacaataaaaagtacaagaaaaataacaaacaaaaaaattaaaacaacaaatagaacaaaattttcaaacataaaaaagaacgtattttatagtaaataaaatcaaaaaaatcgtaaaaatatttaaaattcgatgaaactgtatttttgtgcatttgtgaaattaatccttctataaatatatatatatatatatataaaaatatttatatgtatagtggttaacggtacatttatatactataataaggataagatacttctcaaaggggagagcactttcatatggtttattttatattatatatatttatataatttattgagaaatttgcggtaaaaatctttaaaaagtttactatgatgcagattaattcttaatttcgaaaaataacagtaataatctttaagatcacatttttgtaggtccgttagtcttaaatttgacgaatccgttaagttattcataattgccacgtgttgagctattattggtccaaataataattttaataaaaaaataattaaaaattaaaaaatattttaaaatatatacttttttctttttccattttatctctttcgtcttctacctccaacagtccacccccaccacccctatatcattttcttcctccaactacaccaccccaacttcgtcttcttcctccagccacaccttgaccccgacccacccctatctctagccacactctagtccctgagctaaccggagttccaccgcgcacgatactcgtctaccatcgaaggtgaagcttgcagaaactatcgacaagatctaaaagatctttactaatagaatacatttttgaaaatcattttactcaatggatcttgaatacgactagattggacccaatttcttttttttactctgacgagcttttgacggcgaatgaacgacgaaggaagctacgagaacctcagagctcatggtttgaaactcgacaaaggccacggtggccttgcctccattaaacgacgccaacgcccgtggtagcctccatttttgacggcgagacttcgtcgacagtgaaaaacatcgagccccaagatagagagagatttggggcttt

SEQ ID NO: 237547 - DNA, 875 bp, Cannabis indica
gcattacatttgagtgtacctatggggggaaacggtaaggtatccaccatttgtaggtcactttgtattgtgttcgagggacacaagttatctggaaacttattagtggtgcctatggggaaatttgatgtaattcttggtatggattagttgtctaaataccaagctattgtggattgttcacgcaaaagagtgactcttagtggtgatttgattgtttatcgagccaaaatgagcgcagtgagacaaaatcctatcttaagggcatgcttcggtggaaagagaaacttaaagtgttatgggaatttgtttgcgatcgatgatgagtctagggatttagacctgttccattggatatcagtggttagtggtttttcggatgtgtttctagaggatttactagggttaccacctgatagggagatcgagttttgcattaatttgattctcgaaggtcaaccagtttttattgcgccttaccacatggcaccttcagagttggctgaattgaaaaaacaattaggagagttaatggataagggttacatcagacatggtacttctccatggggagctctagtcttgtttgccaagaaagcttatgggactttgcgactttgtgttgactatagaaagttgaatcatatgacaattaaaaacaaatatcctataccaaggattgatgaagtatttgatcagcttggtggttcaaagttcttttcaaagattgactggagatcaggctaccatcaattgaggattagggaagaagatatccctaagactactttcaggacaagttatggacactttgagtttttggtaataccatttgggttaacgaatgtacctgctgcatttatagatctcatgaa

SEQ ID NO: 237548 - DNA, 676 bp, Cannabis indica
attagctgaagtggaactcaataattcattaccaacaagattgtggcgtgataatcaagttactcttcatattgcatctaatcctgtgttccatgacgagataaagaacatcaaaattgattgtcattttgtttgtaaaaagatttaacaaggtttaatttctacaagatatgtgaagactagagagcaaccaggggacatcttcaaaaaatctcttaatggggtgtgggttaattattttttaacaagcttggcatgatcaacatatatgctccagcttgaggagaagtgttagatatgtatatattagctagaaattaggctaatcagtttctttaattctcttaggtttctaatagattgcctaagttgtgtataaatataagttattttctcaatggaataaacaagtaaattagtcttttcactattatttacacgacccttcaaaaccgatagaaattccttgcgagtgtttataattgacaaaaattctaaactatagtcgccagtttaaaaaagttacttaatttttttcctactggtgctaaaaaaattgattttgtgaccgacaaaaattccatattttgtaatagtgttttcatgctcgaaacactttcgattgaatttcaagctccattttcgtagaaaacattccaagaaacacgtacaaaat

SEQ ID NO: 237549 - DNA, 1069 bp, Cannabis indica
aacataaaaagaccgtattttatgtaaataaaatcaaaaaaatcgtaaaaatgtttaaaattccgtgaaaccgtatttttgttgtatttttgttgtttttgtgcatttgtgaaattaaccctatgaaataccaccaaattttttttattgattgagcaaaaacaggtgcaatacagtcgagatcgattctctgatgagttctctcaaagtgtttcaactctcacactctcatccaatctttcttttttctctgtacctttctctctctacctttcaatcttttctctttcttttttcttaatctcaatctgatcactgtatatttataaacttaggatcaagattctaaagtaggtggttgcaaaaatcgaggttgttaggtaataactaacttaactaactctcatttgagcgaggtctccacatcatcataaataggagtgcatccgagagtgaggatgagggttctcgaagtcacggaccaaggtacccgctgaaggaccttcccaaataagaacgagcccgttggagtcgactatctggggactaccttccaggaggaacaactagccattcagaactccttttcgaaggaggactacatttcttgaagatctcacctagaatgaatatgttagtcattcgagaacaactttttgagagatagataacattccacaaatgatttttggagatcttttcatttggagaaaaaataccacattacctaatagaaaaaataaaacaaaattcaactttaaacagtaggaattgttcattaatgttagttcattcaacatgaacatgaatcattgttcaaaaaaacatgaaagagaacaataattaggcaaaaacacacaaaaaaaacaattaaaaaacacaaacatgaacatttaacacccatgtgtaacaatgtttcacttcaaaatagagaatctattttaattgattttatggtattcctactgtaatatcaattgtacattgacttattggaataatgacaaaatatataaaagattaggtcttgattatatatgtgaaaatgataacaaaattaactatgctg

SEQ ID NO: 237550 - DNA, 891 bp, Cannabis indica
tttttttcaagcccaagaaactatgttacaagaacttaaacaatttgggagcttggatttgtatgagatacgacggttagggggtgatattggtgtcaagcctacttctgaaactaatgaacgaactactccttttaagaaaaggaaattaaatgaggcctctgcttctttatgctcgaggcctcaaaaattgttccaaatgcaccccggtgttattcgtgatttcctatgggactccaaggagcaggatcatgagtctaaggtagcctttgaagaaccctcttatgatatctcaatttcacgaagtcacattgatggtgttatgaagaaccctatggttggctctttttttattgaagaatctggctctagtgtgtctgttcactcttgtacccctgtggaggagaatgtcatatctcctccacatgagccatgagaggcgttgcttgaaactgtagaggattagggaagacactactacaaaaaggggtttttgcgtcggtcaacacgtctggttaaacttgttgacatatgcaaaagtcaacctacacttttttgcttcaattatccaccgatgcaaacaattattaattaccgtcggttatcaatccgacgctaaaataaaaatcgaaacaaaagacaaaatataaaaaaaaatgtgtatactctattagcgtcagtctacaactgatgcaaaaagccattatatacactattagcatcggtgtacaattgacgcaaaaaggcattaaaaaaatcagttatgggcttcggcccatctttagaaaaccctacttatatatatttcaacttaacctaattccctcccagtcgccccatttcgtttcacacacacacacacactctcttatatcaatctctctctctctc

SEQ ID NO: 237551 - DNA, 614 bp, Cannabis indica
tcacataacggacaacgagtgttgacgggaacaaactttgacgcaagctgtgcaagtgtggggagacaactagaaccagctctccacattagatttttaattttcgggggaagcttcaaagaccacagaactttccaaaaaacagatgcatctacatcgttggttaggcctttcaattcttgtaaagcatggtaagcactcttgactgtgaatagaccagtcggctccttacaccagaaaataaaatcggttgtttggtcagtattgacaggaatctgcttgatcaatcgttgttcccgattatcaaacaagtcttgtaaaatttcttcatcccaagaagtaccatccatggacaaaagattactcaccttagcatgttggagggccggatgtgaggatgtaacaaaaggatggtctttatctgggagccaaggttcgttttgaatgttgatcaaagtgccattaccaactttccaccgagttcccgcacgaataagatcttgagcttcccaaacacttcgccatacaaagcttgggttatttcctataccagccgagaggaatgtgccatgaggaaaatacctggccttaaaaatccgagagacaagtgaatc

SEQ ID NO: 237552 - DNA, 1219 bp, Cannabis indica
atttttggtggataaattaattttaagcatataatatcaaattttcctttgttaatgtgaaatatataagaaatatgagtagtacattcctaaagaattattttggtacactttctttctcatttgaaaatagagttttttaatttttattatgtataattatttataaatttttaaaaaaattataaataatttacattactaaaaataaactttaaaagttacttatcataggtataagaaaaaatagctaaatgtgcaacataacatttaaatatttttttttgacacgatcagttatttaaaatattttaaaattttataaaagtgatctgcaatgtacgcattgtagaaaatatttagattgaaaaactcttacaaacatcaatagagataaaaaatctactaaaatgataaatttaatcattgttatcaatgatattaatcatattaggaattctttcagtatcatatttctgtcgcattgtaatcggtcaaaaaactatgttgctcattctttaacaaaacgagcattagatttagatgaagtccggatgtggtggccgggcttcttcgttgatttagctatttaaattgcctatcttttatatcccgatcttttaacttcattgtctttcaatagaatttctcactttcaaaaaaaaaaaaaacgaaaaaaaaaaccttaaccccaagagagagagttgaccatttatttcatgcaacaaatgtaaatattaaacttgattcttacgctgacttacacataaatacttacgtacacatttcatatcatataatataatttatatatataaacacacttctacttcatcacaattcacaaccacattaattattttaattaattaattatttcctaaaaaaataataatcataaaacattgaccacacaataataagtggagctgtcaatgaaaaattcttattgcccccttttggaatattagataaccaaatatatatcttatatattacccttttattttctttcttaatttctatattctttagttatttttttcacattaatgtgtttaattgatttatatggatattacttgatgtgattagataatgacttaattgggttaaggccggtttgggagtatatatcattaattcaaatcacatatctatatctatactaggtgaatgtacgtgccgagccacgtattgttagtttcatttaaaattt

SEQ ID NO: 237553 - DNA, 1709 bp, Cannabis indica
gggaccaacgaattctttcctacaggtccctctgaactggaattccagttcagtgcaggaatctaacgaaaattcataactcaaccaattcaaccccaaactcaaagaaagcttccagacctgctatttagaactcaaagaaccatatcaaagcgacaaaacacttccacaagctcggaaacaaaatattccattaaagagccaagcttgagttctaaaacccaaagcttgctcaagcatcaaaccagccatcacaataagcctaaaataacatatctaagcataatttatccactaaaaataataacaaacactagcagcaactacaacaacccaaatctcattccttataattcaagaaactaaaaagaaagccacaaggggcttaccttggcttggaaataactatacttgctgagaattacttgaattgagaggaaaacacaaccaaccctagctggtctaggggtttcgaaagagagaagcaagagaggggagagaaagctttttccttgatttttcttaatttgaaataaaagaataaaagattttggttttattaaattaactccagccaagataacactaaaaatcaaattaatacatcccacaaaaagacaaaacactcaagagcaaaatgacctttttgcccttccatactaataaccactaaaggtcactaagggggattttggaaaattctaaaatcccaaccattctcgacattcccaatgtctaactatatcgccctgctatactaaaaaaaatactagaatgtgattctaatagccaaacaccgcgttccaatgttgtcgggcactgaatatgcaaaattatgaaatttctatatatgacatataaaatgcattctgaattcaaataaatcatcataaattaataatttagaattaataaacaactttcataattaaatcctaattatctgctaatttccaaattaaagctaagcggtctttacagtcttcataacccatgtctgcaaaacaagacgaggtgttacattcattataaaagaaccgattaaaaaggggaggagtataattttccatctaagggaatttaccaaaatcactagaaggtgagctatcactagatgaagtggtagaaggaccataatattcgctaaagtccctacagcctgtaattgtgaatatatcaaagggctcgattggttctaaatcccaacttgcatctatgtgacatgccctatcttccatagtaccgtattactccggtataccataaaaattaagatgggagtcttgggaaggtaactaaggtattacactcagccctaagtacagtaggccaccagccacattgattacctcgggaggctccttcaccagattctcgaggggcaatgctttgaaggtattgtgcttgggccaagtgatcccagtcctggtcttcgggttgaacaattatttgctgccaagatgaatacttgggaaccttgtaattccaagtgtatactttatcagcgaggagacccgcaaatcccaagttagcttcgttcaaaaggaacttgcatgattgaagaccgtaagggagagtcagcaggcgcctgtgcctactaaccatctcgggggtaggagtaggtctcgtcataagagctgtcagaacaaacaaaacattagtcaagtacttgaaaaaggaagactgatgtaaataagtaagaagagaac

SEQ ID NO: 237554 - DNA, 1078 bp, Cannabis indica
ggcaacggttaacaacctctatttgcacctatcaatactggaaaagcgatgtttattggatcggcatgaaagcgaaggtgcttgactttgttcgctcctctgagacttgtcaacgcaacaagcatttgtccatgtctcctaggggtctattacaaccattgtcactaccagctcatgtttgtgatgatctcactatggaatttatcaaaggattacccaaattggaagcagtacatacggttttagtggcggtggactgacttagcaattacagccattttattggccttaatcatgcattcaccgccaaatcaatggctgaagttttcaccaacactgtggtgaaattacatgggctacctctaactatagtctcatatcgggatcgtatttttctcaaccatttttggtctgaattgttcaaactccaaggcacggagctctgccatagcacttcgtatcaccctcaaactgatgagcaaatgaggttgtaaccgttgccttgagacttatctttgttgctttgcttcgaatcgtcccaaaggatttgccaagtggttagcttgggcggaatattggtacaataccacctttcactcctccttgggttgtacgccctttaaagtgttgtatgggcgtgactccccaactttggttcgctattcagctgggtctactgcggtcatggctgttgatcagtagctggaagagcaagactcttttctcgatgatttgaagatgcacctcttgcgtgcgcagcaaaagatgaaggatgtggcagatgagtcgctggcaggttgaatttgctgtgggggacaaggtctttgtcaaattgaggccttaacgccagaagtcgttggccacccgtaagaatgagaagctggcagcaaggtattatggtcctttcgtaattcagaagcgaattggtagtgtcgcttatcagttggaccttccttcttcggcagccatacattcagtgttccatgtgtcacaattccgcgctgctatcggtacggctcactcatccaccgcccttcctcctaccttgacagccaatttggagctcattgtcgaacca

SEQ ID NO: 237555 - DNA, 873 bp, Cannabis indica
aaaaaaagaataagtggttgaaataaagtagtaaaattgtcagtagaactagtctctaattaatttgggacgactgacttatcacattaagaaaaagatgatatagtatatactacgaattatcattacaaaatcaaaatgctccattcagtttcacacattacagctagtctccaatttatttgggacgaccaccttatcaaattaagaaaaagatgatagagtatatactacaaatcaccattacaaaactcaaattctccataagcctatcgagttgcagatggagcggttacgtactcaaccgtaccagcagcatcttcagagagaatattaatgaagtttacatgttctgcctcagccgcgacacaccacagcagtttcagttagtctcttattttagggactcgtctttgtagatgtcccacaatttatttatcaacatcttaatatcatctctctatatattttcctctttgcacttccatagctttgaaccaacacaaccaatatagtcatatgtaatgtttaatattgaaaccaaagactaaagaccaaacttttagaaggttcaaaaaggtatttaaaagaaatattaaaggtgaaagttttgttaattatcctaacgcattcttggcttcatatggtgttgatcatactccaaaaaatataactaaaaatttctttagaatgtataataaagcataataaatcaacatataattgttgataaatttatagttttaggattataagtggtttagattatataattagaagagacataaaattaggttaaataataagaagagatacaaaattaataatttttaatagaaatatatagcttataataaataaaaataataatta

SEQ ID NO: 237556 - DNA, 1440 bp, Cannabis indica
attactcgtgctaggcccactacactcctcgcgtattaccctttctagaggaaaacacctaaattcctcaggggccacggaccttataactcaacctttcctctacttgatgccacatgatttcaagatgtcgcaaacggaggccccaatcgacctaaccttggattcagtgagtttagactcaaaagtgacgctgggatcctatggggtctttgatttgcgaggcttaggagacacaatgtcaaactcaaggtcacctggttcaaaagaaacagtgaatttgggtaaaaatattggtctcgcgagtggaatagaaggtaatattgtggcttcaggccaggctgcgtctcgcaaaaaatgacattttcccttagaaatctcttgtaggaatcgcctatagtggctggaaatttcttcttgctccgacttaattagatggtctctaattttggcatcattcacttccaatttggatcgaggtttgaaatttcttggtttgtacgggaaggctaattgtttaggatattctgtttctaaaaattctggagaataaacttctgaaccagattgggatatttctacaaaatagaacaatctcaattcctcgatgaaatttattaaatgagaggcttaaagaatatgataaacctaaatcatgcctaaaccctaaaaattacccaaaaaatataaacccgaattgctaaaccaagtggagtgacaagatgcaagataatcataacccacataaaaaaagggagaaggatgaggtacttactgtttgaagccgactagtggaaattcctgcaaatgtagatggaatgaacgatgtgatgaattctttcaacacctgaggtctaaaagcaaatccgagtaaatttgtaaaaaaatgtcaaagacaagggtggcatgcaaggttttgggaagttgggatgaaaaattctcagaaagcttgagcttttgaaaagacaaaaaatggtaaaaagtggattctttaccgtttaatactttgaatttagtaaccgttagataaaaatatagaagatccaatggatagaaatgggagagaagtggaaaagatggttcattaatgctaatgatgtccctcgaaaccacaaaattaccaaaatcaatggcatgcacattttaaaattggattatgaccaaaatacccatgttaatcatttaaaaagcacttttgattaaaaatgactttttgagggacaattattatacccgaaattcggctgctacttcagaaggtcacacgtattagtctcagagaatatgaaccaacaaatataatggtaattatattatttaatgcaaaatggaataactcattaaatgcagaattaatagagtatatttataactcgcagactgcacagtctttagcgagacaaggatgtacaaactattgattcacgtattgacaagaaa

SEQ ID NO: 237557 - DNA, 1010 bp, Cannabis indica
tcttttattccaaagaacctgaaaacatagacaacaagcgtaattccgtcccaacacagcgaaaaatgcacataaattagatccaacacataggctaaaaatagcctaacactcttttgtttctcaagaaaaaattaggtttcaacatgcaaattaaagttctagcttctgttgggtcttgagttggttagaattgagttgtttgtgttctattataaggttttttgagttattttattgtggttttatgagctttagcatgtttgaaccaggattgaacttttaaagctcaaacttagctctttaatggttgaattgatttttgaggcttatatctatttttgttgcttgaattatgttcattgtgacttgtttaggtattctggaaggtttgaaacgatttgggggtaaaactgatttgttggtataatttgtagggtttcttgcagggagccagttaaccaattcaggtagccctgtagaaccagtaaatcgttccctaggcaaaaccatataaactgattttaacatttttagaaccctagatttttgtgtgttagagatacttgggttttgccaagctatccatcaataaggaaacttttagtttgattttaagtcaaaaagttatttagtgtgtcacttatcagttttatgagtattgtgaattaggggcctgtaataaaccgtcgagcagcagttacactcaggttgactggcacacctaaattcgaaattgaggtaagattagtataatttagtatgcatgtttatgaatgtttgttagaaaaacatatgattaataacaatattggtgtacatagaaatgcattgaatatcaacaattatatgtttgacaaacacctgattgatgctatcacattgctacaactagagtactgagtataggctgatattatggtcaatggtactatcactactacaaattaccctttctatgtctctttttctagtccaacaaaaatagtgttggacatgaattttttttg

SEQ ID NO: 237558 - DNA, 936 bp, Cannabis indica
ttgagatggcatatgaactgagctattgattgcttggaccacaactaatgcatcagtttcaaccaccaccctatcccaacctctcgtctttatccaactcaaggcctccttgatcccgataacctctgcaatttcaggaagaacacatccccatctacttacagaacgagcttccaaaaggtggccatggtgattccgagcaatgcaaccaaagccaaatttttgttgtgtttggaaaagagccccatcgacatttaccttaaccatattaacacttggtttgcgccataaattactaattgcagattcacccgtggcatacaaagcagcaggggtctgaaatttagcaactttccaactgttaaggacttgctttgccgactgaactacttgtaaagcagatctgattttgtgtttccattgcacttcgttccttgtcttccaaatgctccaactgagcatcgcagcctcgacaacaacatcagtcgatctgttctccatcagatcaaaaaaccatcaagaaaactcagtgaacacaccagtcggctgtgttgcagctgagaaaaaccagcaggctttcgaaaaattacagcccaagagaacatgaaaaatagtctcaacctccaaattacacaagggacacataagatcaacattcacatgttttgtttgaagttgcaccttagttgggagacaacccgaacaagctttccataagaaatgatgaactttgggaggaactgaaatttgccacagttttttccagccactgtcatcttgtgtaaaaagccaatttccacttgaagattgaaagaacttgtacgcactcttgactgaataaaatcccgaggtttccatattccaacaccaactatccataaagctggagctacttaactgaatatttttgatcaagctaatatccctctcctcaaa

SEQ ID NO: 237559 - DNA, 1349 bp, Cannabis indica
gctccctcctagtttgtaaaatgacttggcaacaccaacgggcttgggcttgggcttgggcttggacttgggcctaataaatctggtatatagtaattaaaaagatgatccaacttattattatgtactccaaagttatcaaatttattacatagaatctaaaataataataataatcaatcaacttatttataataatatcagtatcgcagttaagcataaaaagatcgattccaaaattagacaaaaataggaaaaactcattgcttaaatattaatttttcttttttgttagacgtaaaaaaacaagattttaattgcttagtaacataccaattattaactggctaccatattataaaaagattcactatatgaaaatgatctcatattcattttaattacttataaaattatggggtctttttcaaattatattattttgtcttttaaaaaaactaatgagtttataataaaatacaaatagttaatttattaccaaaatttatactaattagttaattttaggttatatagtattttattgttattatttaatatacattttagtaataactttcaagtttattttggaaactaattagttactataaaatataacaagttactatttttatttaatagttctatttagtataaatacatgttttagtaacatatatatatatggcattcagataaaatataacaataataaaaaaaaacttacaagttccttttagcaaatagtacaatagatacttttgaagcttattaatttaattttttaaataaattaaaagcaactacaaaattatttttcatatataacataaattaattaaccaaattatatgagcaattgcaacggtagaatttccctaacacccaagatcatcttgggttgtgtatatcagttttagaaaaaagaaaaaaaaaacaatttaaaaccatgatgaatatattaagtgaggtcgacaaaaatgtgaaagagcaaagttatttgggcgtgcaaactttggtgtattggaaatcagcaccacatgcttagtttgtacacaaattcagtattttgattcttttggatttaccgtatttttggttttggaggtttccaaactccgaagagaacattcataaaaaattcaagtacaattgacacggttatcaatatttatccacacctgcccataattaaattcaactcggtttcctttgtaattagtgaacttaattttcttttcttttttgaaattaaaattagtgattttttttttttgacaaaatagtaataatttaacagcatctccaatggtactttgagaaaaagtgcttaatactaactatta

SEQ ID NO: 237560 - DNA, 1054 bp, Cannabis indica
ataaataactaatttttatttctttttgcaatgaaatgaccgaattttatttgtaagtgccatatttttattgtgtcaatttatgtgcaggtcttcgtcttttgacctattagttgtgctcatttattgacctcacagatctatcaaggtttgtttttgtgtctttgtcaggtcagttttaatggataaaaatatttgtgccaactgttatgagctagcacctgaagaattgagtcaattgatagaaagttagggcttatatatttgattctagcaatttcttaaataactttcttctttgatagaatcttctagtgaatttttgctatgttagggcaaaaactactttttttggtttttttttttttttttgtattgcaggtttcatgctaatgaatgcttcaagacactacgaaaaaaaaaaaaactcttactttaaaaaagttgtaactaaaaaatttgtggctaaaggtattagtcacaaaaaaatcacaattttttatgactaaatacatttaaaattgaggcagtacgggattggtctcgacctaagtctgcaactgaggttagaagttttctggaatcagcaaggtattacagaagatttgttgagggatttgctaagatttctatgcccttaacataattgactcggaagaactgcaagtttgtttggactgataaatgtgaaaatagtttccaggaactgaaataaagactaattaccgcacttgtgctaactttgccagtcagtgatgaaaagttcgtgatttattgcgatgcatccaaacagggattaggttgtgttctcatgcagtctggaaaggtgattgcttatgcatccaggcagctgaaagagtacgagcagcgatatcctactcatgatattgagctggcagcagtcgtctttgcactaaaagtttagcatcattatctttatggcaaaaagtgtgagatctacaccgatcacaaaagcctcaaatacttttttactcagaaggatttaaatatgaggcaacgacgatggttagaactggtgaaggattatgactgc

SEQ ID NO: 237561 - DNA, 1708 bp, Cannabis indica
aaagcgtatgataggattgaatggcctttcttgaaagctatgctattgaaaatgggggtttactcatagatggatcggtctaataatggcttgtgtctcttctgcaaagtacaaagtcattcatgggtgtcatgaaatgggaccaatcactcccactagaggtattcgtcaaggcgatccgctctccccctgtttgttcattctgtgtgcggaagggctgtcatctctcttgcgaaaatatgaacaccatggttatatccacggttgtaaggtagctaatggggcgccccgagtttcacatatgttattcgccgacgatagctatttgtattgtaaagctactttggaagaatcaggccgcattcaggaattactccgtaaatttgagctggcatcgagggaacaagtaaatttggcaaaatcttcaatcttctttagtgttaatacaacaccattggtgagaagtcaagtttgtagtttcctaaatgtctcagaggcggctgaaggaagcttctatttgggtctccctagtactatgtctcgcaacaagacaattgttctaggattcctaaaagacaaggtgcgaaagcggatacaaggttgggaaggcaagtttttgtctagagcgggaaaagaaatccttgttaaaactgtactgcaatctttacccacctatgccatgagtgtcttccttcttcctttggaggtaagcagagaaatagagcgaatgatgaccaagttctggtggcaaacatcgaaaagttcacataaaggcattcattggatggcttgggacaagttaactaagaacaagaaagggggcggtcttggttttcgggatttgcgagattttaatttggcaatgttaggaaaacaaggttggagattagtgtctagacccgactctctagcttcaagagtgtttaaagctagatactataatggtggttctttcctcactgcccaactcggttcaaacccaagcttcgtatggcgaagcattttggaggctcaagatttagttcgaagtggtacaagatggtgtgtgggtaatggacattctatacctgtgttgggagagccttggttaccagatgcaactaacccccatgtgatttcaactcacccgtcccttgctaatgccactgtggcaaaccttatgtccatggagaatgggggttgggacaatgaaattattgaagatctctttgaagtccgggaccagcaactgatcaagagtattcctcttcaagctcccacggctttggaccaattttgttggactttggagacatctgggatttactctgtcaagagtgtatatagcttcttgcagaaggagaaaggctactggtatgatgattaaacttcatccttctgaaataaattgtggagtttgaaagtccctccgaagatagtgaacctgctgtggcgtgcctgtactgaatgtcttcccaccctcgttcagcttcggatcaagagggtggtaagttgtgtcctctgtccgttgtgtcaggccgaagaagaatccacaatgcactgccttgtcacttgcacggtggttcaggaatgctggaatcgcgtgggaattggtactacaactacacgagcaacgtcctttctgtaatggtgcagcagcaagttccaagttttgagtggatatcagcggtgtacaatggcagcggtctgttgggccgtttggggagcc

SEQ ID NO: 237562 - DNA, 824 bp, Cannabis indica
ttgtggttttctccccaaatttatttgaatcttcattattttgataatggtgaaattcctggagcttgttttggtgaattgaattggaaacaacttaggttgacaaaatgtcaacctgggtgctaggtcccagtttttccccttcaaaaattatgtttggcccccaaaaatagttgaatctcaatattttctgaagacagagatgatgcttaaaagaattcccgaaaaacaccattttttgttgccttggttggcaaattgtcaacttgggcgtagggccagccccaagtgtcaacctaggcgctgaaccctattatttgtgcccacgaaatgttattattcctttggaaagacctatttccccatttttgatgaagacagattcaatgcaaaagttgaatcttcgattagacacttggaaggcacctagattgacagtttgtcaacctgggcgccaagttcttgggtcccgagtgttcaaaaattaacttcctctaaatttaattttgatgcctcaaatatgttcatggtatgtctagttaattttccagtgcagattttagccactttgcattaagacaaccccaaaaattgaaaccctagttgaggatgtcaacttgggcgccgagcgaaaccctaggtgcccaggttggctttcgagttgtaggttcatgtaatcttagttctcaggacttggattaggttgctccacgtcttcatggtataaaatactaaaagatagtgggttggattcaagttattgaagtctaaaattctatcccaaatattttagagtcaacctaggcacagggttagggtcccct

SEQ ID NO: 237563 - DNA, 818 bp, Cannabis indica
gcatagactataaaattaagcaacaaatttttggcgatgttgccaaggaattgaataaatattaatattacaataattagattagattctacttagggttttctttctacttctggctaatcagtttccttgcaatttctcttactctatttcaggtattggtgatttatgcgacgtcaaggacaaagtataatagtgcatgttgatcctgaaattgagaagacttgcagaaaaaataaaagaaacaagaggctagaaaggagtgtagtggaggttgaacaagaagtagtcgtgactgacaatgccaatattggcaataatagcaataatggaggtgtggtagaagaccaggctaagatcgcaatccaccataccgtagcctgagagattatgtgctacaaaatatgacaggggctagatcctatataaggccacctgccatcgaagccaataattttgagaccaagttggccatactgcagatagttcaatccacattccaatttggcggacttttatcaaaagatccaaacatacatcttattaactttgagatcatttttgcatttgaaagttatatttgtctatgtgtttgcagatcagcatggatctagaacaaatattattggagtgtgagttggatctaatctgatatctgataagagatttgaacactttgaataagccttacggcccatcaaattgggggtcttacccgctccaaatgatcaaatctttttgccaagcctacatgagttaaacaaaagagtacactcataaaaaataagttcatggaatatgaaggtggaatagaatta

SEQ ID NO: 237564 - DNA, 1516 bp, Cannabis indica
tctattcaatggatttaacaaaacttctcaatcttttttacttctcaatactagtggtatgcctttgaaattatctaaacctgtggcttgtggtatgcctgataatttacttgctttagtgcaagcaacttactttagtaagatgctagagcattttggctaactctaaagaaagccttttgacttctagacatagagtgtatctaattaaggaacagtttcaaccattccagaaaagataaaagtcatgaaaaaaattctttaagcatcaatagtgagaggtctcatatatattctggtatgcattagaccagacatttgttgttgattgggagttatgagtaggtattagtttaatccaaaaaagaaatattagaagacaatcaaaagaactatatgttagtcgataagggtggtattttaatactcttagactacaccaacttagatttctagacttgtgttaatgctagaaagtctacttatgagatggtgattactctggggttgagcagtactttttggagaagtgtaaaaagtaatctggagtctctgacactaccagtgagactgaatattaaagtggcctagaaggctactaaataattattcagtctatgggaagttctatatagttttgatattattccagttatagattaactactaatgttacttcctgacagatacagttgctcaacagtaaaaggccgatttgaaacttaggattggactagaaagtactagactcaacaaaattgaattatgctgaaagtaatcttgtgtttggtttaagaatagactggagtattttatttgtttccttttaaaaaataaattaaaataaaaatatataataataaataaataaaaatgagtaattcccagaacaaataaaaggaaataataaaattaaattaaattataaaataaaataaaatagggaaaaaaacaggaaaaattccaaaaagggaaaaatattacaatattactatgggtcgacccattcaacatttatacagcccacaatgaaaaaaattacaaaaataccacctggtctataccttaagccgcacgtaacgaacggagaagatgaagatacctccatcgatccaatctgcaacgcaaccagaatgaaaccaaaacgagggtaaaacaaccataaattctggcaaaaattgattggaaaagaagaactgcaatgatctaaacaaaaaattatgaaaaaaaaactagcaaaactgtgaagaaactgaaattaaacatttgatttcggttttaattgttcaaaataactcaatccagaatcaaaaatccagattcaagcaatgtagatctgtattaaacagatctggagctcccactcgaatccaaatcaaggtatgatatgaaaacttattcaaaaataaatctacgtcatacacagttgcattctggttgattccctggtttacaataggcaattcggattcttaaaaacaataaacaagatctgattctaattaaggaacgacat

SEQ ID NO: 237565 - DNA, 584 bp, Cannabis indica
gggtgtttagatcgtcgcttaagtgtgtttccaactctactatcttttttagagtttttttaccatgaagacatgaagatccaaatccaagacctagtaagctaaaaatacactaaacaacagccaggaagtcaacctgggtgctgagcacccaagttgacaaccctactagggtttttgtttttagacccatcttagttcaaatgagtgaaactttttactaggacatgaattagacttctcacaaacatatgtgaggcaacaaaattaaaatcagagcactttcagctttgagcacccgaagcaccaagtgcgctaggcacccaacgctaaggttgacatattgtaaacatagggtgtttccaactataatactaaagaactatcccaagaattttctttttcttcatctaaaacaaggaaacaagtaattttaggggaggaatggatcaatctggaggccgaaatggggacccagcacaaaggttgacactttgtcaacctgggaaacttgaataagcaaattagattgtcctctaggcatattctccattttgatctaaaattaagatttgagtgctttt

SEQ ID NO: 237566 - DNA, 793 bp, Cannabis indica
ccgagatctagctgttttttctgtttgacctttgaggaaaggtttgtcctccctctagcaagggaagatctaccctagttcttgaggagcttggttgaagtattccttgaagtggatctctaaggagatcctggtctcttctattggttctctagttgaaccgtcttatcagatcactgacctctcgattgcagcaatctaactctgcttggtgagattgaaggatgtactcttggtcattcatccatctcaggaattcacgtctctacttagcaaaaacatctcaatcaacagcgcatggttctttagttaggcttgcacgacctatagtttctctaaacctaaccaactaaaagtcttttcctaggtccaaatggggttcactaattgtagactcgacaattcctgggcctgtctctccagcgtagaatcggagacgagattcagttgctgttccaggggctgttgcccatgggtccttccttcagaaggaggcaccaatgtgggtctactcttggaggtagggcctgccacttggatccattaggatgctcgcatcagtttggccaactgtagtagtcagacttgtagtgcctgttgtggtgacaggattcaccacatctgcagttttcatggaattccagtcgtgactgggacctcgatatctagttctgcaatctctgggtcttgaggaagacccaaagatgcagatggtgggacaagtgttcttcttgttgggttttataccctaaataaaacttcaattcaatgtaatccattttattcaacatca

SEQ ID NO: 237567 - DNA, 1030 bp, Cannabis indica
ataacatatgcatgacattatactaatcttaccttaattctgaattcaggtgtgccggtcaaactaagtggaacaactgctccgcgaattataggctcctaaatcacatcgacgagctgaatttttgcgataccctgctgcaaaatctgggtaaccggttatacaagcattgtaaaaccggttagccaattttacccagaaaacccaaaacaatccaaaccctaaccaaatcgattccaaacttaaccaaactctccagacctgcatattataccccaataaaccatttcgaagcaataaaacaataacccaagctcagaatccaaaatcaccattaatgagccaagcttgagttctaaaactcaaagcctgctcaatcaacactacatcccctaaaaccacttcaaatcaacacatataaacatattttaacttgtgaaatcaatatcaaacaaccacagcaagaacaacaactgaaatctcaaatcatgcaaaatttcactttcttacaattcaagaactaaaaagaaagttacaagaggcttaccttggcttggaaaaacacctagagctactggaaaacacagcaatttgaaaaaaaacaaagaaccctagctggttctgtagggttcgaaggagagagaggcttgagagaaaagagaaatgcttttccttgatttttcttattttgaataatgagtaaatgaatttttttatcaaaagataatatcagcctaatatccatataaaaaatcagattactaaataaaacaaagtccactaaaagacaaagtacaaatggcaaaaagaccattttgcccttcccacactaaaagtcataaaatggcacttaggggtattttgggaaattctaaaatcccgactactcctgaaattcctattgtctactatattgtcccgctatactaaaaatactaggatgtgattctaatagccaaacaccgcgttccaatgttgtcgggcacaaaatatgcaaaattataaaatttctatatatgacataaaaatg

SEQ ID NO: 237568 - DNA, 1290 bp, Cannabis indica
tctcaatcaaaggctaggcactcggagattttattattgactgcaatgaaaccgaggctaacgccaatatgccagatctagatatgcctacatggaaagtgtatgtcgatggggcatcgaacgagaatggattgggggtcagggtagcaatgatatctcctgatggactgaatatgaagccctgctagcagcactaaggctggcaaaggcagtaggagccaacagggtggaggtgtacaacgactctcaactagttgttaaccaggtgttggaagaataccaaatgcatggagaaaagatggtcgcttacgtcttaactgtcagagaattgctgcaagaatttaagaattacaagatcgaatggattccccaagaaaggaacgttcatgcagattgccaagctaagttagcatcagattatgaggtagaaaagctggggttagtgctagttgagtatctcacggagcccaacattaggccaaaagtggaagtagcgacaaatgaacaaatgccaagctggatggacccaattgtcaagtacataacaaagggagaattacctcaatagaagactatgtctagaagggtacaatatcaagctcaccgttacttgataattgatggtattctctatcgaagggggctcaatatgccatatctaagtgtgtaagatcctgaagttagatagattatacaagaggtccattcttcgaagatcacactgggggcccaagcctctccaagaaaatcctaaggtaaggatacttctggcctaccatgacgaaagattgcatagactacgtccttagtgtgatccatgtcaaagatttgcaaatatctcgagagccccgccaaatgaaatcacgttaatgataagcccgcgaccctttgcagtacggggaatagaccttataggatctctctccataggaaagggtggggtaaaatatgcaaatagtggttgtggattatttcacgaaatggacaaaggcaggacctatgaagtctataaaagctaagtaagctttagactttgtcatcaaaaacattgtgtgttgaaatgggttgcctcataagatagtctcagacaatggtaagcaattcgattgtgatgagttcacggatttgtgcaacaaacacggagtttctcaactgtggcacaaccacagccaaatagacaagtggaagtcgtcaacaaaatactaaaggtcacccttaaggaaaaactcatggcctgcaaaaacgattggcctgaagagttgccacacgtattatgggcatacaggacca

SEQ ID NO: 237569 - DNA, 2376 bp, Cannabis indica
tgattttttatttatataattatatgtagtgtgtatgtttatttaattgccaatgtaattatgtaagaaaaagtaaaataaataaaataatttataaaaataacagtaattagtgactttaattaataataagagaaatttttttatgcatctacaattgacagttcgatgtatactattgttaacccaaaatttcattaaaaatattgaagccttgtcaataaaattagaatattaattatagtgactaaataaaataaacaataagaattttttacatgattttgtagttaaaatttatatgctccacgagtcagtattatttctgattattcttttataatattttttgatacagaatagtagttttgcatattttctatacttaattcctcaaagtttttcctcccaaaagatcgtctgtccttatggaaagaactttacccatatttatagtatttttgggaaggtggttatttctctcgttcttatctaaataattatttttgggatcttggacaaatcccacatttgtccttatttacaacgtgtctgaaatcaaattactgctaataactattttttaatcttgtctagatgtgatgggtctttgctgaagtggtgcatttagagttgtctcgcattcttttgtaatagaagaaacaacgagatgaccattttgacacaacccgatgcttgctcccgtcataacattaagaattggtctaaagcttgttcttctggattggtcttctcacattattaatagtgaacggcgagacagatccattcttgatcacgacccttagtctttcagcatactcatgagtatgttgattaatgggctaatcaagcttttaaagaacttgttatctatcttttccagcgaattcacttcgggttcctatgcttttgggctatcctggttaaatttgagataatgtaagatcgttgtcaccttgctactatttatttttatcgttgccatctattagcaatattgtaacacaacgcaagatggatatctcaattagttgtagcctattctaagacaagataaccattgcatttatgagtctccttaatttttgagaccaatatccatgtgtcatgtccatatttatggctcgaaatatgggcataataattgcctcctgaattttttttctagaactaaaagggtttttaataaatcttggcaagtcaactcggtattttcccaattggtaatgagtacacttctttggcaattttatttttcccaagaaaatattattttctcattaattaaatgttctttcatttgacaagcttttcacctgtcttgtcctttcgtatttcctagaaggatcctagctgtttgatttaattttgaacgagatcgacaattcctcgtattttaatataagaggtatctttacgatcgtcctttcattcatccatttgtgatacaaaactagagaaattactactttagctttagagatttttgaaaatcttgcatgcccactctatctttgacgtattttttttcccatgattaacaatattttttctaaacctcgctctcgttacattccgaacccttggtactggagatttctagtaataagaaatcatcaacgccttcagagaaacccagaatctagtaagtcttcaatttttttaccttttttctctgttatttttattagtttttgtatgttcttgtatgatttttgccctgaagtaataaggtagttagattttagaaatctcctcttctgaattaaattatttcaaaaattttagaatccctaaaatattttctttattgagaaaaagaatgtttatatttgtttcaaaactttggtttctagagtttttagagcaggaaaacccaaaatttcttgccttacccttcaaaccaagacttgacacccaaaaataattttagaaataaatgatgagaaaattaggttattcaacgaaaatctcagctgagaggatgcctcacctcgctctaaatattttattaacggggttattgatgggaagcaccgcttcttacgagatgtggcttggccaaaagttccctagtttaataaagtatcctttggtaagaccattaattttacccgagattaccagtgctttttctctaggtaaactttgacatcatgcatccaaaggagcacaagtctaaattaccctagaaccctacggtccaattcaaggctcagttgattgagtctaaggttaggccaattgccctatgtggttccgttcttaaggtcttagcgatatcaagaatgaggagggacaccgaatttttttagtcgaacaaagcgagttcatttgattgttggattttgtgccctaaataaaacccattac

SEQ ID NO: 237570 - DNA, 1034 bp, Cannabis indica
atctgctcggtctaaaaactctgtcatagatccaacaaggccactattcttgatgtccttcaatagttctccaagtacttcaatgcccccttgtattgcggccagcctcccttcttcagttaaccttgctacttttgtagcttctatcatgaatctgcttatataagctctaagaggctctcctggtctttgtttcacttcgaccaagtcttctaaatgtaatgagagttggcgagaagaagagaactgtgcatggaactctgagaagaaagctttccatgaattaaagcttcttggcggtaacttaaaataactgttgtgtggcttctgaaattgtagcatggaatactctacactgcacatcacctcataccccttgtaaatccatttgcatttcaaaatatttaagatgtgacaagggatcctccttccctgtgtaaatcttctaggtcggcattttgaacttgaggggtagctccaggacattgatctcggagtgaagggtgatccgcgtgctcagtccaactcaagatcagtgagtttttggccggccaggccttagaacatattttttaattcatccaactatgcttgcaaagatgggtgaactagttcagcctcttggccgacctgtgtcacatcaggatctctcagagtttggtcctgaatacggataccgggctgagcgactagttgaacatattgtttgtccagacctctccttctattcaaatcgttcctgagatcatgggctgtacctaatctgttgaatactgaaacatgaaattgcctcagtgattgattggtttgaccagtttgttggccaaaactgtcagtttggatagaattattaggtgtaactccacctaaggaattgtctgataaggtctggccgcctaccacttggcccacagatggaacctgtgatcggggattggacgactgaccattataagtttgggttgtatgctcagcaagaatttcttctgtgccgcccagtgggatgctgaacgtagcagctggttgctaattag

SEQ ID NO: 237571 - DNA, 1284 bp, Cannabis indica
acttgaagattaccacatcacatgacactttgtataagaaaatggtagagctagccttgattgttgaggaggctgagcaacatgtagcaaaagagcatactacaaaggatgtcgtcacgacatcgaaccctcttgctagtggtaatgtcagtaaggggaccgacagtggcaaccctgatcataaacggaaggttgaggcttccggaggatcaggatgtaatagaaagttctggggaaatagaggtgcccatcagggtcgcaggtcttcattctgatcatatctcgagtgtcctaaatgcaagaaacaccatctgggtgagtgtcgggccaagacatgtttttagtgtggcatggtgggccactttattagatattgtcctcaggccaagaaagaggaacctaagaagaatactactcagaactcgggacgactttttaccatgactcaggctgacgctgatgctagtccatcggtggtgacaggtcagttatctataaatggttgttcgtatattgtactgtttgattcaggagctactcattcttatgtgtcgagtagagtaattgaaagtttccataaaccatgtgatatttatgcatcggggtttggtaccctgctaccttcgggagaccttattgtatccactaggtggatttggtccttgtccttttagattgacgattgtgaattgaccgccaatctaataatattgtaactgtctaattttgacataatcctaggaatggattttctgtctaagtatggggcaacgatcgagtgcaagcggaagatggtggtgtttgagcccgatagtgctaacccaacagtgtttgtgggtaaagttcaagggacactcataccaagaataacacttttgaaagttaaggacctgatgagcagaggttgtctgggattcatagtcactacagtggatagcggccatcctgtgacatcaagacctgagtatacaagatttgtgtgcgagttccttgacttctttccagaagatttatcgggattgcgacctacgcgggagattgaatttgtaattgagttggttccgggagcagatccagtatcaaaaccaccgtatcgaatggctctagcagaatttaaagaattgaagttacaattacaagaattattgaatcagggattcattagattgagctactcaccttgcggtgctccaacattatttgtgaagaagaaagatgaatctctgcggatgtgatttgattaccgggagttgaatcagctaactattaagaacaagtatcctt

SEQ ID NO: 237572 - DNA, 953 bp, Cannabis indica
ttaagtcacatatgattgtgatgagtctgaagttccagaaagcgaaattgtttggaattgctttatcaagacagcaatgggttcaattcattctcaatagtcttccacctaagtataatcgatttgttgtatcttacatgatctacaattttatctcatccaacgtagacaagctaaatgcagaattgcatgcttacgagcggactttgcctgcaaggaggcctccctccaattttgtagacatgcaaaaaaggaagcaggtaattgagtatgatgcttctaacaatgctgcttcttcaagttcaaatattgaaacaatggatagtcatactcttctatgttcgtattgtgatgagaagggacatcaagaagtattgtgaaatttaatacacaagtgcacatatcgttgttcaagtaataaactcacacgagtgaggtcgaaccataggaaattgagcagaagaccactaaataagactttgtcgccaaatcagtccatgtagcaatggagctgggtggcaaagacaccaatgaactcttggctctctccctcagcgagaatgggaataatctcaaatgaatggcatcatcgttgactcaatttactttgaaggtctggcataactccataaagttagacaggtggagatttgggtcttcagagggcagtccaccgagctgaactgaggattgcaccattaggagtatggcaggctttatctcaaagttgttggcatctgaggcaggtgatcttatacaagattgaacccccgtcaaagttggaagaacaaagtacctcaagctacggttaggtggattacgaccgttttcctggtcttctattgctcccccattattttcattgtttccgtcattggcgttgtcagccatgactatttctggttcagccctcaatgtagctctttctaacctcttgttccttctattctgtc

SEQ ID NO: 237573 - DNA, 1282 bp, Cannabis indica
tttggaccctcaaagccaaaatgatatagaataactaaaactacaagacaaatttaagatgaaaacgtttacaaagacttgaacaatagtgaaaacaattatctcattgataagtatacttagaaagaaataaagatataatgacacacataaaggcatacatatttgtctaaaagatatacatatatataaatgagaactttatactatcatttagtggatcattcattattattatagtattattaagaaacataaaatcaatggaccatacaatattataagcacatctggtataaaagataccatgttaaatttatgaattgcataatactttattaaattatgaattatatacactgactatagattcatattagacatcatataaaggatatccgtggaccaaattatagtatgaaacacctatatagtgtgaaagtctcaagcatttttttattttaaaaaaaataaattatagattgaaaatcttcccccaaaaaaaaaccccaactctcagcaaaagagaggttagttccaacacaaaacaaattcaagaataattttttctaataatctcttcttttataaataaagacatacacaacaccaatttacgttgttcagtaccctttgagatacctacaacaagaggaaacaaccttacaagctttagcttcttattgacaaattaagggccaccatacaacttacaatgatggataattcctcgaagagaaacactttgctcataactaaactctctcatacaatttcaaaacacctaccttgaaaaagtggctcttacatccttttataatggtagcaacaagaggaagtagccaattgtttgttgcagctgtcatagcagtcaatgagacctaattagctaattagcttagattacaagaaactgactaggctattaaaattaataaggcaaacaaagagtagctatattctgtctacttatattaaacaaaagcttcacaaaaaatgtagtgttgttgttgaacgataaaaaaaaaaagaggaataaataaatttattattatttcattattggttttttaaaataataataataaaaaaaatatatcagtcaaatagagagaaaataggatctcaactccccactcccctatttttactcatcctttacgttacaggataaaaaaaaaaataataattttattggaaaaaataggatctataaataggagaagttgagaacagaaaaaggatcgacactttgaaaaaaaaagtctgagaaagagagaaa

SEQ ID NO: 237574 - DNA, 840 bp, Cannabis indica
ttaacaaatcaagagcaataattagatgaaaaataggggcaaacagagtattgaaaattagaaaacgataaatgcaaaaaaagaaaatcaacaccaagatatatactggttcaagtttgatagatctatgtaatctatggctctactttagttctggaacaccactaaatcttctgtattgattgagcaagaacagatacattacaatcgagatagattctctgttgagttctctcaaagtgtttcaactctcacactcttactcaagaatcttcttcatctatagaagattcttcatacaaaatccaaacccaatctctctcttttctcaatacctctcaatctacctctcagtctctttctctctctgactctcaatcttaatctgaattgtgtgttctttgttcttctcaaatgcttaagtgggtggtatttataggcttagaattaagatcctaaagtcggtggttgcaagaatcgaagttgttaagttagttagacaataactaacttaaccaactcttctatgagtgagatctccacgccagcatcagtcttagtgcaactggatacatatataagcttccgagatcacagaccaaaggcacttcctgaagaagcttctggataggatagaaccagctagagccggctatctggaactaccttccaaggagatcaatcttccaggattaataattagctgtccgaaactccttttttggaggagggctaggtatcatgaagactgaacccggagtggacatgatagtcatctgggaactccctttcggactcaactatcattccacaagactccttccgggatggacaagttag

SEQ ID NO: 237575 - DNA, 1795 bp, Cannabis indica
ttacgtagcttttctacctcttcttttaatgcttgtgcccgttatttgtctaataatcttctttttggctaaatgggacgaaaatttagatcaatgtttagggcatgggatattatacaaggatcgatatcgactatgtcctcgtgtgacaaggcaaaaatgtctaggttttctcttagaaattttatcaaagctaattttacttcaagcaacaaacctttgcaaattttgagtttcttggtcggcacttttgggtcgatttctatttcttccaattcttccactggcccaaaatttgtatttggttcccaaagtcggggatccacatcctcgtccccgccttgggcgacttcttattgggcgatgcttttacctttgttcgaactttggctagaggaatttttctttttggccttggtcagggcaaggttatagcattcctgtgcaacttgttaattcccttctaggcactctacaccattctttgttgggaacttgatgcacgaatggaaaattgatgtgacagctttcaagtcatataaggctggtcggcctaacataacattaaaagctgatggaacatcaatcatcagaaattgtgccatcatagttatgctcttcggagcttgtcccacagtgagtggtaggcgaatttgccccaaatgtgcaacactttggccgaagaaaccatacaccggttgggtacagaggatcagatctttgagttggaatctcatcttctcatatggtgtcttgaacaaaatatttgtggaagctccattgtctatcatggtccgtgccactattttatttgctatctgtacttccacgacaaagggatcattgtgcgggaagtgaacatggacaacatcttttttagtggtggttatagtgggttcccctacctgtggcactttcggctttctttcctctatggccaaaactacttccttctattcgtgctgtaaagttcgggcatacctttcccaagctttccccgagtctccatcaatctatgggctaatgacttgtaaatgcccgtctattggtggaggcattagtaggtcttgatcactgtctgcttgggcagcccgttgattctgatcgggcttgacatacttttgcaagtgcgtgtattttcgctgattagaaatctattttccgcttcaagttgttggactcattcgtgttgtggccataatctccatgaaaacgaaaaaacttggatgtgtcgcttttacttacatccttcttcatgggagcatgttttttatatgggacccttgactgggttgccatgtagattgtctctaggtcttcagttaggacaaagaaggtaatgatttggaggcatcttctctaggggtgtgttcagctttgcctgcgaactttcccttcttcccgttgcttggcctgtcattgttattggacctttttccacttggcgttgagctactagtatattgtgggctctgagtaggtgctcctactaaggggaccttgttggaaattattttaccaggatcttagatctactcacaagtatgttgattaacaccctaaatatgaactttctaaacgatgaaataaacacatataaagtttacgaaaccttacattgggtgcagcggaataatatgactccttccgttcaaatatctagcccttgattcctttctgtagcagagcattatcaatatctgaacctggatctctttctctgattctttagtgctgaaactccttcttgctgaaagtctttcttcacgatcttcctcactatggttgaggtatc

SEQ ID NO: 237576 - DNA, 1109 bp, Cannabis indica
aacaattattctccctttatccaaccatggataattattagtgaaacaccaaccttgaaatagactgctatacatcttccccatattcttattttgcaccttagtttctaagagactaaccaacccaaccttctttgaaaaaatcaattgcttgatctcattgtgtttttgttggctgttaatccccctcacattccaacaaagcaatctatccattagaagtagaggaatctcccccctctcctatgctacactcttctcctacaatctctcctgttacatcttctagtgtgccaaaactgttttttatttcagtatctacttccacatgttccagcaacactctctttccttttgttaccttctgaaatccctcttcatctacctgatcttccatcttctcttttggttttttagggatccatatctgtttcacctgctcttccttactctctttcttcctacaagattgagtatcatgtctaattcctgaacagttatagcataccagaggaatccactcatacttcacctccaattcaatttcatgattaaactcatcaataaacgaaatcatttttgggaattcttgagagagactcacctggattaaaatcttggggtattgtagtcgatccctactcttggtaattttgtccacttggagtggttcacccaattgtcccactatcttgaacaaggaagagccccccccaatatttgatatctaatcctttcagctggatccaagttggcttcctttcatccaccgagttccatggtttcatcacattggcttcctgtcaaagaacacaaagccttgctccataattttgtccctcgtttcaaaattctggaatctgataatgaaaatgcccttagctagtaatccaactttcaccactgcatctttccaacttctacgatcaaatccatcaagtatgtttactaaagggttagctcaattaacatagcacacaagagacggttgccagtaattaacctcctcaacaatttcttcaaattcgatcttaaccttcactttcccattcgcagcagtatctgcaaccctcagttgtgtatcaggaaaattcgtctttgatttttcg

SEQ ID NO: 237577 - DNA, 1954 bp, Cannabis indica
atatttagctgtggacctacatctatatagggtttgattaatgaggatataaatgctatttgtggaagaaagttgtggaccatgtgttgtggttatcataaagttgagttttagagtgaataataataatagaggagaaatatatgttattagcttttggatcagtagacttttggccactttgggaatactattttactatatatatagcttaatttgaattctcatctcaagttttagggtttggttgctcaaccatttcattttgaacctttattttttgttacgtacgtgtagtgatgcacttctcaatgatcagatttatcttcattaaatgctccttttggttgttatatatatatactgttataccatacatattgatattattccctgatctagactttcatttctttctaaatataattctaaaactagtcagttcgacaagaataaaatacatatatggacctattaaagtttgggtggtcttattttgctataatatttaatgttgtgaaaaaaaaaagttaaagacttcaccatataataataccaaatcaattattatatatatatatatatataaagcataattaagttaagagtgatgtaggtgattgcgtcataagagttatatcggctttctttgcccccactaactcatcgttcaaattttttaagttttagacacatttctaataaaaaagaagccttaattattgattatactataggaatctgtgtaaatcataacataaattaattataataactgaactatgaagttaataatttagctttgattcaaaagactgatcatgtataaagttcttggatttccagctagttttgagccatatatatatgtggcttaaaacgacaatggatcttgtctcatcttttagatcaatatcatgggtttaatccaatagcaaaaccacccacataggaacaaaattaaagtaaaataaataaatatatatgagagaaaagtctcacaattataaaaatattattaatctttttaatatatacatatataattaaagtatgtgaggatctagtaattggattatttttcttggtatggattgataagtctttcacacataaaaaaggccttcttgtatgccagcaataacagctgcaaaaagagttagctatctagagtggaccatccataataaattttggtttagttccttaattattaatgtaatacaatataatcctatatattaattattgttattttccttattgatactgatttggattcttctttattttgaccataaaatattagtggggccatttattctgatatatttttttgaatgaaaaattttattaaatcaaaaatctgttattggataactcgaaaattagggacaattatgtatttaaatacactctccaactagtaacagaagtagttagtgtttgagctagaacttcaactgttatttctttttcttttgatttaattgcggctacttcaattttttcacttgtaatatatataactgaaagaaatatatgtatatatatgtataaacttatatatgtagattacgagaaaaaaaaaacgaaggaaaaggaaaaaaaaaatcatttttccttcctaatttatatgttttccattatatatatagtactagaatccgtacgtacgtataagaaggggaatcaaaacccataccataattatttatatatatgagcaaaattaagaatccatcaactcataattatgtacatatatgagcaaatacaaggaaaatcagcaaagacttaaatcaataaataattttattacatataaatcactaattttttttgggtatactttctactaatgtggtgtggtgaaagtgaatagtagttgctagatttaatagatatggtggtcatttaattatgattatatatatatactgatttaatttgc

SEQ ID NO: 237578 - DNA, 793 bp, Cannabis indica
aaaaattaagttttttaagtatagaaaatcaaatttcccttggaaaataaacaccacagtgtatacaatctatatatatatatttagagtattgttattagatactagtggtgcttaacacttttgaaacgcgttactttacgattgactagcgatactcctttcgagttattacattaaattatataagacctgatatttagttagaccaatagcgatattaacacgtagaaaaatactagacattactggtgctcttaaactctcatatatttactaactataatactactaatatcttccattaatttttttttaaaaaaaaaaaatataaaaacctttttgtttaattataaaatttaatctaatttgaagacgtctttgacaaaattttaaaatgggaccttttaattaaaaataaaatcaaacaaacgaagaagaaaaaattagctagagcaataaagtattaaactattgcattaaaaaattcactttgtcgaatattgtaaattgtaattataacatagaaaaaaaaaattagcattttttatacatttatgatttacaattgagtcttttcataaatggataaatcaaaaataattcattatataaaaatattgttcatggagtagaatgaacaaaaataaactaaccaattgtttataatattaaaaaaaaaaattctaaatttctttaactaaatgactgatcataagttgtcagcagtaaaacattaaaagagtgaaaaatactaaatttttatcccaaataaatatataacaaagtacac

SEQ ID NO: 237579 - DNA, 857 bp, Cannabis indica
tatttttgtggacactctctcaaataaaatagactaatatataatgctaaagaataatgtcccttttattttagaacaaaaaaaaaattcttcttaaagaaaacataactaataatagtcgaagtcaacacaaattctttacttgtattcactgtttgataatttagaaaaaaatattgttattaagcaccaatgatgtctaacaccactatgaggtgtgttaaccccaaaaatcgacagagtggattttcaagattagtcaacaattagtcttggcagtcgagagatattgtctgtaagagttgggggaggaatgactgaatcaacacgtgtgacctaaggctcgttcatatcagggattaatgcttgcaagtcttggggtatacccacgcaacttggaggtcaaccccgtaacaactcacgagtagagctagtaagatcaatttactaagttacaattatcagaggattctcataatgatgcgttcgaagttagatattgtcataaacataaaatctatagatctctttctcatctttccaacacattttgaatcgttcaattctgacatatatcgagagagttatggacaaaatactaagaccactgaatagggacaattgggtgtgcgagcccataagctattatgcgagcccatgagctgttgtgggagcccattagctattgtgcgatcccatgagacattgtgcaagcccatgagccgttggacaagctagggagcatttgggtgagctgtggagcatttgtatgagccgtggaatctttaccccagtggtggagcatccgtgcgagccacggtaatgagggattcgcatgcgaggctgcaagatggtga

SEQ ID NO: 237580 - DNA, 763 bp, Cannabis indica
gttacaatttttattgtgattagaagtcaatttttttgtagtggctactgacaccaaacttgccatccaatagattctctttaagaaatttatattgtatttattcaattattattagactcgtagaacccggtgtgatttattgtattatatatgtgtattattgatggtaagttttgtcatttcatttttttgtttgttatagacaaaataaataaataaatgcataaataataatatgtgtggtagttaaggttgtaccaaatactttaaaaatagtattgtgaaatgaataatgttatagtttaggattgttctagtgtatttttctctacctaatacatagttaacaatacttatactaataagttatgtaaaattataaattctttagaataaactcgaccctaaccccaactatggcctcgactcagatttggacaccgaactcgaatctaaacccagaccttaaacccgaatcgggacctgaaccctggcctcgaaccccacccgacccgacccggaaccgcggccgggtccattgtccaagtctcagttccggtcatgatatgggttcgagttcgagtctgaggttcagattcgagtctgggttcaagattcggggtccgaggtccgatccaagtcttggtttgggtttcggggcggggtctaggtccgagtagggtccacggtctagggttcaggttggggtcggggtttgggtctgggatcagggtcggggtttgggtctgggatcggggtc

SEQ ID NO: 237581 - DNA, 699 bp, Cannabis indica
acccacaatctataaaaacagtatagtatgtagaaccatatttatgaacttgaaattctcattctagaactttcaaagggtactttggagttctaactaatattctaaatttaaattaaacaaaaatatgggcacttctccaaaatatatattgtttataatttattgaactcggttttagctaataacattacgtctttaacgtctttaaagcgatcaaattgaatgaatattaaataataataataaagtaataagaacacaagaaatttataaagattcaacctagtgataatagtaataacctacccgccttttagttgtattacttaaaaaattattaagatcacaacggtccggccaagtgagtttcttatcagtctcaagaaagcttacaaatattttaataacataataactctttagaaagttcaaaaaatgatcccactccactatagggaaaatacagggtggaatgtctcgtgaatataagtgaagaattcgggaaactaaatattaaatgtcacgattctctcaatgagataaaatcagtaccattaaaatagaaattctaattaagctataattgaggaaatatttaaaggaaatatctttggagatcttcaattactgcatttttttgcatgagaatggaactcaaataggtgtatgtgatttgcttggagaagtgcaaggcat

SEQ ID NO: 237582 - DNA, 962 bp, Cannabis indica
aagagtgttcagatgtgcaacacccctcttcttgaactttttggacaaaagggttcactgattcctgaacgggaattgtacgcatggcacaagctcttgatcgagttacaagtcctgtgtaggaagtaggattagcagttgaagtgacccttgttggtcggtatccctagaggaacatccagttaccatgttctttttggaatgagttagggtttgctttgggaacccttacactgtcactcttagccttctttgggaaggagaaaggcatcctacacccctcatctaatatagggtgttcattgatctcagcagatgccccctgttaaccttggcaattaatagggattacgatcagaggcctaatccgcgtgcctcctactaattcccttgtttcaagagggtttggtgaaggtgaaatttttttccccctcttgccttttgttgccttcctacctctcagagtttgagaagtcggtgttgcctcagtttcctctacggagagaaccatcattgaggcgatagtgggtaagaaaataggaatagaaccaatcaagatacgcttatggccccattccttttggatcattacgggggagccaatcttcgttggcctcccttctatcttgacaactttggtcttcaaacctttccaatgtccgagcttgcctctttttgaagccctttgctgccttgcctctcaaggactgcgcaatcttagggacactcttcacacatttccctcttccagcctttctaactggtataggtgtcttcacattctccactggttcgggtctgcatgaaatgggtgctcgatcaatagaaaatgttgccaagaagaggtcgttggtagtttgtggaagtaagttgtgacttgtggtgccattttttccagaaaactgtaaacattattagcaccataatataaagttaaataatagtcatcatagttggagatg

SEQ ID NO: 237583 - DNA, 826 bp, Cannabis indica
cttcacacaatcaaatacgccaaatccaagctcaactcattctccaaaaccttgtaggtgactccaacattggctcccacttcatcactgcctgcaaatctttaggcctcttggaccttgcccatcttttttacttcacccaaaatcgtagaccccatgtttttatttgcaattctctcatcagggccttttctcattctcataattctcataccccactctttatataccttcatatgctcagaaactcaatccttcctaacaatttcacatacccatttcttcttaaatcattgtctgacttgcgtgagttcaaacaaggtgagtgtgtccatacccacgtcataaaattgggccatcataatgatatttacgtgctgaattctctacttgacgtctatgcttcgtctggccatatttacctgtgtcgaaaactgttcgacgaatttccccaaagagatgttgtatcatggacggttttgattatggggtatcggaatgctaggaagtatgatgaagcattaattgcatttgagcagatgcagtatgctggtgttatccccaatcatgtaaccatggtcaatgccttggctgcttgtgctaattctggggcccttgaaatgggagtttggatacatgactttataaagagaaacaagtgggacatggatgtgattttggggacttccttaatcgacatgtatgggaaatgcggcaggattgaagagggtttggctgttttcagaagtatgaagaaaaagaataccttcacgtggaatgctgttattcaagggctggctcttgctaagagtggagatgaggcttt

SEQ ID NO: 237584 - DNA, 952 bp, Cannabis indica
aagagcttggaaggccgacaccatattccagccacagccatagccacagccacagccacaactagaagaagaggctcagtcactgaaaaatgaaattattctcccaaatgattatagaccggatgatgatgacatgttcagtacacctgagaacacgaatatcaccagcatcggggatactcaggattttggggtacaagtgttagagacagctccagaactagtggagaactggaggaagagaaagcggcctaggtggttcgatgagtacactgaaatgaaaaagaagtctagggctttgaagacacttatgaatgcggacccacttagagtggttgattggaagttgctcaggacttttcatagttggctactcggccagattgggaacaagtacccgagagagtgcttcttcggtagacacgatttggcttggttcgtcaaactacatattctgaagacatggcttggagacgatgtaagtttttaagacttttttactttggttttgaaagactttatctaactctttttatttaatctctgacatatttaattttcatgttttagcaattggatgcggtatttcatttgatgaggagacgacaactcttttattccgaggtgtacccaaattgatgtgtcatcatgccgtgtattttcccatcaggagttattggtcggtgggaagctgcgggtgacgaccacactaacttttagtgggatgagggcatattagatttgattcaaggtgatgaaggtcaatacttggacagtcagaagaataaagagagaatatatatgaccctctactttgatagtgcaaggcattgggtgacactagaggtagatatggatcattggttgttgaacatatttgactcgagcctcggatcgatttccccgaatgaattcaagagtcacttggtaatatgggaaaaattactaccaa

SEQ ID NO: 237585 - DNA, 686 bp, Cannabis indica
gattttaacttaacattactcttgcccaaaccctcttaaacatgtgtaacggctttttgtatcactgatcattaacgagtcattaaaaattgagctaaaaggtctaatgcacattgcatcaccagtgaacacaataaatttacaatttggacattttagtgatataatgactgagatatgatctatgtgaactgtattcagcgttttctatttattggtgggttaaactgctgaatttgatatgaaactaaggatctgaaagagtgtgtttggatgttaaactaacatcatggaaaagtattttggaaatattttgagatggaattgctccttatttgaagctgttaggtggggattaatgttatgttagtattcatttggctaattgtaactgtaaatctaagctagcctcatatatatatatatatatataaatattagcgggtgaaaaaattgttttgtaactgaagaagctgtaaggtgctgtacggtttccttttgtcttcttaactttaaataggaagctaactgtggtaaatgaaaggatatcttgttatagtattttgggttaaattttctcttgtttacttagtttcatctctttgctattttagctggcacattatcatgagaatgaaggctccaaaggaaggaagttgtgatcctatagcacctcttgaactacc

SEQ ID NO: 237586 - DNA, 866 bp, Cannabis indica
agtaatgattgtggagttcaactctttgagcaacttgcctgtatgtaagaatgaagtaactgcttcgaagatgtcattttttgatcaaatcccagttatcttgataaaaggagctattgtaaccatctggccctggggcttttgatgcaggatactgaacacagcttttttgacatcttccatagaataaggagccaacaatatctgggagtgcatatctgttacacaaggtccctgtgtaattatcttggtagccacagatcgtctgtctactactttgcttcccaacaatgtttgataaaacatcaagaaggctttagtgatctcttcaggttcctccagtcttcggcctgtggcatcataaattgacaggatattattacaattccttctttcctggatgcttgagtgaaaaagagctgagttttcatccccttcttttagccatgttattctagatttctgctgcagaaaagagcagtagtcttttcgaattttcacataaatctcccttatttctttttcttgttcctgcaaattaacatcaaacagattttgatgaagaagcccttgaatgtcctctaaatcctgcttagcctttctctcagctgcttgaatatccgagtaatgctctttattgagctccctgaagaagttcttcaacattttcaactttgagaccacttggaacatttttgaaccacttatcttctcttcccatattttcttgacttccgtatggtagctgggatgagaggaccacatacgaaagtatttaaatggcttctttccacacggggcagcagggtatatatttagaacaactggagtatggtcaaaagttccctcattaagaaagagagctt

SEQ ID NO: 237587 - DNA, 1215 bp, Cannabis indica
agattgtaaagggttttatttagggcacaaaacccaacaacagcttcctccaaaaacctgtcttcagctgaagtatccagcctgaactcactattaagttgctacaaaagcgtataggcactcttaactgagtacaaaccagaaagatcaaatgaccaattcaaagaatcatgagttggcgaagacaagacagggatagactgcaccaacaatctgtcatggggcagcagcaaatcctgaaggatctcctcttcccagcccgatccatcaattttcatcaagttgcacacattagcactagtcaagctcggatgagtagagattatcataggattctcgacatccggaagccacggttcgccaagaataggtatgcttttaccatccccaacaacccatctagtcctcttttttaccaatgtttgagcctccagcatactcctccacacataactcagattcaaaccaatagttgcagtaaggaacgatccttgagggaaatatctagccttaaacacctttgacacaagagaatcaggattaataaaaagtcgccattcttgctttcccaaaagagcgagattaaaatatcgaagatttctatatcccataccccccttatctttgtgcccacaaagatgcttccaagacagccaatgtatgcccgagaatttctgattagacaatttccaccaatacttggccatcatactctccatgtctcgaactatctcaagagggagcaagaaaacactcatagcataactcggaagggcttgtgccactgttttaataaggatctccttgcccgcccgagaaaggaattttgaacgccaagattaaagccgtttttgcaacttttctttcaagaaacctaatgccacagttttgtttcgacccatagaacttggaagacccagatacatactctcctctgcagtaataggcatccccaaaagcttttcaagcctcgttttcataaaatctgaagtattggcactaaaaaagattgaagacttttcaaaattaaccttctgacccgatgccaattcaatcttttgtagaacttctttgattcggattgcttcctcataagtagctttacagtacaagtagctgtcgtctgcaaaaaggcatgtgtgaaaatcgaggggccccattagcaactttacacccatgcaaccagccccctattctcatactttcgcagaatgg

SEQ ID NO: 237588 - DNA, 671 bp, Cannabis indica
agaaactagaaatattgaaagagaaacaaagagagaaaagagaaggaggaagaagctgaaagaagaagcgattcattaatggccaatgatacacagcatggtttatatacaccattacaattagacaatgcacaactgaaacagttaggaaattagttagagaataacagctggacaaactaacaaaccaacacaaggtcatgggcaaggtttttggtgagaggagtgactatattcgaggagtcggttacaacatagcaaagaaggggaaaaatcaacatctagctcttcaagccaaattcaaactcaatctcaagtagggtctactctttctcaagatgttggtattatggctgagatgttttagagattgcatgaatgctttccactgggacacaacacttctgatctgtatgacccgcgatttgagagtttcctccaacaatatttaccaacccaacctcagggtagtgcaacatgtccaatgccgcaacaacaaccttttcaacagactcaacaatctcctaatttgcagggaagttcctccaaatctcctcttcttccaaacatcgtttggacgctctcccagtctcctcaatttttctcaattgatatttttggaggatcatagtcccaacagtcgtatgttggtcaatctgagagttcatcac

SEQ ID NO: 237589 - DNA, 580 bp, Cannabis indica
caagagattgaggccgacgggatgcgatccagaccatccagcagctgcgcgaagacacctgcagccctccaatccggtgtcctccgagacttaattccatacaccaagggttggcaatccacggcaaaagtaacattatgccatccaagagtgatacaccgttgcacagcgtggtgaagagctaaagcctcagcttccagaggcgaaaaggcctgaagctgaacagagaaggcttcaacaaactcggcagcagacttggttacaatgataccagccactgatctgagatctttgcacgccgcatcaacaaagaccacaaaatcattctgcaacaattcctgcaattcattatagttagaattgcccgtaggcatcacctgaggaatggtcaacaccgaattaagctcagcaaccaagcacttaatccgattaaatatggtgaagaaggatggttggacatggtcatgataagcttggttcctagctgtccaaagagtaaagcagagagaaactccaaatttcctaaactcctccacctcaatgtttccttgttgcaacaaagggataggctcaagcagcc

SEQ ID NO: 237590 - DNA, 743 bp, Cannabis indica
ttaatatatatacatacatatatatatagtagcccaaagtgggtgggagggtgataattgttttttagaaataaacacaaaatttcaaatcaatgcatgagggcgcgcacacacaaatatatagtatgttatagttatttaagatattgtagttatgactaaatattattcctttaaaaaagatgtattaatgcaccttttacttgtttcagcattcaaaagaattttttatttttttttttttattaatatgttatagctatttaagatatcctacaaaattttccgaaattcgtaataatttacaatatagaaaataatattcaaacagtctattttacacgcgtataaaataaaatagtcacgcgttcaacacactgtttgaacgcaattttcggcgtgttaaacttttccaaattttttaaaattttgtagtatgtcttaaataactataatttacatgactatgaaaaaaaaattgattaaaatattatttccgatactaaaataaataaagatatatcgatgcatcccttttaagtaggtgtaatataaattttttcaatattatatatatatatatttatatatatacatatgagagagaagaaggtcatgtaggattaaagtgatctcagcttaatgttaggatatatatgcttcaaattgttcaataagtacttttttcatcttaccaataatacatttttcatattgaaagtaaatcgaaaaaagtaagtata

SEQ ID NO: 237591 - DNA, 1233 bp, Cannabis indica
ggtcgcactagggaggagggaccacaaaggaagaccctgagtgacggaaccctcaaaactgggctcaactgcgagttaggtaaataaagtcgaatctcattcttcttccactaatagttgctctccaagtgtttatacgaggtcagcctctgtcgaaacacgatgaggaggaagataccatgttcatagaggtgatcttcgtgatcatctcaacgaaattttcatggcacgatcccagaccccaagaaacaatgataacaacgagccccgtgatccccaagtgagcgatcaaggcacgcagagcataaacaacccgactaatgcaccatctgtgactacggaggtgatgatcccagccaacattagggacggttgctgccataccaatgggaacacatgccaaatccagtttttacccaggagggatagacccaagaaatcctcctgcgagcattgagaatgatcgagcagcagagaaagcccatttgcaaactccatgggacatcaccttttactgaagaagtgcgacaagctcgactcccaaagggcttcaggctatctgaatcgcttaaatacaagggtactaataacatcattggttagttagatgaatttaacataattatggaagtagactaggtaccacaactagaaaagtgtcatatactcgcggcaactctggaggagaacgttcatgattggttcagccaattgcccgaggcttcaatatcaacttgggagacattcgtggatttgttcttgatgcatttccaagccacgatgatgtacaaaccgccgtacacaacattggcaaacattaaataggaagtcagtgagtctttacatgattattttaaacgttttaacgctaaaataaccaaactcaagaaggcccccgagtcttcgttggtttgcatgttgattacaggggttttgccaagaatcgacttctggaaggaactacaagcttagtggcattagtcattggtagaattctttgcaatggccaaaccacataaaagaattgagaattctttggctgagttagagagagggaaggaaaagtgcgagtcacctgtgccacaatcgcgttcttgaaagaagaaattctagaggatgaagccctagaagacgcaatccacagaggtgacaaagtcccaaactcgctaagtctctctccaagaaggagacatctccgaagagaaatttggctgtcacttcagaggaggacac

SEQ ID NO: 237592 - DNA, 751 bp, Cannabis indica
aaaaaagaaaaaaaaaaatcaatcatacatgcattaccatgtctttaaacttcttcttcatctatcataagaccattttattaaatatttttatgatgaattcttttctttaaaaaagactaacagggttgctaatttttgacaattaatattttaattacctttaatccaatttaagctcaattaaatagaaattgtattaataaaatttgactaaaattgtgtcttatgatattttttaccattttaataaacaaatggtcatttttatagtttcttaaaacaaagggtcaaattaaaatttagctaatttttttgtattatcccaaaaaaaatgaacacttttttatttagtaaattttatagttagtgtttcattcttaaatcactctaatattatgtttatagtgttaccgtacctaattattatttgaaaattactgaaaatttgtacaaactattattctttttatttatttatttttcttatattttattatattttaataatttataattattagttaattatgtttaaaacctttcgtacgattttttaatttcaaatttgaattctaatttgtattttcttattattattctattttttttctcatttattattattaactaagtttaagatttgcccatatcaaccttggagagatgcacctcttgttccttaaagaaagtgtggagagtgacacaagccacagatgaaggcaacttgataaaatcaacatacttccca

SEQ ID NO: 237593 - DNA, 1553 bp, Cannabis indica
ctaatatatacctttggtttatagataccagcttcggctctagtagtcattgggtgaacattggtagaggctgtaggattggatgtaacaggagaaggctgagaacaaggtgaggaaagggatggagaatcagacagagaaggggaagtaggggagatatcaggagcaggaggatgaaaaacagtgggattaacagggacaggaacagaggtgttggaggaggttatgagagtggagacagagggaggagacaatttagcataggggaattggtactcattaaagatgacatctcgagaaataaagattctaccagaggcagattgacacttgtagcctttatgctttaggctataaccaagaaatgtgcattcctcggatcgaaaggcaagtttgtgtctattatatggtcgagtgttagggtaacatgagcaaccaaaaacccttaactgagaatagtcaggttcgatattgaacagtttgtggagaggagtgtctcctttgaggacaaaagagggaactcgatttatgagaaaagctgaggcacgaacagcttcatcccaaaaagacaaagggagagaggcatgagcaagtaaagttagagcagtctcaatgagatgcctatgctttctctctgccacaccattttgttcatgggtggtgggacaagaaagtctgtgatgaatgccatgctcagtaagatatggtgaaaaagcttgaaactctcctccccagtccgattgtagcattttaatgggcaaattgaattctttttccacaagatttttgaagttaataaatgtctgaatggcatcagacttgttctttaaaagataaacccatgtaaacctggaaaaagcatcagtaaaatgtacataataatgataaccatttgaggaaatcattggggagggcccccataagtcagagtgtattagttgtaggggtttagtatattcagtagtagatctattgaagggaagcttatgtattttgcctaaacaacatgatgagcagaaatcaaaggcatttttattgctattggagatattacatttgtgcatgatttgttgaacaattttaatggcaggatgcccaagacaagaatgccacaaatgaaataaggaattattaacagtgttgttacattgcacgttattacaggaaattgttgacagagattgaaaagcagcatgagaaggttgttgtaactttgatgtaggctgaagagggggaaacacatataggccagcttcaagagtagcctccagcagtacctggtgtgtctcccgatccttgacaaggcaaaaatcagggtgaaactcaaaaaatacgttattatcagaagcaaattttgagacactgattagatttttggttattttgggcacatgcaaaagattattaagagttagaatcttggatttatcaatagacaaaaaaagtttcttaccaatgttctcaatgtttaacccagtaccattgcccatgtatatctgatcttgcccattgaaatcatttttctgagagagattactgtcatttgaagtgca

SEQ ID NO: 237594 - DNA, 956 bp, Cannabis indica
agacaccaaattctcttattaaataaattgtatacatttgaaagagaagcttatcaatataattcttatcgagaccaacttcttgaattgaatctcaaagaactgtaaaagcgtaacatagttcttgagctgcctttatttacataagagatagattacaaaagggagctgataaaaccaacttaattcaacactaacgaactctattaaaacagagtacaagtagcaaaataaattgaaagaactaacagcaaatcaacttaaactagtaactaattaaactgaaagtagctacagttttttatttattacctcccctcaagcgaaaggggacacacttttagcttggcctttagatacaaaaatcgatctattgtgagagattttgttagtatataagcggtttgattgaaggaaggaacatatcgaacctccacttctttcgctagaatctgatcttacacaaagtgaagatgaatttttatatgcttcgatcaagcgtggaaaaatggatttgctgctagagaggttggcccttggttgtcaacccgaataattggaggagctggaagactgatctgaagctcttttaaaacagaggaaagccacttgacttctgatgtcatgtttgctaaagtagaaaattcactttctgtgcttgaacgagcaacaacttgttgcttcttcgctgaccatgagattagattccctcctaaaaacactgcataatcccctgtcgatcttctatatcatttggacaacttgcccaatcaacatcagagtatgcttgtaaacaaaatttgggggcaggtctaatgaatgatccctctcatgaatggtacctttaatatatctgaacatacgtttgcaagcatcccagtgaatatttgttggagcatgaataaattgatcgagtttattcactataaatgacacatctggccgagtcaatgtga

SEQ ID NO: 237595 - DNA, 797 bp, Cannabis indica
gtcgaagttcttgtcttggtttttgtccagggcaggtttcgggtctgggtgtgggttcgactttaaattctcgggtccaggtctggtcctggttcagtttcttgtcttagatttagttctgggtctgggttccaggtcttaagttcgggtcccgagtcttggttttagtctaggtcccggtctgggtccaggtctaggtctctatcccaatcttggtccaggttcgtgttcggctccttgtcagggtttggatccttgtctgggttgcaggtctcaggacccggtgagggtttaggaccaaatcaggtctaggtcctagtctgggtcccggtctaggtcctagtccgggtcccaatctaggttcaggtcctaggtctcaagtcccagtcccagtcaaggtctcggtccaggttctggtctgagtttgggttatggtttggtttcagttctggtctggtctaaggtccgcgtcctagtcacagttcaagtccgagttttgttctgggtctgggtcttggtccagattggggacggggtctcggtctgatttcgagtccgggtacgagtttttcatatctggatatgggtctagttcatagataaggtctaggttcatgtcctgggtctgggacccaggttcaggtatgcgtctgcgtctgggtcttggtccaggtgtcgtgtttggatcttggtctgggtctaggtcggtattcgggtctggatctgggttcgtgtccacgtctaggtttgaattcctatttaggtcaggggcttggtctggatttaggattgagtcc

SEQ ID NO: 237596 - DNA, 1351 bp, Cannabis indica
aaaaaaaaattaaatgtgtagttatgaaggattgaaccttgagctcttaagagttttaaaatactttaccattaaactaagcactaaaactataatttttataatagtaaaactatatatatataggggtcccaaaatttgatttcgccttaggccccatataccttaagatcggccctgatacataaaactaatttacattttaattttacagtttggaatgaagggcacatacgatgtggagatgatgttgctaccactccaacatcaatggttattgaaattgacacgatacttgtactagttagctttcgacttttaattttaggcaatacttattttgtgtacggtttttattagtaaggacttagcatattttgtaatgtatactttaactttgttataatataattagaatgtcttttgtacttaattttgttatataattaaaataatttttaattcaaagaaaatgtttatttttataattagtttacaattgtttcaaaaaaaaataataatatataattaatcattaaataaaaaaaatatatatttaaaaaatttaaaaaaataaccaaagatgttcagcatatataaaaaccgaagagaaaagtaactcttttatcttcagtttttatatgataaccgaagacgtattttgaaacacatgtcatcgcctcaaatgacttcggtagcgaattttaataaaaactgaagataaactagcctaaaaactgaagacaaatgccctttttctagttgtgctaatacattaaatatttttcttcataattaggttattatttagtatttctgtagtagatcaaagcaaatttatactgaaaattggttgatctgaataaattggtgtaaattgaaaaaattatgatacatctaaggtcatttactgattattatcataatagttatttatgcgttatttactgattattatcatagaatagttatttatgcgttgttctcatgtattaaaatagttgcttaacaatattgaaaaatcgatacactagtttcaggtatggaacttctgcaaattttggtacagagcaacggtcattgggatgacaacaagcactatgttgattacaaatcaagtagagaattaatatgaagagattgcaattttgttgaattgtgcaaataatgatggaggagctacaatgcaaccctaaaacaacttaaatacaattgaaatatcaattgaaggaagattgctaaccactccaacttaaggatgacaaaagtctagtgttttacataaagttattaaccaaggaaaagtacaactgaatatgtcttatttctttaggctagtgaaaactcaatt

SEQ ID NO: 237597 - DNA, 695 bp, Cannabis indica
tgtgagtgcttacttcctcccgaagtaaggctttgaaatgtcttctcccgaaaacccttctcttgctcaatagagttattcaacttattataagaacaatataagtacaataaacaaagactaaaacctatctaaacactttaagttttcacaaaagaaactctctccctacgaagatgaaaatatgaaaatatgagacttgaagagataagaacgttggatgctctctagatcctatatagaaaccctagagacagccacaacacgttgttacagttgtacaaaactttcctaaaataagtcttgctttgcaacgacaaaatcgcactttgtagtgataaattgggacactttccaaataagtatgttaactgtggatttagccaaccgacacggagtctaactaggatcagatttttcttatgactgtcacgtgttgaatgataacaaatatagagacgcgaattatagaagtttgatccctttgttcaagtaatccttttttagttgtatgcactcttaaaataatctcctatgaaactcttcaaatttaatagatgaactattttcatcaacttaacattgactaccaacatcatcaatctgcacagattttcctcccaatgtcatctagattcttatccacaaagaatccatccaaatataggctcaacaattcctccgtagttggcaac

SEQ ID NO: 237598 - DNA, 678 bp, Cannabis indica
cccggacaattcgctacatacgcgtccatttttttctccacgcgtttgatattctcccgacacttggtttaccaccaactgtgaatcactgaagagttctactctcgtggcacctacggcttttgctaatctcagtcctgcaatcagggcttcgtatttagcctcattattggaagccgtgaatttgaaacgtagggcagcctagagtcggagtctgttcggagatatcattactaccccagctccagatccgttttcgttggagggtccgtccacgaatactttccatgctggggtttgtggcgttggtacgttttcgctagcttctgcttcattgcactctgttatgaagtctgccagcgcttgtctctttataaaagtgtgcagtatgtagtgtatatcgaactggcttaattccatagcccacttgaggagtctcccggacgcctccggcttctggaggacttgccgaagttgatggttagtcaacaccttgatagggtgagcctgaaagtagggtcttaactttcttgaagccgttaggaggcaaaaaactagtttttcaatcactgaatatcgtatctccgcccctatcatgcgtttgctgaaatagtacatggggtgttgagtcttttccttttcccggactagggctacgctgaccgcgttctcggagac

SEQ ID NO: 237599 - DNA, 1004 bp, Cannabis indica
gctacttgtatttaaatatcaggtctcaataaaatttaataaaataatttttaaagaatatatcgactaaccaatcacaaaatgttatctaataaaaaaatttagacaccactaattaatactcaataacaatattctataataaaataatcttataaattatagaagccgaatattgtatacaaactttttaagtttgacacttgtataaataccattgataccaataatataagagctttaatttacatttaagtgggtctaacaagttaaaaaccactcaacaacaactatatatattatgtggagttgaagagttgaggatatacacgtttaacattcgtttatttctttaatatatataaatatatacactgttgaaacaatgaaaaatatccactgaaaaaataggaaaaggacaaagaagtggaatttgtacatgtaatgcatcaacgcttcactaggcaaaatctccaactgatcaatgtgaagtgaccaattatacattagcgaaagtatatttttgcatgcattgcatattattgaggcacattttgggtattttgcactaataatgagcaagcaaatgaatagagatcgtttcttcaccacaagatgtgcactatagtacacatatggaccacagcccaacttaacttccttttattgtggatccatctcatccataatcttcttcgagtggcaaaacttttcaataatttatttcgatattaatgtcttgttgttgttggtcccatttgatatatcttaaacaagagaagtaatttttcagtagttttttttttattattttactttaccgtgttaaataaaaacaagagaaaataataattttcagagtagtgtctatcctcaaataacaaatattgaagctttcactataaattttttttacttttagtcacaagaaaacttgtgactaaaagtaataaaattatggctaattacaaatcattattttttatgttgtgattaaaatgtcc

SEQ ID NO: 237600 - DNA, 677 bp, Cannabis indica
gcacagtacgtttaaaatcacgtcaacacgcctatgcttgttagggtgtcacattagggatagtaacggttggagagaatggaatccaagttgtccccgtaaccaagatgaaagctcttggaggacttctgacgggagtgatggtcattcatcacaggctccctttgatttggagcaaaggtttgcagaaattgaagttatgattcaacaacatgatgaggagattcagaggttgaaacaacaaaggtctcctgtagtacctttacctcatttgccaatcattctcgattcggtattaccagcggagcatagtatggctggtaactaagtggaaccattgcatgagagaatttggatgcatgaacctccaatccttcagggagattcaaatatgaagaatactctttagactggaagcactaaataatttattctaggagctcaagaggttatgacgggaggtcaggataccacttgccttatttctatttatggcagaggtggtagaggctccgtggttgagcagaagaggaaatcgaagaggaaacctatgtcgagagtggtgggtttaaaacgaaacaaaattagaaagtatgcttcctgtgtggcatggttgggaactttaagaaaacttgccctcaagcaaagaaagataagcagaagctggaagcaaagcc

SEQ ID NO: 237601 - DNA, 1049 bp, Cannabis indica
atccataggcggtggatcctacattgccaacccaagaaacgcaagggttcctccagctgttaatcctgaacagccggcaaacgtgggtcacggtgtaacgacttgtatagatgaaatggcgcctggtgtgcaagagactgggaataacagttcagcacccaaccagggcatttataacacagtcgttcggcctgttaccaacactcaaccattggagatgatactcagttacaaaacctccgtgctgctcttgggcttgtgcaggatcatgccaatgccctacatcatgatcaggaagatctccgcgctgcggtaaacctcacgttcgaggaacgaaggcgtatgtttactgagtggagagataaagatatggaagcgttaagggctcatcatacaaaaattgaaaatcgtagtcggcaagctactatgctgatacgaaaagcctacaaaactgtaagtcagcaacctccaagtgtcatccccctgggtgagacgaacgaagatccaacgatgaatacttcccagactgcaaatggtcagcccccaaatccccggtcatgagttgcacttgtgggcctagcggtaagcgggcggaccttgtctagtaattcatcgggagaggtcatacctgatagttctaaccaggttaatggtgctattctgcctgtgaagcaagaaaatcaatcacaaagacaaccaggcgcttctgtatttgaaagattggggacgactcatgacctaaggagtgatctgaatagaaggagacgagtagacgttcagattgtcacgatgatcgtgcagcccagagcccgtgcttaaattcccgctcagaaggatacttgtgtggttcaaatcgaccaggatgccgagcaggttagcccagccgtacaggcacagctagacaaactgaacaatatgttccaatgcatggctggacagagaaataatgatctcgagctggaccaagcaagcggaactcctttctctcccgaaatcaatcttctggcgttgccccacaagtttaaaatgccaacatggaaaatgtacac

SEQ ID NO: 237602 - DNA, 509 bp, Cannabis indica
cttctcaaacataggtatttctctaacagttcttttcttgatgccaacattggtcactcaccatccttgacttggcaaagcatctattggggtaaggagttgttagttaaagggttgagatataaggttgggaatggtactcatattgactgcaagcatgatccatggatttcgggttttaatgagttcaaaccagtcagcttttcagggtcaaactcattgccagtttcaagcttcatcaccgaggaaagagtttggaatgtaccaatgttgaatagatatttccaacctatagattcagatcgcattttaactataccactgagtttttttactgatagagatcggttgatatggcattacacttccaatggctcatatactgtgcaatctggttttcacttagcaaattccttggaagaacaactttgctctttaacttcaaataaccaaagagatttgtaaagcccgcttagttaatttggaaattagcagttatttatgttaat

SEQ ID NO: 237603 - DNA, 1049 bp, Cannabis indica
aatttataattttttatttgtcacgacgatcaagaattagtaatagtcaagttaataaaagtaactccttgtggcaccatactttaccatgacaatcaataaaagtcaagaacaatcgtttaaacacgttggattatatttttctaaataagtattcactcatggccaattaattaaatattatagtatttcgagtcactataaaataaagattaatcataataaatgatgataatgaggtcaaagatccaaatataatcaagaatatcgtgtacaaataaatattttaaaatactctctcatcatcactcaaaacaaaggtgtcactaaagaatatcgtgtataaaaaagttcttaaatccaacaatctcaatagttcatggagtattttcaatgacattgttttccatttcatgtagtttccattttgatattgaatttgtttccatttcacaaactataatttctatttcgtgattaaattgtttctatttttcgaaattaaatgctagctgtttctatttcacaaactatactttccattccgaagttaattggattctatattttgagattaaaggctagttgtttctatttcacaaactatagtttccatttcgaaattaaatgctagttgtttccattttacataaataaggttaaatactagttgtttctatttcagaaactatagtttctattttgaggttatattgtttctatttttcgaggttaaattatttccaattttaatgttagttgtttccattttttatgatatatatatatattttctatttaacatatatgaagttaaatgctagttgtttttatttcataaattatactttttatttcaaggttaaattatttttattttagaggttaaattgtttctattttcgaagttaaattctttccaatttcaatgtgagttatttttattttttatgatatttgttttaatttcaaatatacgaggttaaatactagttttttccattacgatgttaaattgtttctattttttattatatttatttttattt

SEQ ID NO: 237604 - DNA, 1554 bp, Cannabis indica
taatgtaaccattccattggaaccttctccatatatatatatatagattagtggtgattaaaaattataatatttaacacaaaaatctaatatattgttgtgaaataatataatttaaaataattaatatgttaaatctattattgtaattatttaatttgctagaatatttagaattcacatttttgaaatgataatctcatttaccaaacatgaaaaatataaaagattaccattctcagaaaataattattcttaaatattaacagttgtgtaattaaaattaaatgtaatttggagtaattaatatttaattttggcgtatttaaaaaatattatcaccattttttaaataaataaggaattttttcatttttacacttcaaaacaattttttttttttgtatttttacgaaattctatatagaaacactacaaaaaaagtttacttttagtcacaacaaaatttgtgactaaaagtaaaaatgttgtgactaattataaattatcatttctatatatgttatgactaaaaggtccgtggctaaaagtattagtcacaaaaagtacaatttgttgtgactaaatgtatttttaatcacaatacttattgtgattaaaactaaattagtgacaacttgtacctaaatattatgttttagtcacaagtaagtttttgttgtgactaaaagtcacatttagtcgcaaaaactttatgttgtgactaaaaagttgtcactaaagtagcagttttttgtagtgaaacccctattgcaattaacgctgcaacataaattgtaacaaaaaatcgtatagaaacccctattaattccaactagcgttgcaaccactttagaaatccaaaccctaaatttaaaaaaaaaaattaaaaaaaaatagtatatgatgtaattccctaataaataattattacacaattttttttcgataattagttaactttaccgaacatagaaatattttcaaacacattttgtaatacgacctaataaaaataggtggtgtataattgaaatagaaataaaataaaagtagggtatcatgaccataatagttactttgaatatatatatttagtagagattaattatatatgtcactatttcctatttaagattatgcatactagtcaatttcatctttgaattatagtatcctcttattatagtagagtaaaataatagttttttatatcttataaaaaaagaataagaaatattaattttgttatttttttgtttcgtaagtgtgtagtttttttttttaaaaaaaaaaaaagcacgtgaagttttgtgttttgctatataataaaaatatataaaaaaaaataacatattttacatcaaatatcaaaattttatgtctacgtataatactttaatggattaatattattttagaatttatattttataaaaattaataatttgatcatttattttgtaattaatataaagtagactctctatttttataataatacgaaatagtactttgagttcaattttcgataattatattttttaatataat

SEQ ID NO: 237605 - DNA, 1118 bp, Cannabis indica
agatgtggctctcacaaaaatcattatccatttgatgaatctagatggcaatttataggcatgaagaagctacctccagaaaatcctaaatttaccctatcatatgctttgctgatgtcaactttgatggcacatctaggagacacgttcttcctgttgtaattctctaagatgtcttggagaatcatgatattgtgagcaatcgatctccccagaacaaaagctccttgattctgattaacaagaatgggtagcacctgagcaagcctaaacacaataatttagaaatgcatttgtagaccgtagagcaacaagcaatagacctataatccactactttagtaggttctcgatcttaggaatgagagtaatcattgttgcatgaagctcctttggcatgacaccattgttgaaaaaattttcaatagctttgatgaattcagttcccaaatccgcccacatcttcttgaaaaaacaagctccatacccatcaggtcccgacgcttttgagttaggtatactaaagaaagctttccttatctcctttgcagtgaatggtttaatcatgttcagctgtcgttcgacattcagccgattgccttgctcaatacaatctttccgtagcctctgagaagttaggctgctagtccccatgaatccctgaaagtggttcataaaatgtttcaccacttaaggaaacttctcaatgatatctccatgatcattggcataagaaactatactgttctccatccttcttttttcaaaaaggcatggaaaaaagcattattctcatctcctttacaaagccagttcacttttctccgttgtttcaagaagctatgatacatgtgtccttgatcatgaaaataagttgttgcctctttctcgcttaattaaagattgagattgtgcctatgcatttgagcttccattcttgcttccaagtattgagttttagccgcctggtagcctttccctatgtctcctattgactgcttgttgattttctttaatttgtgctttaatctcattaacttcagatataatgctctcatcccctctgccctaactggtttcgcccagtcattaagtacaacattcttgaaatcatgatg

SEQ ID NO: 237606 - DNA, 997 bp, Cannabis indica
tcaaattatcttcacatcccaatttagaataacttgtcaaaaatataattatatattacagttgcatagattaaaattactgacaaatatattttatatagagtttatgatattgtcaccttatatataaatatatatttcttggtctctaattacctcaatgtatgattttcttcttgctttcttatgttcttgaagaaaatatagagcttaatcatcttttgcacgtacacctcaatcgtttctctcttttgacagagaagaaaatatcattgatggagaagaaataaacaaaaaaaaagatcaataaaaaatcaagacgagaacttcctgtcttttttaagattattactttttttaaaaaaagagtctaattgaataatattcaaaaacaagccaaataaattggtaaaatgcctatttatatactatgctaaacatgattatctaagatcttaagaatcgtccttaaaaatgcaatctaaaaaaaagtaaactttcaattactaaaaatagagtgtggctataatgcatcaaagagttcttgcaattagttagcgtaatcaattgaaggtaacacatttagaaggtattagacactactactactcaataacaatactctaattacaccaatagcgatatcacatacctcttagtgtactagacactattagtatcttttagtatttctcttaaaaataacattaacattggtttctcatattattataaaaaaaaacaataatattaatgagaagcaagcaattacaaaggaatgtcatcacctggaaaacctaagcttccttgcttctaatcctaggagccaattgaatatccctaagcatgatgttaaaccctctttacgcgtggatcatgcaaagattggtgtcttcaaagagacccaccagtaagcgtctatggctcttgaagtgcagatgtaatgcccaactagctaagccatgttacggtatttttcttaaaataatgtactaca

SEQ ID NO: 237607 - DNA, 1446 bp, Cannabis indica
gtactttcagttagaagtgttagtattatattattatctaataaattaatatattttttttatatgtatatataatattttgtatctagtaacttattacttcattattatatttatatatatatatattattttattttttcattaatcaatctataacataacttttttttatatatttattaaatgtattttcgttttgaaaaaatttattgtataaattttcaatatttgacattatatttatgataatatttaatcacttttcaaccgaaaacaaaagtaacgttaagtcaaattaaaagttaaaatttgtgctttcaaaaaaaataaagttaaaatttgtaacagaaaaccaataattaattttaattttctgcataagtttttttggaaagttatagcaataataaattgcaattttgactgataatagggtcctttgaaaactgaaaacaagaaaatataattttatttattaggatatttaagaaaaaaacataaatatatatagtacagtgattagtttatcactatctatagttagtatacatataatttttgtaacattagttcatataatttttgaaaggataaatactattttggatcttgtattttgcaaaagttactaaatgaactctctattttgttaaattacaaaatataccctgtattttacaaaattgtaaaaataaaaccatgagtttaatttttgacaacttttttttaatataaccaacttgaatataatttcgaacggatatagaaataataaatagttttgtcatagcacctatagatcgtattattattaaattttattttgacaaaaaatcagttcatggtcctatttgtatcattttagaaaatacaaggtccattttgtcatttaacaaaacagaaggtccaattaataacttttacaaaacacaaggtccaaaatattatctaccttcttaaaaaaacaaatttgctagaaaaatggttttataaagtatttcaattttattttacagttcctcatacaaggattttttattttttataatttttttttagaatttataaaaagagtaatttgcaacataaatatttatgtttaacttttttttttttgttgataaatacagcttagcttgtgatgcattacttcaacttccatttacaacctaccaacactttttaaggtctgcaaatacaactatttaacaagaaaaaattgtttacaacttttcaaaccaatttataatgtttaacttccagttacagataaatatttaagtttaatttttgtacggccgttaataatatttaagttatatttccgaaacattcgtaggtacataactgttaaatgtaaggcaatagtcacgtgacaataatcgaaaaatcaatttcaatacaccaataagaaagtgacatatagataatgagttaacactt

SEQ ID NO: 237608 - DNA, 732 bp, Cannabis indica
gcaaaaggagccaaggtggcccaagaagcgattgaaccagtccgtaagcggatccctattcaggtcccacggattccggaagtactccgcattgaggacgttttgctgctcctcccgtaggaccctcttcaaggcctctacttctgcatgctccagggtgtattcatcaagggcatagttgtgcttggctatccagagattctgcctcccctcgtccccaggaattggagtcaccacaatgccaagaggcactgggtattcctccgcctcggaggggatcccagagtcatgactcggggccggaatgtccaccctccgggggcgcttagaaggctcctcttctacgatctctcccttgcgcttgcgcacaagagtcctcaagaagtacatcctcctcgtccactaagacaatagggcccggaggggcgatggaagaagccttcccgggagtgaccaaatgggaagaagtaggaggacgggaaacatcaggactgtcggctccagcaggagtggccaagaactcatccataggaacggccactgcaacaagagaaaaaggttaagtgttagaatatctgtgaacgtactgtacgcttaacaaaaagcaatcaagctagccctgttgggttttatgccctaaataaaactccaattaattgtaatccattttattcaacatcaataaagaaacagaagtatttttcattcatttgtgtatgttttggttcatct

SEQ ID NO: 237609 - DNA, 1437 bp, Cannabis indica
ataatcgttttagaagttcataattagggtgttaatcaacatacttgtgagtagatctaagatcctgtaaaataatttccaacagaggataccgttttagatctattgccattggtgaattcagttgctatccaccagaaagacctattcgcgaggagtgtggtgaagcaagtactagtatctcagctgtgatagacgcttggagcctcgagcacaatagggctagagcagttctccccctatgagagtactgtaaagaattctgtaattcttgcaagtttgaaggttttataattcattttaggatgggagtgtcccactcccctggaaatattttatttttattcagttaaggcagttcctacgaggaagcgttgtgtaggggcttctattacctcgggacccacacaaatgatcgtaggaccatagtgggattataaaacaagacaaattttaaagaggatttcttctagacaactggtcttttcccaatcaacacaactgcacttcacataatacgtaagtaaactttgtctcaaaaacttggttttaagttatttcatatttgtagcctcaaacttgctgacttattttatttatcatgttgacagagttattgaaaaggccaattcctactccccagctggccgagcgacgtaaaattctactaggtcatccgttcagactgcgatcggttgagcttcttcttaacaaagccaacctaaaaactgttggccttcttacctcagatgagtacacttgtgattacaaattttcaaagtattcttcgtgggagaaggtctcagttccagccaacgaagagagccaggattatgtggcttgcgtacactatctcgagaaaatagcccctcgggaagctgaagaaggtgcatcccaaggtaatcaatgcggatggtcacccactatgcttagggtagagcgtacctcattagtctcctttcaagatagtagatataacttttatactttgaaccatttcctaatagatcgcaacacataagtttgatagctggtacccaaggttttgtgtccaacttagttgcactagttcatactatgggattgccgagcagtatgggaccaacttggatagggcgacccaccaagattcatattcagatttagatccaattaatccttacgacatattcatgatcacaggatctcggaaatttagtgaatactataatccttcttcttcatcatctgatgattatggtaaccttctttaagagggaattaatttcccatttttctttttatgtatttttgattaagtgatgatgtatctctttatctcgtagatatggatcaagaaaatcttttcaacacttcaagaaggaaaaaaagaggattgcttcctcagaaacatcatccgagaacatagagcccctcaagagatccaaaaaaaccact

SEQ ID NO: 237610 - DNA, 765 bp, Cannabis indica
caatagcgatatgacactgaggagggtgctaagaactactggtgcctaacatttctcttaaaataaatgctgaaaggatgcctagcactactatgttacctagtactatcatggagtatcatgtcatacaatttattatcgggtcctacctattttattttaataatgattagcaatgctcttatagaaaaccgctaaacattcacaattctgaaaaagccacctaatagcaatgttcttatgattattattatgatgatgatgataattctcaatttggagttgacaaatgaatctaaaatcaatcaaattaaaacaaaaacaaaaaggaaatcaatataacctgctctaactccagtattcccagctttaataagacctttcttcttgattataaagctagacccgataaaaatgcttgatgaaacagccaaaacaagtccatgaatgttatcagatgacatccccataggattgattacacaccaaaaacaattatatatataaatatattatataaactcttgcagggccaagatatacggatattccaaattcaaattcctgcaatatataaaatccgatccaaacaaaccccgttaacaaaaaatgaaaaatcacatatacatatttatatatacaatacaaacacacatttatatatatatatattatatataaaaacatacgttaatcttggcgcactgcaacaatgggtgatgggtttagaaacccaactccataaccatatgtagagaaaaaaaa

SEQ ID NO: 237611 - DNA, 703 bp, Cannabis indica
taatttctaaattaaactaagcggtctttacaaggagattgtgtaagaactacttcctagggaggatttatggttctaggctgtccaagaataatgttttctgctttttattcctttttcaagatagatgacgggtctctgcacccaattggataattaagtgattatttgagactaagccttcaacttgttctttacatagtcacatttaaatcatcagaattaacaaataattaaagatttacttatgattatatgtctcttagtagaaattagggcttatttccaaaaatacgccttaagaaaatattttttaattacgaaaatatatttaaattctagatgcattatatatgttgtatatgaaattttatgattttcatgttttgtgcccggtattagtgcaatacgatgatttggccaatagagttacctatgtatgattgaatatcttggggttaatagggcaatatatctagacattgataatgtcgggattatcgagggttataattttggaccatcttacccctaaagcctagaaatgacttaagcttgaagaagggcaatttttgaaatttgcccaataggtgaattttgtcctttatggacttagatggaaattaattagttaatgtttttactgaataatttttagttaaggtatatattaattaggtataaggtagaatagtcaatagca

SEQ ID NO: 237612 - DNA, 1508 bp, Cannabis indica
ttgtgtaaaattatactaattttcgacttgtttctgatctaaatagtaaggttcacaatatgaattgaaaatgagatgaatatgataaatttatcatagaatttggagttctaagatttaataaggtgaaacattttaaattttgaatgttcaacacgcttcgtttgtgatcgaaaattaagtctgaagctgcaagttaatttttaactatgattcgttcactttgagaaaaaaattattatgaataaaagtttagatctttctttcagcttttcaaaatatcttgaatcgtcgaatttcgagcaatattgaaagagttatgaccaaaacattattagtcatcgcatcaagaagcttgctgcccaaaaataaccttcaaaggtcacgccatggagggtcaatgttgcggcccgctatggtctgaaggcgaaattaagacttttaaacactaatttcaatatttaaatgggacatttgacattttttgagaacaaaactttgagagatgaaaaatagaggcagaggcgaatttggagactttcaatattattatttttacgagttttttgattatttgacaaattattgtagctttaatatgatttagttctttcccatatcatatgtgcacctatttcattcatatttaatttcatttaattgcttgattactaactaattgtttataatttcaatgtaaaatttgagaagtagtattgattagactatagtaaatagatatagattttgatattagacaagagtacatgtatggtatgcgtaacatttaaaattttcatgtttaatgtcttctatatatttaaatttatcatgaaaacgtaaaaagtttgcatatagattgagattatatgtcctaacccgaatataaatttctttagtaagtcgactatcacatgaaaattagaatttaaaattatattatattaaactatagaaagtagattcaaattaaattaatcaccctaagctttttgatcattgttagttgtattttaataatttattttcttttcattagaatttaaaccttctttgttattattattgtcaccaaataggatttagtaatttaattgttttgtaattaactacagtctttatgagaacggtactttacttattagtatattacttgatttgactatatttcataacacattatgagcatgataaattaaagtaaattaggcaaaagactcgaccaccaaacacgagatccatctaaagagagtgtcaaattatctaaagaatgtgtaagagcattattaactcgcttacagtgataaataattaagattttttaccccctaaaactttgacatgtactaaatcatgtcccctgaacttttaaggtcgttaaaaatgcttcctgaactattgagattgttgaatttaaggacttttatcaaatttagttaaaaaaagtctaacatggatgaaaagttcaggggtacatgatttagtacatgtcaaagttcgatgggcat

SEQ ID NO: 237613 - DNA, 901 bp, Cannabis indica
atgatgagtcctatatgggattttctcctgctggaaacaacaacactgatggaaataagccaaaccagaatgttgtagccttcattgccacaccagagatgttggaagatggtgcttggtatgctgacagtggggccaacaaccacatcacctctgatgtgaacaacctgaaccagaaaacaaaatacagtggtaaggattctcttactattggtaatggaaatcagctgcctattaaacatgttggatctagtactctctccactgaaaataacagtgttttattgctgcaagaaatattacatgtccctgaaatcactaaaaatcttgttagtatttcaaggctaacaaataataataatgttattgttgaattctcatctgatcattgttgtgtgaaggataaactaacaaagaggaaggtgcttcaagggactcttaaggatggactttatcagtttgaactaatttatgtcaagtctactactcaaaacacccacagtgctcttgtctgctcctctgctgaaaccaaacatagttgtctctctagtttttcttcccatgtcaatcaaaatgtaactcagtcaagaactgggagtgtgtcttttctaattcaatcaaagatagatggcataggagactaggccatccataaaaccttgtgttaaggcttgtattgaaacatttgaatcttaaaaatattaacaaagaggattgtcacttttgtgaagcatgtcaatatggaaaatctcacacattgccattcaagcaaaatcttgaaaaaagctcaatttccctacaatttaattcacactgacatttggggtcctgctacaattatgtccaacaccaatttcaggttttacatctcattttgcagatgattatagtaggcatacct

SEQ ID NO: 237614 - DNA, 803 bp, Cannabis indica
aaactctccagggcaaggattattctaccataatctaccatgctgcaacactagatcccctccaacttcatgcctttgttgatgcagattggggggcttatccagattcgaggatatcaatatcagggtacgtactgtgtttttctggggcactttcttttgtcatgaaaatctaagaaacaacaaactatttccacgtcctctactgaagtcgtgtacatatcaataacacatgctacccgtgaactcacttggctcacatccatactcaaagattttgatgtttctattaaacttccttccattttatattgtgacagtaatgttgtcattcacttgctaaaaatctagtatatcacgaaagaataaaatatgttgaaatcgattctcatacaattcgagagaagatcacaaatggaacacttcaaatgaaccatgtcccttctcagaataacttaactgatgtgctaaccaaaccacttttttttaactaacattatattcaagatgtgtgttaagaatttttacacaccaccttgaaggggcctattagagttagtttacttagttattatgatatattttagaatttgggataattaagatgaatgtggttctatctcaaaattaatttggctatgggaaaagtagctcattcattttatattttctattatcttttcacacattaataatgtgagactctctaacattatacggtgaattattttttattgttatatattatccatgttatatttctttttaattaaggtacaaatatatataattaatataaattt

SEQ ID NO: 237615 - DNA, 1717 bp, Cannabis indica
tgagctttagattcaatctcaaatttccttttcttgtcatctatctcattcatagcctcaatatccaaagcctctggaattccctgatgaacaagaaacgctttcattttaatcctccacaaactgaattcatttgtgcctgtgaatttgtccacctcgaatatggttgaagccataatgcatcaatattgatttcttgcacagagttcttgaaactaatccctgatctccctagtgctctgataccatttgttgtgcactcaagcaccaacaagaacacaatgcaagaataaaatggcttagaatgataaaccaaaaaatgtatcaaaccaaataaataaaagacaacaagaaataacgaggttcagtcacaagttttggataaaacttggacctaatcccagggtagaaacaactcgataggctgtgattactttattgattaatgacaaagattacaacttacatcaatggagaatcaagtgcacaaaacagatttaatggtgattcacacgagttacaaaatgagcttcaaaactgtcgaattctttgaaccagaaatagtcttgcaataccctcaatcttgaagagaattcatctctgttcagctctcatgtttcactcttgtgcaatctcttactaactcgatttctctctttctctctcttactctgttgttgaatgcctttatatatagcgcagtaggttaatgtccatttaactgaaataactgccaactgtcaagacagtttagttggttgattaagtgttctaaacctcacactcttatattaaaagagcactgttattgggcaccagtggtacccaacaccttctacaggtggcgctccatgattggttagcgatattcactaaaagttatttttttaagttatatgaggcccaatacttaattacaccaataacagtatgagaccgagaaaaatgttaggtactagtggtaccttttagcaattctctatattgatttttttttattaataattatttttataatgtatatataataaatgttgtttttgaataaaaataaagttaaccagaatagtccaccattacaatattacgtaattcaggaattaactgatgatcatgaaaagtacgacctggggaaaaagaagagctgcgtgccaaacaatagtcggctttgttcacagatcgttcaacaaactgaataacaacatgactcaaagaagataaaataatccgacaatcattcactaacaaaccaaactcatatggcatatgcaacttactctgaatagcctaaacacagaccaagctatctgttttcaataaaacatttggccaattatgtcactgaatacaacttaaagcttcctttatactgatgatttctacaatatctctggtctaacaattccccttttgcttttagtgaaagcctgaagaacttgacctgtgtgattacgggccaaacaacccatctcaaaacagctgacatcattaaacaaagctccgtcaatattgaccttgatctgatcagcgactggtgtaatccaatgcacacgtgaaagctgtcccaccgaactgttagacaacgaagccgtcgtccgtgattgtgcaaaaagaaattggttaaggagtgatcttgttgacaaaacaactaatgcaacagtaggagatttttgttgtcaaacaacctcgttacaggccttccaaataccccaagcga

SEQ ID NO: 237616 - DNA, 1546 bp, Cannabis indica
gtgccgagaaagtcgccggagtttgttgtccatcccgaaaaagtcatcataattggcattgttgcggaaaaaatcaccgaaaaaatcactaagaaactggtttcttggtgatttttccaataactttttcagcgagaatgccaattccgacgacttttccagagttttctgtcggtaccgaaaatgtcaccgaagtagctgctggtgttagaaaattcgtcggagttgctgttggcgccagaaaattcatcaaaattggcattgtcgtcagaataatcactgaaaaaatcaccaagaaattggtttcttcatcaagaaaccaatttcttggtaattttttcggcgactatgccaattccaacgactttttcaaacttttttgttagtgtcgaaaagtcgcggagtagttgtcaatgtcggaaaagtcgccggaaaaatcaccaagaaagtggtttcttcatcaagaaactattttcttagtgatttttctggttatttttttggcgacattgccaattccaacgactttttcggcgtcggcagcaactccaacaatttttcggcatcggcagctactccggtgatttttccgatgtcggcagcaaactccggtgacttttttggcatcagtgacaaataaaactgtctaaacaaataaaaatattaaatataggatttgaaaacctaatttacatatatatggcatatcaaataacataaaaatacctaaaaacgaaaaaataccatataaattggtcaaacttaaaattgccatattcaagtaaataacttttaaaatctcatagtgaatgtgatttcctcttatagattgtttgaacactactttcgataatttatattgttaacgtagattttcgttaaccaaaattagagcttaacagtcataattttacacagaaaaataaaagcaataaaataaaaaagtatgaactcaagatatttttacgtgattttgcagttaaaattctgcatagtccacgagtcaatcttattagatttctgatagattttttcagggcctcttttcttatgattttttcgtggcacttttttgatctcacttgcctctatttataatcacatagtagccggttaattacagagttgactgatgtttttacaacgattatcccctaaaatcatgggatctgattacatatcgcattaagtaaatgcaattattatttgaatttcacacaactgtgaatatctcactttaactgggtcaaaatgaatgtgttaaatatgttgtaaaccatatcgtaatggaatgtctcgttgggaatagagtagagttaatctttatagcgagctggagtttgtcgtatttcttactaaggttgataatgcaaatcccgtcgcctttactctgaatctgacaaccacagtttatgatggcgagatgatttttttttcacgtgcatgtcttcctatggcaaggtggacaccttgctatcacttgctttgcctcacccgtctattatcttagtttgctaagtgttttcattgtcattatatctcctcc

SEQ ID NO: 237617 - DNA, 972 bp, Cannabis indica
aaaattaagctcagagtcctatttttactattttagaaaatacagggtctattttgtcatttaacaaaatacagggtccaatttgtaacttttgcaaaacacagagtccaaaatggtatttaccctataataaatagggacagaatgtggaaaaggggatgaaaaatccttagagaaaaaaatacatacggtgattgtaaagaatgttctgtatcaacaaaatctgaataagaaggactcgtagactatgcagagttaactgtaaaatcacgtaaaaatttggtgttttttctgtttctattattttttttagatcagttataatttctgtgccaatctattacgaaaataggctcataatcgttaacgaaaatctgcgttcaaattaccgtctcatatctcttctatatatatataaattttatggaagacttttataaatgaattgaattttatttataaaataaaaaaaaaacaaaacaaaaagaataataaaaaaacaggtgataaaaatatgaaattaatttaattaattaatgtatttttaattgaaaataaaattttaataaatacttataaatcttgatataattaataattaattttttgaaaattgtctaatttaatgtttacctaagacatgttcaaacttcacttaaggtcttgttaaaagttgtagacgacctgcttatatttttttgggtagtagtttttaacctagcactatatacattgaggaatcatttgatattattattataaattcaagccgcaaaaataacaaattattggaaaatatttatttactttcgtatataacgaccgacccgtgaattttattttagtatatattgatcacatgcataaagctaatgccgaaagcgatataaggatatataatcaagctaaaattaattgaaataataagaaaagacaaacaagaaaaaagacccctaattttatttttttatt

SEQ ID NO: 237618 - DNA, 677 bp, Cannabis indica
atccatttggttgctttccagtgttctacaccaggttatcccatgaatttgctcaccctactcactgcataactaagatctggccttgtacagatcataaggtacaataaactgcctacaatgctagtatagggtacctttttcatgtagttgatatcttcttcattggatggggcctgagtagaagataacttgaaaaaatgagtagaaggtgtgcaaacaggtttcacatcattgaaaccaaatttagatagaattttagagatgtagccactttgagaaagctttaagcttctcaattttctgttccttgtaatctcaatccctaaaattctcttaactgagccaagatctttcatttcgaattccttgctcaagagtttcttgactttgtttatttcttccatatgttttccagcagctaacatatcgtctagaaatagaagaagataaatggtgcagcttgagtgtctaacatacacacaactatcataggcacttctcttgaaaccaattcttagtacatattcatcgaatcttttgtaccattgcctaggggactgctttaggccatatagggatttttttaataaacaaacatgatcctcctttccctcttcttcaaaaccttttggctatctcatgtagatctcttcttctaaatctccatgaagaaa

SEQ ID NO: 237619 - DNA, 863 bp, Cannabis indica
ggcacaaaacccaacattctcaactcaatgttgtccttgctgtggctcggttcctatcgaaatgtctagaatgcgctgatctccatcataaagtagtgattttggagttctttctttctatttggacttcattttgtaaatcgttttggccgcaatcatttggtactgatgcaattgcttcgttctttgccgagtttttgggatatgtaggcacatggcagaattttcactagattttgcaactgatatagctgagttgacaggcgaggttttagttttagctatcgttaatggagggggaggcgatttgggtattttttatggctttttgattgtcctgtttcaaactttccaccgatttcagctttcgacactgagaaattgatttcatcacaaagttcaccttttagttcgagctaaatttcagatcaaatgagttggaatttcgtgttcaatgagaaaaagactgtggagagtttagaaaagcaagagatttctttcaaattgattactcaatttttaggtaaagtctctattgatgataatacagcatataggcagcgaagaagttcaaggtgggttacctactgctcatatctaatttacatgcgatataatttttattttctatttctttaattttatctaataagagcaatgttattgtgtgtttgaatctagtgttggattttgtgctcttaatatctacaacaaaaaatggatttaatagcttatttggtaagacatttaaagttattcatgtcttccttgatgtgtgttgggttttgtgccctaactaaaaaccatttcaatataatcagatttactaattaataaagatcagaaatcattttatgttgcat

SEQ ID NO: 237620 - DNA, 2617 bp, Cannabis indica
attttctttacattaaaatgttatttgtatatataatttttttaattgtgttataaatatgtgtggattggattggatcggttacttttatatgtcaatcaacatccaatccgcacaagtgcggattttgaattttctaatccaatctaattcgtacaagtgtaaatatccgcactttgtgaattaaattgaattggatcgtgcggactgaattgaatcgcttattttatgaacagccatagttggtttagtgtccaaaaaatggcctcccaacttggtggttacacacacacttacactcttcaccactatctaattcccctattgggtcggggatcatagaagttttaattgacggtacaattattgtatccacaatgtcaaatacaaaagatttatgtatttgttataaaaaattacaataaatttcatagttagctagatttcattttgacggtttctattttgcccttcaatatgttgttcggtaaaattgacatcaagtatatacctaattaaatcaagtgtcttgtcactgacaaggtttgagagtttgtgtttttttgtattgagcgttttttggtgatcatggaggctagcagttcaagagttcatgagttagaagatgtgtgtgcaaatctgactttggaagaagaagaacagggaggtttcgaggtgggagaggatgtagaaacggattgtagctttgacggacggtggtgtcttgtgggaaaattcctatccagtagagtcatggatctggaattcgttcagaatcaattggcatctctgtggaagccaggtatgggaatgtatgttaaacaacttgagagcaatcttttcttatttcaattttaccatgaggtggatattcaaagggtgatcgaagggagtccgtggacatgtaatcggcaacaactaatctttgaaagattgaaggaaggggataatccaagagccaaaaagcttaataggctggacatttgggtacaggttcatgacattgttccaggccttatgtctgatgttgttctcaaagctattgggaattatgttggaagttttgtggagacagacccaaagaatttcattggggtgtggcgtgactacttacgagttcgtgtgtctattgatattgatattcctcttaagcggaaatggcgtattagaaagaaggatagcgactgggtctgggttcgttttaaatatgaacgggtaccacatttttgcttcatctgtggtataattggtcatacagatcggttctgttcaaagttgtttattactccattggctcaaattgaaaaaccttatggtgagtggttgaaagctgctccgaagaagatgaatttaccagacggatcgaagtggttgaggaaaccggagtggtctgcgcctacaggtccgacgacttcagcgacgtcaagaagacctcaacgttcgacttcaatttttccaaatctggaaaattcgggtagagaaaatcatggaggaaatcagggattggctttaaaagagaataatcatcagagtaatagaggagacaaatcagtggtcattgatatgaatattaatgatgatgaggtggcgggaagaaggggggaattagaattaaataatgctgatagtggggtgggatatgggggtcatttaccaatatctcaaggagttaccatatttgattctaaacgaagaagggtgggcttagtggagaatgggccgaatattagtaaggatgaggttatgttggaccaagttagtggttttgttgatggaaatgtagatgggcttttgaataattataatgggtctgggaaggattttaattatgggattggtggtggtgataaagtaaggggcgcagatgatttttttcataaccatattgggcctggcaaggagagtgaatatgggagcattggtgttgaaaatgcaggagtgaatttgattccaaatgaagatagtgaagatgtgtgtggtgtctcaaaaaacttgtctcaggcgggccttaccaagggggtccgccaatcattatgagttgtctaagttggaattgtcatgggcttgggaacccattgactcttcaattccttaaagagatgatttctcaaaagaagcccaagtttgtttttcttagtgaaaccttgtgtagcaaggagcggattgatcgtgttcgaactagtatcaattttgatggttcgtttgttgtggagggacaaggaagaggagggggtttagcgtttttttggaaggataatgatgaagctgaagtggtgggtttttctaccaatcatattgatgtcattgttcgcatatcgggtatggtggaatggagattaacttgtatttatggagaacctagaagaaaccttcgtgctaatacttggaatttattgaggagtttgaaggaggagtctcaactgccgtggtgtctagtgggggattttaacaatgttatctctcaaatggacaagcgtggtggtcgaccttatccgaactggttgatagacgggttttgcaaggtgattcaagagtgtgatttagttgatttggagcttgtgggataccagtttacttgggagcgaggcagaggcacgaataattgggttgaggtgcg

SEQ ID NO: 237621 - DNA, 907 bp, Cannabis indica
taaaataatttccaacagtggaaacaaccaatcttctggaaatgaatctagcactccttgatatcgccaaagtattacaatagtcaatgataggagtctttgtaaattccatttcatgcgattctccattagcatattgcattctgagatacctagacgtttcaaagtaaagggcaataataatcccatttctgaaaatgactccaaccttgaacaactatatatgctccacttttcaagggagggatatgtaatgtcaataccattactatttgatggaaatatagtcaccaattcatcacaatctcgaatgatgatatcttccaaagatggaaaagtacagataggtaatgccgcatttatgttcctacaatgctctaaaaagatttccttcaaacaagggaaaatctcaatctgtattgggaaataatgaccaatccaatgtagttattcccacaagctttaatcttgataagagtggaaatggattattattccaagaaattccactaaattcaaaacgcatatcaagacaagaaatacgaagatatctcagtgaacttagtagtcgaaatgataaaaatgacaagcaacaattttcacattctagatcaatttcttccaaataagagtaggatggatgtgttacccaactgtctggtaactttgtgccattatagtcgcgtatctttagtttcttcaagttttcatgtggttggagcgcgttaagtacttctctttcctttattgaatcatctgcttttccatcccatcttaaagtaagctcactcaaattatttttcttctttaactcgccttcccaaacatcactcacttcctcgacatattgaaggcctaaaatcttaaagcttccatgcaaattcgactccaacttacccaactcttt

SEQ ID NO: 237622 - DNA, 1230 bp, Cannabis indica
agtagtatgatgcttgttgaaaagaatagagtttcgtgtattccaaatttgccaaatgaaagtgataaagacttggaaatcctgtttaggcaaaacttgaaaagcctgtaacagaaactccttgatgtcacttctataataagacaagtaaaactgtttaaaagttgaagacttccaaatagactttgctcttgtgcaaccaataagggcatgagagactgattccttgtcgtacccacagattgagcaaagtgggtcagggagactccttttatgaaaaagattgagagaacatggcaatatatggtggaaagctctccaaataaaatgtttaatcttgggaggaacagggagagaccagagggttttccaccaatgaaagtatgggttaggattggaagaggaaggaacttgagcagaatgaagagtgcaggcaagatggtaagcagatttgactgttaaaatacctgaggagtgaaagccccaaataagcgaatctgaagatagaggatcaatgggggttgtgaggatacgatcaacttggtaaggagggaagtaatgtttaagcttacgggtgttccaagttgagtcatcattaatgaagaaagagacaaaagcttgggattgatggagagagtgcaagagaatagggtgcttagtgttgggaatccaattaggtgcagataagggaatactagttccagtgccaatcttccaaaccaaccccttttgaagtaaatggcgaccccaaagaatacttctccaggtgaaagaagagttgtgaccagaaggggcaaaatcagaatttttgaaatatcgggctttaagaacagaatggagaagggaattcctatcattccaagtacgccaagcctgcttagctaaaagagcttggttatgagaagaaagaatacggaagcccaggcccccaaaaaattttgaaacagaaatagaatcccagttcttccagtgaattttgttagtaccttgagatccccaccaaaatttagcaatcaaactttgaatttttgaacaaatcgatttgggaactttgaaactggacatagcaaaagagggaattgcttggaccaccgctttaataagagtctctttaccagccctagagaaaaatttttcgttccatgatttaagcttggaagaaactttttgaagcaagtagtgaaacatggaattggaaaccctggccacacaatggggagcaccgaggta

SEQ ID NO: 237623 - DNA, 1206 bp, Cannabis indica
ttagacttaattgaagagctttgagaatactcacaagcccagctcaagatgtagaagggcaagattgccaggcactttaattctaaagttaaaagtcgtacatttaatattggagattttgtctcgagaacagccatcccaacttcacaagaacaaggagtgggggtcttaggatttaattgggaagggccatattagatacataataaagtaggaaatggaaaatttcaactcaagagaatggatggattagaaatccctcgttcttggaatgcagaccatttgcgttgttattaccaataggctgagggtatccgggtctaacattcctctacagttgtatgtagttctttgtaaatttcctttcttaatgtaaacccttaggtatgatgaaacgaaaagtagaagaagtttgcataagaatttatatgttatctcttgcacaagttatgttttaaacaagtgaccaagaactttatttaataaaaataaaataaaaaatcctaagttggaaaattttatggttggaaaaccctaaaatatctattaaaaaaaatttgacaactttttaaatttcatgttataagtattttaatatcaaaataagatcatttcaaattttaataataaaataagtaatacttgatcttataattaaaattaataaaacaaacaaaaataataaaaaatttcaaaattaataataaggctagttagtggaaaaatcaaattttcaaatccaaatgctactaatatctaaaactaattttaattaattaaaatgttaataaatattaatttattctaataattagatttttatttgaaaatttggattctactcaaaattctaccaaaatttgaatttttttatttgaaaaataatttttgaaacttcaaaatatcactagctaaagcaagtttggcatagggagtgtgcatttatgcaatgcatactccctctgcgcacgcctgggagcaaatggggtgaaatgcgcacatgtggaacaggtttgagatattttcattcaaagctcaaaaaatcataactaattcaataaaaatcaaaattaagttttgtaaaagcctaaatttagaaaaatactttcaaaacgaaactaaaaataattatcatcgtaaaatcataatctccatacaatcattaaatatgcacataaataaccatgaacacacccaaatcaacac

SEQ ID NO: 237624 - DNA, 1512 bp, Cannabis indica
ctaaaataaaaagataatatttattttaattcaaattcaaaaataaatattatataactaaataacagaaattaattatatctttttattttatactatctttttaatgttaaatacattatcttataatatatttaatttaataattaaaagataagtatccattttaatttgatttattttataataaaataataaaaaaaatcatatggatttttacatgtcaccctacacatatgggacaaggcctacacatgtaggccatatttaaagtccaaaattaatttcttaattttgccacaagtgataattgattaattttcattatattttcttaataagattaagataaatatccctttacacaaaaataatatttttttttctctttcatattatttaagaataatattctatttaacactaatcaatatagttttataaaaaaaaaaaaactaaataattatatcatttcaattattcaattcataattgatataattattcaaaataataattttcacaaaattactattttcctttacaaaaataatttctcatagaaattaattctttctcaaatttattcatcaaattaaatattttcatgtaaaatgttggataaaggtgatctggggaccatggacctttatttcgaagttctaataaacacttgatttttattgaactcttcaatagaatattctagtttataaattatattattactctactatacatatggatctagactctttgacaatatagaattatatttacagaattcttacttgtagtacattgatataatcaatataagtagttcaccctccaattattagttcataattagagttagttaaaattactgttttacccttctaattatctcatgaattctttatgtaccattaatacaatgtgaacaattaatctataatttggatcctttgttaacactctcagaattaatactataagagaacttatattcaatcatctcaaaaagcttgaattctattattgtataatatgttcctagccactcatgttattaagctctcaaaaaagaagttttaagaatcatcttctctgaaaaactttaacgagtaaatcaaagaactcaatgaacacaaataagagttcatgtataattaggattcaaactgatctacaaatgatcatcgttgtgatatgaaaaactctttcatgataaacgcaatgttgatgaaagatattatttcatgtcggtccactcatgtataatcaaattatactcagtacctttactacatatctatccacatatgtgattcgaatcaaaatcacacgcactagagtatagttcataacaaactgtacttggtaattttacattaaagatttcgtactttaatacactgccgacatgttttattcatattgtatgatcttaattctcatgtacaaccttacaagatcataccatctttatatgaatataaattttttagatatttattaattatattt

SEQ ID NO: 237625 - DNA, 1029 bp, Cannabis indica
aatgtcatgagttcaatactttacaagtaatattttgttttcttttctttacttatatttaatttatgattttaattaatttaatagttttaaaattttatcatattatattaattaattttatttttcaagattataatgttcaatatatttaaaattttagatataaaattaattatttacatcaattagattattcataaaatcatgcatgaactagtaaataatatacaatttttttttatgactgggcttcacaagagcaccaaacaaaagagcaacgaggaaaaacaaaccgagaaacaaacagccaaaaccagcaaaagtctaaaccaaccccggctggggcaacaacaggcaaagctaaaagaacaactaactaacaaacaaactagaactaaaggaacactacaacgaactgaaataaacgaacagagaaagaactaaaacagccatctactccactattgagaagggaactgtcaaaattggacaggtcaatactcccaaactggtttgtatcgagtgcccatttggctacagagtgagccacaccattgatgcttctaggaatccaagaagcttcccatagaccaagccgattagcattgttatggaaccttttaatcaagtcctgcacattatgatgcagagtggtaggctgaccctgcaactgcttacaaagaaccgacttcactgcatccgccgagtcatcaggaaaatgacattgcggattccttgagtaagagcgtcttcagcaccccacaccatagtagccacttcaactggaagagattcagagtaagtaaactgtttagtggctatgtgaaagattttaccttcctcatttttaaagacagcagctcccatagacatcatgtctctaattgcaatatcagtattgcagattgtccagccaggaggaggttgctgaatattaggatttatcgtactctccggggagcgaagtgttgaaattattttaccaggatctagatttactaacaagtatgttggattaacaaccta

SEQ ID NO: 237626 - DNA, 756 bp, Cannabis indica
gcaagggaggggtacagtatgcattggttgcagtggattatttcacaaagtggacagaagctgagcctctagcaacaatcacttctaaaaaagtattggaatttcttatgaagaacataatatgtcagtttagactcctgcacaaaattgtttcagacaatggcaaacaatttgacagccagatgtttacagatttttgtaggacaccctcaatcatcaagagtttctccgcagtggcacaccctcaatcaaatggtcaggtcgaagcaatcaataagacactcaaagacactatgaaaaaaatgacttgaagaagctaaagggaattggccggaggaactaccagaagtattgtggtcataccaacaacaaaaaaacagcaattggacaaacactgtttgctatggcatatggttatgaagctatgttgcccgtagaattagaacctccatcccatagaagattgacctacgatcaagaagctaatcatgctctcctagcagaattacttgatgaaattgaagaaaaatgagcctcagcaaacctaagttagcagcacacaaaaaaggtggcttgatagttcaataagcatgtgagggcgagaaaattctttgtgggagatatggtcctcaaaagagtattcttgaagacaaaagacagcacagctagtgtgctcggacctcattgggaaggaccatatcaggtggtcgaagttacagaattaggggcataaaagcttgggcagtatgacaaaaa

SEQ ID NO: 237627 - DNA, 1529 bp, Cannabis indica
ttaggcatattacacatgtaatcctatttttcactagccatttagtttcttgaaccagcaccttcggatcagtgctctccttgcaccagaaaaacttatttcttgcctgtcagaccttataaaccagagcagcaatgcaagctatataacagctccttttaaacttgctctggttttctctattgatccacctgagtgtaccctgcagtgagttagatttggccctccagcccaactagtctttcaattgctgcaaacatggctgagcaaattaacaattaaaaaatagatgttgaacattctctactgcattattacacagcagacagacaatatcatcaatgatatgaaactgcagaaatctatctcatgttctcatcttgttctgcactgcaatccatagcacaaagatgtgctttggaatattaagcctgctccagacttgtttactgacatgaaaatctatatgttcctgattaagcagcttatataaggaagcaattttaaaatctgaagctgtaaactaatcaggtggcatgatcagcttcacaacttcctttgtgctcacaattcttctccaataccagctagtgtggctaggggccttatacccccaccaatcttcatgattaatatacacactatgcacccacttcacccatatattatccttctttatagcaattgcccaaacatgttttgctacaacaacttgcttccactttgcaatttcctgaaaaccaattcctccagccttttttttttttacttgcataaactctcccaagcaatgttactaggcccattcatgttgcttctccatgtccatagaaagcttctgcatatactctctatttcctttattattttctttggaaggataagggtttggctccaataaacatgtattgtcaatagaactgagttaattagtacatttctaccagtaaaagataaattccttgagctccacactttaatttttgatgtcatcttctcatttaggagtgaacattcagttgatgatattcttttggcacaaatagggactccgagatatttgaatgtgatactactcctttagaatccagaagcatccataatccttcttatttcatcttctctcatcccactgcagtaaattgcagtcttttatttattagggtaaagatttgaagtcattgaaaataacttaaggccttttagcatcaaatagatgctcttgaagtcacccctgcaaaaaagaagaatatcgtctgtaaaactcaagtggttaatctttaatccccctacacctttatgtaaatgaatttcttcttatcacctatttcttcatattctgctgagatactccattcccaacacaaagagaagaggtgacattgggtctccctgtcaaagaccctcttagcttaaaaaaatacatgtaatgatccattgaaaatacaaagagaatttaggtagtggtgagtgcagatcataacgagtttgtatgaaagatgctggaaaagttgaaaaagacatataac

SEQ ID NO: 237628 - DNA, 1264 bp, Cannabis indica
ctatgaggatacttttagtcaattttccatgctcaaatctatcagaagtcttctcaccatagtagccgctttcgattatgagatttggaaaatggatgttacgacagattttcttaactgaattcttgacgagacaatctatatggagtaactagaaggttataaacttttaggaaaagaagagaaagtttggaggctaaatgggtgcatttatggacttaagcaggcttctcactcttcgaacaaaaagtttgatgaaataatcaaaacctacaactttcaccaaaatgaagatgaaccttgtgtttaccaactcaaggataattaagtggtaaaattcttgatcctttatgctgatgacattttagtcattgcaaacaatgtcaagaagatgattgaaataaaggaatttgtaaacacccaattcaaaatgaaaaacttgggtgaagctaattatgttctcagaatccaaattattagaaactggaagaatagattacttgctctctcgcaagcagcttacatttataaggtgctagagcgtttctaaataagcaatgccaaaagggcaattatgtcttccaaacatggcttgcgactatctaaggaacagtgtcccactgatccccaagagtagaagatatgagaaaatttccttatgcttcagtagttagtctaatgtatgctatgttatgcactagaccagacatttgctatgcagtgagaattgtgagcaattatcagtcaaacccaggaaaggaatattggacatcagttaagcatattctaaaatacttaaaatggacaagggattatgttttagtctacaagggtggtgctttaaatcccataggctatgccgaaccaaatttccaggtttgtcttgatgacaactgtaacgccctaagatttaggcacgctacccaatatgattaagaaaccctaatcccctaaactggattactaataaaataagcgcggaaattaaactttaaacaaaaatggaatgaaaataaacctgtaataatattaaccttacaaacaaaagttagatgtttcgggatcccaaaaatcattttacaaaatattacaagtcttttctccttagctgacctaagcggcaaaacagagttacaaaagtttcaacactggtagaccccaacccgcttggtctagtgtggcccaacatgtacatacatcgcccaactcccatactcatggctgatcagagacagatttaccctttcctgcacagtagagcacc

SEQ ID NO: 237629 - DNA, 1526 bp, Cannabis indica
tatataagattatgcatgtgtatgtgtggtaaaaagtaatttgatagaaggtttttccataagcttttgagaaaatacaaaatattctacgtgacgtttgagagagaaagaggttgtaatagaattgttaaacttttctaaggaaaagaaataaaaaatcacaacacatataaactcaaaataatgctaattaaaatattcagagaatgattgtacacttttgaaattaaaacaggaagaatatcttacttcttagtatcacaatatttcctttttcttttttaaatgaaatgaaatacaattataatattacaagaacaagaagaagaataataaatgatgataaatctgaattttttttaaagaaaaagaaaaattagttaattaattaaatacacctgttttgtattttgaggggttgagaagtggctgttcttccttgtttaaccaaagaagctctagcagcagagataagcccattagggcccaaacaagaatcaaaagcattacaatcaatccaatccttcaacagatcctcttgcccccaaatatcagggatccaaaccctaccccccatctcaattcgatgcctcttaagcctctctcttccattatcatccttctcctccgacgaagataattctgatctcaacctactcacctccttctcctcctcttgttttcccctctcttcacaacatactaaacctgttttcttcttctctttcaaattattactcgacgaagaagaagacgaagatgaagaagaagaagaagaagacctttgctcctccgctactacgcttttttcctctttctttggactttgactccgttcgaagcttcgatcttcgccgttgattagctcatgatcagactgaaggtggtgatggtgagccattttgatgaatggtgcttcagtttttctttcatgcaaagagagagaaaatatttgatggtttttccttttttttctattcttaattgtatttattttattttattttcgtatatatatataggcagccccatataaaaaaataaataaataaatagattttagaatgtggggtgtgaaaatgggtggggaattagatgacacgtcactcatgttcagaattcaaagagaaaacactttttttttcattttttgtatggtaaatgacaaaggtacgtgtcttcatgtttgagattaattattaggattccaatttctgtgggtgtgtagttctaatacgattggcctccttgcttccttctaactcattcaagggctcttttgcaaatatcaaaagttaagaatatttcacaatttataccataacattgttattgttattgggcatttatgatttatactttctttctagataagttgagaaatatatatatgaacatttgtgtgaataatttgtctaatatactctcatttttttatttaaatttagcacataatatacatcaaacattatctataaaagtggtatatattaaagaatataaaaataaatataaaaattaaaaca

SEQ ID NO: 237630 - DNA, 2085 bp, Cannabis indica
ttttattttatttttttataaacagaaaaatttatgaaaagcatgtaaacccaaaatactgattattaggaatttggaaagaaaaagatgcagttgattaaaatattatataaaaagaaatatgtatatattggcttgtatatacacatggaccaatttaaggattttcatgcaaaactttgtgtatgaaacttttctcttaagtcattttcacaactcagatttatatatatagcactcccacatgtgagtgtctcttatggacacacacaataataataatattaattattgttattattattattattatgtattgtcttttgcacttgggttctttagtatttttttttaacattaaaatttctaaaaaaaaaaaaaaaataggtagggaaaaaagagtattgaatataggttaattagatccattgtattttttctaaatatatacattttaggattaatttatctaaaagagtattttaaactcactagataaaccacttaagtatatttttgataactttgtaaaaggaaaattaatggatataaaatatatacaaaacgagattatattttttttcttcgattaactaaacaggtggcgaaattcacagatatttatttatttaaagcattataaattcactaatataacaaaaaaaatacaaatacgcattataaattataaaatattaatagaaaaataactaatatattaaccgagtctccatcaagcctcatcgcggcggtgtcatccttgttcccgctccatttatcattcagggataaaaataatctttacccctactccgctctctatttacatgaccctacatgtctaaccatgctattaaaaaatctattttttctaatcgatataaagttgaaaatactcttgtaaagataaggatatcaagctctaggtatatgaaaatgaaataatttttttggggtagtttgtttagaaaaacacttttcatatatgtgttttcatgatcaaatgaacatcattggcattggcccaagagacagccatggacaatgtaaagactcttacaattaataatacacatatgatatattatatagatataactttgataaaatgatgatatgggtttgtggttgtagatcaatatccatagagatccacaactaagatgagaatatcacaatgtgaccataacatctttcttcattcacattatttgatcatgaaaaaaaaatccaaataattaattttcaacccaaaaaaaaaatgagctgaaattaatattgcataatttagccttacaaataaacaaattggattatttagaaattatttgacaaccattttaatatttcagatatagttttgaggttttgtttttagtactaagattggattaagccaaatgaattatcaacaaaataaaacttgtaatttaacaataatgttgtattgttagaatatttactagattaatatgtatattatatgaataaatttcacatgagcttttccaaagttataaatttatctccacaaattccagttcttaattaaacttgctaattaatttaatatagacatttatatataatataaagtcttatatttaaaaaagggcacttgtcgttttgcaaataataaatcatttatttatattaatattaaaaaaattgttgggtagtagcactagtgtatgtgtatcctcttgacttaaaaaatattttcttttctccaaactaaaataaataaatgacatacacccacattatgcttccactaattctacttgccctatttttattggccctattatttacttttattatttagtcactaattaatttaattgcacctagttgtgttattgtttaaataattatttattgtgttaaaaaaatcatttattcatcattcaaaatcatgattacctagcactattattctattgaacactaaagtgtgtgaccattattattatgaatatataaagtaaaagattttagaatattccctcaccttttcataaaggtagaaattggaatccccttttatagttactcatttcatagaataataataataataat

SEQ ID NO: 237631 - DNA, 3601 bp, Cannabis indica
  modified_base (2967)..(2967): a, c, t, g, unknown or other
aaatccagggaactttggtatcgagatggggacaggaactctaagtttttctatgctgctaccgtgatcaaacgcaagaggaattttataaatgctgttcggttgaatgatgctgagtggattgaaggtagagaagcagttggtgagtatttccgaacaaatttcatgtctattctgtcgtcggtttcccctgaggaacccttgcttgatgacttggtctctcagtccatttcggaggatgccaatcaggttcttattcaggttcctacggcggaggagattaagaaagtggtttggtccatgccttctcttaaggccctggggccagatggtatgcctgggaaattcttcaaagatcattgggagacggtgggaggagatgtggtggatacggtggtccaattctttgaaacaggggagtttgttaaggagattaaccaaactttcattgtgctgatccccaaaaaggtaggagctaattgctttgatgagtttcgccccattagcctgtgcaacttcacgtataaaattatctctaagatcttggagaatcggttgcgacccctcctttaggagatcatttcaccttttcaatcagcttttgtgccgggtagatggatcgctgagaatagcatcatggctcatgaaatcctggattcttttaacaagttaaaggggaggtaggggtttgtgggtctaaagttggacatgtccaaggcctatgataggattgaatggagctttttaaagaagaccatggaagccttcggatttgagacgagatttatccagatggttctgaaatgcattaattctgtgtcctattcgatcttactcaatggtgacccattgaaacagtttcgcccgggtagaggacttcgccaaggtgatcctatctcgccttatctgttcattttgtgcaatgaaatcctttctaggttgctcttgaagattgaagaggctggtcttgtttcggggttcaaggttagtcctcagagcccctccatctctcatctcatgtatgccgatgatctcttcatattttgcaaagcttatatgggtgaagtaggggctgttatggagagtatccagttatacggttcttggtcgggccaatgtctgaatgttcagaaatcggcgtatgtttttttgagaaatgtggttgattctactcaggctgatttggctcagtttttgggttttcgaaagttgtgcaaggaggatagattccttgggaacccaattatctggttgaatagcaaggttaaagatttgaagtttatcaaggaaaagatctgctctaagattgaggggtggcggtgtaaacttctctcccaagcgggcatgtctactctgattcgagccgtggcccagagtactccggtgtatgctatggctactttcctcttccctaaatccttgtgtcatgagatgaatcaggcggttcgaaagttctggtggatgggcagtgaaaacaaagatcgatttctggcactttgtgattggaactccttatgcttgcctttggataagggtgggttaaattttaagaagtttgctgatattaatcttgcgctggttgcgaaacttggttggaaactcgctaaggaggaagattcactttggtgtaaggtctttaaagccaagtacttggggaataggggatctaaccttctggaattcaaagatgcctaggaacgcatcttttggtgctaagggtatcatggctacgagagatctgatcaggaatgaatcttgctggcttatagcggacgaaagcaaggttgacttgtggaattctccctggataccttggctagactggaacatgtctaaagctgccttcgatccactttgtgtttagaactcaattaaggtctctactctgcttaatgagaatggggaatggtcagactgattggttcataggtggttcgtccctagtgtggccagctctttgaccttgatagggcgatttcctagatcgcaggaagatcatcttgtgtggaaagatgctaaaaatgggttattctctccgagagcggcgtataagtctataatcaagggacgttgggggtgagacagatcagctttggagtcggatttggaaactcaagatcacggagcggttgagaatgttcctatggaaactttgcagagatataatccctttcggaagccgactccaaagaatttttggtaatgaagttagatgtgctctctatggggtggaggaggtttcgactcatcacttgttctttaagtgccctctcgctaaagctgtgtggtttgctagcaggtgggctctagaaacatggtcgaatggcttctttcccccggctttctccagggagctgaggataatgcctttggggaatttgctaggtttgggatatgtttgtttgatgtgctgtggtctgcccgaaattgtggttttcatgaacatgttaacccctcttggcagggagttctagctaaggtgaatcatgcgtctgctaatctgcgaattgcttgggattttccaagtgccactggttcaatgtagcagaatttgacagagatttactctggaaagttggtgctgttggttgatgcagcgttcaaagatttgcgccctgcagctgggattgttgtgtccatctcggaggggtcgatgctggaggctatggctgtcaattttgactctgatcaagcactggaggcagagatgcgggttgtgatttatgctgtgaattggtgcaaaggcagggattggaagcaggctgttattgtctcggattgccagctgctggtgcacggccttcatgctcgtagaacacccgattggcggcttgctggcctgttttgggatttggtgcaactgcttgttgaactcccggaggtggaacagtgtggcatcctcgagctactgtgcaggtggctcacaagctcgcgcgacttttttctgtttttttttttttttttttnttttttcccgctgaggacttggcccctcttgtggccatgtgattgtgttttgttgctgtactctgtttttctagtttttagagaaggtttctccagcaaaaaaaaaaaagatatatagatagatagattacagttaaatattatgcatctcttgcaaatagattgagttaccgcatatttttttttcttgttatcttttaatttattaattcaataaaactttcaaataattaccctacttctattttttttaacatatagtctttatctttaagtttttttctgaaaaaaataaataaattggtatattttatttgtttgtctattactatgttgatcatacgtgttaaataacttatttttagaagaaacattatatatttatctatagcaaaacaacaacatatcatattttatagaaactcaatcagaatttgtagattttatcaatgaggtgtttccccaattcaaaagattggtttggaactgaagcatacagtttgccacaacgcgaaagaagtctttgggcagaggatggtgatggatctcggtcaaatttttaaaagacacctcacaactaggaatggcaaatggggcgggtctgccccaacccaaccgggtcgtatttgacctg

SEQ ID NO: 237632 - DNA, 1279 bp, Cannabis indica
ttgttgctccaaagtacatcatttcgtgccagccacaaacgccacagaatcatggcagtttcctccgcctgttgcttgctgctgttcaataaagtatcgctaaaccagctggtaaacatgtgttccagcaagaccttgcaaactcgcaaccaaagaggacatgtgatgttgattctggggacttagtgtagagaggacaagtgagatcaacgtgtatatgcttattggagagttgaactttggttggtaatgaaccagaagttactcgccacaccagatgctgcacttttggtggaacatgcagctgccaaattctcttccaaaaagcatcagcaccatcaatcggccagtctccattttgttgctgcaacagtttgtaagcacttcgaacagagtacaccccacttgtttccttcgaccaataccagcagtcacccctacttgaatcactcaattgaatggacagaattaagtcctgatcatgtggaacaaacatatctttaatcaacttaacatcccaagctctccttcccatctgtaacaagctatcaaccgatctatcaacaagattggggtgataagttgtgacaaacttattgtctatacctggtagccaaggatcttgaaggatagaagttgttttaccatcacaaatggatcttcgaatgccagcctgtagtagctcttttgcctccagtatactacgccatatgaagcttggattcggacccaactcagcattcaagaaattgccttttggataatatcttgccttgcacagcttagcaaccaatgactcctcattcgtaattaaacgccagccttgttttcccaagtacgccaaattatactctcgtaaactcctaaatcccaaccctccagcatctttatgtctgcagagtttactccaactcacccacggaactccttttgttgagcctttggattgtgacttccaccaaaaccttgccatcaaggcttctaagcttgagcagatttctttagtcaaaagaaatacacgcattgcataacttggaagcgattgagcaacggatttcagtaacacttctttaccagctttagaaaggaatttagactcccaaccttggattcttttgatcatcttttccttcaagaaccccagaatagcattctttttcctacccatagtgcacggtagtcccaagtaaaaactattgttattagcaaccaccatgccaagcaaaccacaaaaatgagtcctcatatcatcttggatgttattactgaagaaaacagc

SEQ ID NO: 237633 - DNA, 1006 bp, Cannabis indica
ccatgctcctaaaacttgtaaagcctagtgagaaatcaaacagcctccccctcatgtaataatttgaagtggggtcatattcttcccattcagtgatttttccttcactattgtggttcttaccataccaaattcccaaaactccacagtgtgctttgacgaatcctacacggtctcctaaacttagaagacgaaactccatatccgagcatatgttgcaatttgtatcaattggagcttccatgattgagaatatttcacgctcaacatcaaagacgatgatgtcttcaagtggcgcataccaataaatgaatcctttctcaaaaacaggctctccaaagaaatataagtcatctacgtttacaacagaggggtaccggatgactctccaagcatcagatcctaaggtcaaaatactagccaggttcgtatgtttagcacgttgaagaagaagaattttgaaagtctcattacctgattccccacaaacacccagtccgaaggatgatttaacaattcttagtgaaggacttgaaggtgaaggtgactgtttgaggaaaagtacttcctccttaagtggattgattatgaaagcttgggtagaagatgcccgagagtagcaaagtagtccattacagaaagaatggtagttaaagttgtctccttccaattcaccaagcgatctgagattaaaaccacataacttcccttcttcatccatccaatatatctcttctccttttccataaaattttgaagaaatataaaaataactattcgtttgaggttgagcgatccgaggaatcggtggagcaatcggaggattttcaatagtcgccggagccgagaaagacggcagcaaagaactcgcaacagaggagaaggtgaaagattgagtggaagcagaagtcggtggaatgggaacgaacggagtggttccggagccgatcgtcatagatccgatggcggcgtctgaagaagaaacagtcgtagtaacagagttgtt

SEQ ID NO: 237634 - DNA, 720 bp, Cannabis indica
gaaggggaagaagaggaaatctggtgctggccgggctaagggagctcataagagaatgagatgattcaactgaagcgtgaagctaagttgaaaggaggtgcaagggccaaacagtatgctcatgagcccttgaatcctaaagatgaggctgaggaagagcatgtgactctgctcaaaagcaagaaaaaacttccggcccaatccaggcctgttgaacatgcaattcgcattagggagcccatttcacctgctcggccatctcctcccgtgctgggaaaagggaaagccatcctggcagaggcgaaagacttgtcacgggatggtggactgtcgagtcttgttggaaaaattgttttgcaagatatttcatcttgtttttaaactctttggctatcatgctttatgcttctgatgccttttatctctaaccatgctgtttttatttcgtgcagacatgtctcagaagatgcttgatgccctgaagaagagacttggtggaagctcaagctcgtctccaccggccaagaaatctaaaggtggtgaggcgacgccttccgaggaaaaggcaccagctggagaggttattgaccttttcgaagagctgattgttgcggacccttccactccaaaagttgcgaagtccaaggattctcgaggaggaagctcgaacaggcctgagtaatcaaagggcggatctgagctagccaagagtggacctga

SEQ ID NO: 237635 - DNA, 1023 bp, Cannabis indica
ccaataagtttcaaaccgaaaacttctctttttatcatgtggttgactacgaacaatattttccagaaccgccacaacaggctggtggtccgaatgaataaaatctccattaatgactttaacagacggaaacaaactattccactcttgcttacaaaagtatcgatccagacgttcttgcacatgtgccgccccgtgccttttattaagccaagtaaagcattgtccttcaaatcccatatcaaccaaagcacaattatccagagcttgttgaaattcagtaatagcagacaaactccgatccacaccacccttcttttcattaattgaaaggatttcattgaaatcaccaccacatatccaaggaagatcaaacagaccctttagcctacacaataattgccatgaatcggctctagcgcttgccttaggattcccataaaagcctgtgaaccgccataaattcctccccggacactgcaccaaagcatcaatatgcccaaccgaaaaagacttaacagacacctcccaatcatcattccacaacaataacaatccaccactcttccccacacaatcaacatgaaaactgttagaaaaactaatatgacgacgtataccttccgcccacccaccataaagtttagtttcagaaagaaagactaaacttggggaaaacttacgaaccaccgttcgtaaagcagtcaacgcaccaggattccccagtccccgtgcgttccaacatagaagactcatggctcctggcgagcctgctccgcaggcttcgccaataaaatacttacgttctcagggacaccatcagactgcgcctccaatcgccccttcttcacactttcatattgaacatcaacattcattttccttttacctccaccaccaaccttcgggctcgccttatttttagcattagcaactaacacatgtgataattttgggctaatgggaaccgagctcgacttagacatacctttagccccaagaccccgagaggaatttagtcgc

SEQ ID NO: 237636 - DNA, 1130 bp, Cannabis indica
gcagcagccatactgaagcggctcaagtacgctttaagaggttccccaggttgttgttttatgctggtcaaagatgacgcttcaggtcgacggtctcttgcagcctgaaactgctttttgaagtctctcgacaactgttcccgtgatgttatggaatgatgggtgaatttatcaaaccaactgctcgcagctcttgttaaggaagttgggaataaaatgcaatgcaagttatttaaaacattgcttgctcgcatatagtattaaaattgtttaaaagagcgaccatatatgtggtcccatcgtattgcgagacatgaaggttcttaaatccttgaggaaattctgaatttaaaatatttggatggaatggctcggtttcttcgtttgaatcgtaccctggcaatttgtcaggttctccatcttgatactttatgaattcatcctctagttgaattatatgtaattggatgggatccattggttgctgatttgcattttgattaagttgattacgcaaatcgggggtatttcgatttaggtgctcgcgaaggtcaggctgccttcaatttaatctcacgcgcaaatcaggttcgcgatgcctttgttcatagttacgtacagatctggtctccaagtagctctcgaacaactacgtgagttacgtatgctttcttggttagtataataacgccgagatctacttccatctcgcatttgtctacttgacctactatgcctgcgggatcgcgattgtcctgtgcttgagcttgcttcatctcgtgttggtcttcttcttcagaagagattggacacacgtcctctacttaaatatgtgtgcacatttttctctatccgcgcgagaaggacgtttgaggatgtctcgacagaagaccacttgacattggttggtttgtagggtttctttcattatcacgacgaaatccctggttccttagtcgaggttgtctcacctcttcattcatgcgagaaaattctagcatgtcagttcgttcattcccttagttaggaaattcttgggaagtttgtggaacatctcgtcgatgttcttgattccttgtattattaggatttggttgatttgctctatccattgggacatctgttgctat

SEQ ID NO: 237637 - DNA, 729 bp, Cannabis indica
tctttgattcgctttttaaaattaccactaaaatcgcttccccaagccttcagcttctctccgcagtgttgaagtttttgggtaatcgggcaatcaccactactctcccaagtttctttaacaatttgcaaacacattggttcacggagccaagaattttcaaacttaaacgagcgactggcaacaacttgaattacattatctaacatcaataataaaggacaatgatctgatgtagatacctccaagtttagcaacttagcaatgggaaacaaatctaaccagttttgggacaccacagcacgatcaatacgaacttcaatccacgcatttgtacctctgcccttctcccatgtgaagggataaccgttcaattccaagtcaaccaaaccacaagcatccaaagtctcaccaaaaccatccactaaccagttgggataggggttccctccccttttatcagactgagaagtaacgttatttaaatccccaacaatacacattaattgatatgattccatccaattacctttagactttagttcttaaaaaattaatatatccttttaagtgatatgccgattaattgaggacgagtacgaatattatattttgatattttaatgtgaagaattttttttttaatggtaatgacaagagttaaattatcaagttatatatgtatatattagcgaaaagctacatgcgaggcacgcatactaaatttta

SEQ ID NO: 237638 - DNA, 526 bp, Cannabis indica
gcattgttagacatcatggtttgcataagagtgtttacggtgcaaatgtagtggattttaactatttttttaaatcaaattgtcaggtaaggtgatttaggtgtgtatctcaggccctgtatgcttaaagctctgaaattgtaaaatttaaatcaatacataaataaaatagtaaataataagaaactataacaatatattatttagtttggtggtagagagtgattttaagtaaaaaaaaaaaaaagtcaaagcccttgaagcaagaataaataatgaatgagaataatttatatggatgttccttcaaatttaattctatgatttgggctttgtaatatgagttgttcatatatatatatatagggtgattattcagtggttacatttttattgtaaccatatggttatatttttccttgacctataataacaggttactaataggtagacagacattcctttttcagaattaattaattataattaactatttttaaaaaataattaattaaatatttaacaa

SEQ ID NO: 237639 - DNA, 1860 bp, Cannabis indica
gagtacacaaggatgtcgtcgatcaatacaataacacaaatatcgaggaaatccttgaatacgctattcatcaggtccacaaaagttgtgagagcattggttaatccaaaagacataaccagaaattcataatgcccatacctaaaaagccgtctttggaatgtcctcctctcgaattctcaactgatgatagccggattggagatcaatctttgaacagactattttcccttgaagttgatcgaagagatcgtagatcctaggtaaaggatacttattcttgattgtcagtttattcagctcccagtagtcaatgcacatacgcaaagacccatctttcttttaaacaaacagtacagaagctccctagggtgacacactatgccgtgaaaaccctatgtcaagcaacccctgaagtttaattttcaattctttaagttctactggagccattctgtaaagggcattagaaaccggttctgcttctggtgccaaatcaatttctctctctggtggtaaaccctaaagtttatcaagaaaaacatctaaaaattcttgaaccaccttgatgtcttctggccgaattgactcagccgagtgctagtccaataccccagctagaaaccctagacatccatctcgtagcaaatccctggctgttagtactgaaattactaggatccaagatccctgaatcgatccaacaaaaaaacggttcttcgccttttggttggaagattaccatcttcctcttacaatcaatattggctaagtacttggataagaaatgtattcccagtataatataaaaatacactaaatccatttctattaagtcatcactcaactccctatcctcaattctaatcggcatagacctaatccacctttcagagataactaattctctgccaagtagtaaggttccaaaccctgattcataactatcgtgcaatctacccaatttactaaaaattctggttcccacataagactgagtggcgctagagtgaaataacaccgagaagtaagagttgttgatcgagaattggcttgttaccacagaggggctggcttctgcatcatcctgagttaatacgaacacccttactgaagcgagtttcgctgtagtcttctgttcttccttcttgagttggaggcaatcccttttatagtgtcgtggcataccacactagaagcacccctgccctctacactctcccaagtgatgttttttacaactggggcattctgggtaagtgtatcgggtttcgaagccaccctgacaattgcctcgaccttggttccctcataacctcttgttttgacctaaagcacaagatatagtagccgcctttcttttctggtcagtggtcgagctacttgttctcctactaaagcctgatgtaggaggagtaggagccccaccaacaacctgagtccttcgagactccagggtgcactccactacgccctcaccttgcagtgcctttcccatcatatcattataggtggtgttgtcatcagtaatgatcattaggtcatgtcttatctttgcctttcacccgtccaggtatttttcttcattgccaaaatcggttagcacgattttcgaggccaatcttaccaagagatcaaacaagattgtgtattcagtaacactcatattttccttctgggtcagctgagtgaattctttccttttcgcgcttatggctgcctcattgtaatattttgcattgaacagttcctggaacttttcccaggtcattgttgtaacatcatgagtcagggacaccatgtcccacaataccagagcatctcttggaactggaatgtggcgcaggccactctatcatt

SEQ ID NO: 237640 - DNA, 1342 bp, Cannabis indica
gatgcagaaaattcaaaacgtaaagcagcatgtaccttaaaattgctgggactgattaataagatcccgctaccagaaccctcgttatttgaggctccgtcgacgtacaatgtccacatctctctattcgctatagcaatgtcgcttttgtcttctatgagtgctacctcggtgctggggaattcaaggataaaatctgccaaggcttgccccttgatcgcagttcttggtttatacttgatgtcgaattgactcaattccattgcccatttcaataacctccctgatgcttctggttttgccaaaacttgccttaaggggtagtttgtcaaaacctccatactgtgagcctggaaataaggtcgcaatttccttgacgatgttatcaaggcaaatgccaacttttccattaaggggtagcgtgtctcggcatccagtaatcgcttactgacataatataccgggtattgtcgtccttgatcctcgcttattagtaccgaactaatcgatattccgatactgctaaatagatggacaggacttcgccggtcgtgggctttgataagatcggaggttgtcccaaatgcatttttaaggcttgaaaagcctcctcgcatttttcagtccagtggaactttttgttgcgttttagaatctgaaaaaactctttgcacttatcagaagatcgcgatataaagcggtttaaagcaacgactttacctatgaggctttggacctcttttggcttggttggtgatggcatttccaccaatgccctgatcttcacaggattggcctctattcctcgctggttaaccatgaacccaaggaatttcccggagccaactccaaagacgcatttcagagggtttagtcgcatcttatatcgtcgcaatatttcgaacatggcctgtaaatgggcaaaatgatccttcgcttgttgagattttacgagcatatcgtcaacatatacttccatggtgtttccaatgagatctgcgaacatcatgtttaccagcctctaataagtcgcacctgcgtttatcaaaccaaagggcatttctttgtaacagtatcaatcagtaatgaacaaggtgtgttcttggtcgggctcatagatcgagatttgattatatcccgagtatgcgtccataaagctcaggagttcgtgacctacagtggcatcaacaagttggtcaatgctaggaaggggaaagctgtctttgggacaggctttatttagatctgtaaagtcaacgtatgtgcgccatgagccattaggcctaggcacgagtacggggttagctaaccagttgggctagaacgactcccgtataaagcc

SEQ ID NO: 237641 - DNA, 1143 bp, Cannabis indica
catcattttttattaaaaaaatatttaaattaaatgatatttatatacataaaatataataatataatagtatctaaaatttgttgttaattataattttattttatccgtaatatttttaattttataatacatttcttttcgtttttttgttttttgaaattctcatacacttttcctattttatattgtttaaaaaccataatagaatgatatatatttttttgtaaatgcaaaaagtaacgacattataagaataataaatattttttctattttagtgtttaaaaaataataattaatagaaatatatttttaagatatgtaaattaggtaaaaaaaaaattaaatagaaagttatttttcagatatgtgtaataagtttaaatttgaaatgcaatgttaaaaaaaatattttatgttatataacatttaatataagataaaagataagagagatatgtgtagtgagtttaattaatttaggaggcatttaataatacttttattttttattttttaatcataaaaataaaagtaaaattaaataaaattttgtttttaaaaaggaaaaatgtgttctataacaaattttattttttaattttaaaacagaaattaaaattgtgttcataacttttatttttattttattttttgattttaagttaggtttaggttcgagtctgggaccggagtccccgttcgtgtccaagactaggattgagggcggagtctgggtcttaagatttaagttggggttagaatccaaaatatttattaagaaaaaaaattgtttaaaaaaattgaaaataataatttttttttatttttaaaattttggttctcaatcaaaaattaaaaattaaaacaattttatataatatatatatatagataataagagtacgtacactttccttaagaaaaaaaagaaggagaagaagaagactgaacttataaatgcatatctactatatataattatagaaaataatattcataaacaaacaactataacgtgagcagcatacatcaaattcaattcattatcaagagacaacatgtgatccattaactttttagtcatatatatagtaacacaaacaagaaattttattagtaggcactttccaacttcca

SEQ ID NO: 237642 - DNA, 2683 bp, Cannabis indica
ttttttctgaataccgaaacaagtagagggtgcatcaatacattcattttaagggttgcattgtagaatcacccaaaaattgataattacttattgggtgtcaaatactacaaaatataattaatttgttattaatgtattttaatatgaaattacatatattttaatttaataaataatataaaaaaattactaactaattataaagtattattactaactaattaattctacgtcttttaacaattttaaaaaaaataaatcaggttacaaatacccattaaaatactaataaataggacaaaaaaattaataaatttaaattaattaagatttttatttctaaattttcacatgtaataaattatgtctttaaatttttttatttttaaaaatttcccttaaattattgaaacgtctaattttatcaaattttactaagtcggtaattgtctatattttaaattatattctaccaaatcatcaaatctctcaaattttaatatataatttttaaaatacaatttgatacgtatcaaaatttgtcgtcgcaaaaatcataatcaaccatgaattcataaatttatactactttacaaactgaaaaatttggatatatttcacaatttaattgattctttttatgtaaaatataataataataataataataataataataaaaaaggtttgttgtgctatgaaaaaaggaggcagagaaaaaaagtaagtgagtgttgaaattgatatcgttcgtttcgccgcgtgttgtaaagaataattattttaataatttttgacaaatatttaattgatttatttatgtgtaccaaatttactcatttgtcatggagtgcttagatgatttacacgtgtcctctataattttttctttaataattaaaaagttttatctgatttatttcacgtggccttttctttggacttttcgtcttagtatgtagttttggagcttttgatgggtcctatttatttattttttttatgctttttttattttttatttattttttctttttttttttacttttctagactcccaaatcgtcccactataataaatatgattattttataaatatactaaaataataaaaatataattataaagaattttaaatattttgtaattttattattttatatatttttatgttgtacttttgttaattaattattaattttttattatttgtatagtattgtttattgttattttaatattgtttgaatattatttttctgttatacttttatgtagttccaaatttaatcttttacagtaataatacttaaattatatttttagaattttcgtaagtactaggccgttaagtgtcaagttaatgactacatgacaatcattgattagtccaagttaataatttttttaaatataaatatactaatagaaataacacgtggataataacttaacaatcaggtacttacgtaagtttcagaaatataacttaagtattattactgtcaaaaattaaacttaagtatttatttacaatcgaaaattaaatttaagtatttgtgcaattactcttttatatatagatttggttcaataaaactctcgaattcagctaacctatttttatacggactcaaatttgtactccacttttttatttcttattttttacaacgagctaaccactaaactataggtatttttaacatgtcgtgtttttggagtagatctatttgtacttgtgtattacatctttgagcttgtcgtgttgtgttgtgttccatttaatcttttagtttcaccctagtttgccaaatttctttccctactaattttgtatctcttggaatctttagtaggtgtaataataataagaagaaaaaaagtgctagttttctattcaagaagaaaaaagtaagggccctagtttcctaaggcttattcctacgggataagttgaaaactaccattttttattacacattaaccaaatataactctaaaataattttaattgataaataccctcttttataattaaagtaccaaatataacctcacaaaacttatcaaaattagactttctaatgcacataatgggaatataacttataaaaatgggtataaattaaagagtaataaaataaaggtaaaaattaaaatatgaaataaaaaataggtatagagtgtaatttcctctattccttctttttccattgacttctttctttaactaagcacaagcttgagaattcggcccaaaactcatatttatgggccgtccattcaaagtccaataagacagaccattctcaaacttgttcatggggcccaataaaagcaccttatagtcttagaccaaccacaaccattgcttacctcctctctttttcttttttttttaggaaattttacatcacatgctgaaatttttattttttttttattttcttattatgaggcagaattttttaaaaaaatactacatttttttaaaataatgtgttaagtttttactgttgttccacggatgttttttagttgttccactgttattttaattgttctattttgttgttttacagttgtttaataaaaagatagatttttgtaaaatattttgtgtgacagtaaaattataaacttttacctaaaatccagtatttttataaaaattct

SEQ ID NO: 237643 - DNA, 1023 bp, Cannabis indica
cttgaagctccttaaggcctaatggcctaatccagagctaagctcgatagttgcatatcttctaacactagatcaaatcctgtcccctgcgtcagaccatggttgtgcgcgtacgtgcctctatagtgcttatggtccaaaaacttgtctaggaaattgcttttaaaggaatgacatctgagcgacacgtgtcaaggcctttacgagataccttgcattgatcgagcaccacacgatgggaaagctacctaccaaaccagcagttagatggtcatgttgtgtttttggcccttcttgcgtgttaagtaagaaattctaggtggataaagggtatgccctcacccacatgtgtgcctataaatacctctatcttttatgtacaggggtgagcaatctttacttaaaaaaacctctactgaaattcctagagagctttcttcttcgagagaaacaagaggaatacagagttatcattgtaaacacttatattatttaaacacatgcctacaaggctaatacaacggactcatggactagggattattaacgcctaaaccacataaaaatccatttgtctatcatttactgttttatgttttccttaagctttaattaataagtttatgaaaatcttggtaaatagtatctcatacatttattctctatacgactatacttatcttttaatgatcaatttattgcattttttgaaaaggaatacacataacacaaacatctttctttaatttaatttttattattatagaagattttaatgtatcattacttgattaaatatatgcatgatagtaaatccattatatatatatattttttaaatccttattgtataataatatttggatcatgtggtgaatacatttttttttcattactacatatgattcctttgccgatctcaagctctttgaagaccaatacaatactctcttttttgtttgccttgatcaccaatcaccaaaccaccaaatatactaattgcaaaggttttttgagtttacc

SEQ ID NO: 237644 - DNA, 1058 bp, Cannabis indica
acccgtccaaaccgagcattaatgtttcttttttcacattcatttgttatactttagttattgtgataatgagataaatataaatattgaatttaaagttcaaatcatcctccattaaaaaatatagtagtttaaaattttattttttttataaatatgtatataaattatataatatatagattatatataataaaaacacatatatatacaaaaactctcttaaatatcaggttagtcgggttaattaggcgggttgatattatttttaacccgctcaatataaaaatagggtgggttataacatataaaatatcatgcacatgcgaagcacggggcatcagcctagttataataataaaaatgatacaaaatcatttgcttaaatgttattaatgataatagatgataactcatacatcattattagttgttatttttttaggaacggtttagagttcagttatgagatggaaaaaaaaaaataaaaataaaaaaaaaatcacaaaaataaaatagaaatattctgttaataaaaggacaacgacaaaaaaagtaatatgtaaagatatcggtaagtataatttatattttgggtacatatgctagcgataatttttttgaaaagtatcggtacatttaaagagtgaacgccattagaacaccattatatatggaatcagtctccctatcaagattgtcgtacaaatattctgtgtagtgtgattatgaaaaaattgataataaatgtcatctgagagcatctccaatgagctcatcaaatttggtgttgcactatctttaaatttggtgtcaaaaattatttctactctaaccacaacaccaaaaattacactacaaaatattacttattattatattaattttgtaataaaataaaaataattatagtattcacatttaaatttacacacaataatttaaaaggtatttttacaatacaccccttcaaataaaagagtcactcgtgcaacagacaatttgaattttatttcggcttgttacattttttttttttgaattttttcgaaattttg

SEQ ID NO: 237645 - DNA, 4287 bp, Cannabis indica
taaaaggctttaaaggctaaacagacgtagtgttaaaaaacaaagggcatatacgccaaaagcaagaacatgaaagccttaaggccaaaaataagtaatgttcaaaagtaaagggccaacgggccatacatgaacatgaatatgaaactaatatgaaataaaatcataaacataagatactaataaaatgtgtctactcatgtgcaagtgcaaggggagtcgagctgagagctatagcatctggattgccaaggagctggccagccatagcctctacagactggacgaccatgtgatcagcaggctggccagccacctcctccatagacttgctggctatagcttcatcaagatagcttgatgaggacccctcaggatggacaacagtctggtcaacctggtttgtccacatcctgctctcgtagagctccctcccttaaacaagtgttctttcatggaaagaagatcccatgtaggagatgtcaaccttggggttatgtagataaatctcatataagacatcgaaggacaagctgacatactaatccttgatggcttgttggccatcaagagaaagttgcaacacctagtccttgttcccaagctccacctcaaacctagaggcccttgtagcatggttggtcaccttttggctcttaataccatgcaagtgctctaggccatttttcaaatctttggtcttttttagatgagcccgtgtctgggtatgtgcatccctctccgtctgaagcttagtctccttggccttcaatttctctcagtgagcaccagattagcccttttctctaccatgggtaaggctgaacttcaacatggccaaaaattaaaagaaaaaagcaagttagtggcagaagaagacctggccagccaacttctcattaatgcaaccttggctggccaacctcctagtgattcatatatggctagccaacccttgtcaatgcaacaattttagtaaaatcaaatatacaacttataaatgtcaagtcttgaagcctgctggacgttagacactccagctcctcatcctctagctccttaagctccctgtcaatgatgggtagaattctgctaatgtaactatcagcagcctcaataatcctctatctagtggctaataagcccttggctagacttttgggcccccttgccttattattggcatggggatgaaatcctccttgtgggaggatctatgatcattggctgagtagctagagcaggccctagaggagggggaagcagtggggaccttgtggcatcactagaccttgtagttcaggccaccttggccttgggacgacctgaataagctccactagaaggctcttaagcgagatcccttaatctgcaagccatatttacaaaaagaaagtaacaaagtcagaatacaagtaacaagcatttaatgcgataaaaagcaaaaagatggtactatcaactaccatcatcctcagacgaggaatcatctgaactactatcactaacagtagcctttccattgcctctagaagtaggaaggggacaagtaggcctgacaagtccatggcctctaggcctaatcaatagaatagcgtcaccggtggtgcctcctcatggcaagtgctggcagagggaattctctctcttctccagggttctcgcaagcctggagagggggatgtcatcatccaaattaggtgtatgcccacctcttagacaagtcacgtctactatcgggacatcatctgggcctccagatgggccctcaactccctcaacattaaacttgggagggtactgaccatacttccgaaagttggcctcgcaagcaaaccttaatatattcctcctctaaatagggagaaataggatataattttctctatctctcatcccgagagtggttatggagcgtgagtaggctttcaccctctagaagttgtggtggacttgtgggatatcccaggcaatgaaataagtcccagtgtatcctgccactttctacaaagttatgctgttggtgttacctaaccactaataaccaagctgactgaagaagaagtatgtagtcttgttcttcctcgaaacaaattttagcttaagatagtacccaatctcatagggggggctgaagccagcctaactctggataaagaatgacatcatcgaaaggtactttataccttttggggtgatcagatccagacacaccctgaagtacatggctatatctctaaagtaatggtgcaggggtagcactactccctgctctttgtggcgctctgaccaggccatccatttgaatgccaactaacgtgcttgtaggtctcttaaaggcataccccacttgaaatccccccattacccctcctgccttgatcttgttaagcttttgggtggaaatagaggatgggggagatatccactagctcttctagtccccatgatcaagtactcggggtgatgtagcctcctctagaacatggtctaccctaacctcagaaagatgaccaaggctgttcaaaggccatctgacctcatcataaaaacataaggggttgttggggaatacaacacaagtcttgtactgcctcctggaaagcacaacatcctcaatctcagatgcactatctgagttctcctcatcttggtcatccctgggtcacccagccataggtttcttagcttggtttgcccctgggtatctatcatactgaggttgtgcaacctcctcaacaatgcctacgctccctctagtcactagcataggaatgtgaaggtcataaggtggtgccctgtgacacgtctgcttggtcctttccataatggacctcgagtgcctagcaatagtaagcacgatctctacggtaggaagaactcccaatggagaaattaccctagcaataggcaaagtgttgggcacatcatcctaaacaatgtaagtacaagaaccaggaagaaactacctccactcgaggctcaactcccatatgaaccagctataaaactcattacctatgtgctctgaatgacgatgatgctggacctcaagttctagagaaccaccacaaacctcgagatcactcgaggagttgctagaggaatcaactagatattggtcctcaaagagaagaccaagtaaatctttgtcaatacagcagtaacctccctaatagtctctcaggatcatctgcacacaaaagacaaggggaggtgagcaacctgaaaaagcgataaggtttagacaagactcttgtcagctgtaccaaagggtacttgccagataatttcatagtacaaggctaggtatcaacaaagtatagtgtcaagtgtaacaactttcacgaatgttgagtcttaaggtgagcattcgactataatagactcaccatgaagtgtcatacggagtttctaagagaacaacgtatgagaaaaaggttttataggttcacaaggccacgataggattcttactgaggtcaaaagaggatagaaaactggccacccacttgggaccaaagccctaggccacctagggtcccaaagcattgagtgggttagctagggtcccatgtgccttgcaagaattagctagggtcacaagacccaagcatgaactggctaagcttcctagggtaaactctagagcaggcagcccccatgacaaaacccaagagccagtcaggtcttgaacactacccttagggctgccaaggtgtgtttggatcaaagtgtgttttttcaaaactcaaatgtgttcttcgtgactcaaagagtcaagaatcacaacaaacaaaatcgaatctttttcatcaagaaatcacacattatgcatcctaaaactatcatgtgaatcaaaataccaaaaagaattcatttaacgtggtaatcaagaatgtatgaaacatggaaaagcttaaacacgataatggaaaatccaagaaaacaagtagagaatgagatttaaatgcttatgcacgagtgaaaatcatcaaggaagcaagtggaagcttggatcatcgaaacaaagcgagaatctcgggtgtcgaaggacttgggtgcatcagcctcaaaggggaagtgaagagctcttctattttttatttgaagagagagaatataatgtgtggaatgagaatatgtttcactaagtgaccttatatagtttttggtgggcccctctcatttaacatgcagcaaataaacatggaacctataaaaacaacgatgcagaatattattagttccctattagggaacctgagtagccaaacaagagaaaat

SEQ ID NO: 237646 - DNA, 1388 bp, Cannabis indica
gtatggtggcacaatattagtttttgtagtgtatgatgcaaacaaccaattatttgtaatttcctttgcaattcagtgagaatcacaaatcttggaagtatttcttactgaagttaagggaaacgattagggaggttgaaaacttagtgtttgtattagataagaatcaaaacattaaacatgctgtcaatgtcattttccctgaagcatgccactatgcatgctataaacatattactatgaatgtggcccacacgctcaagactgatgtatgccataagcaaatatggctcaccgcttatgcatggtagaagagggaatgtgataaacatttttaggtgctttaacggaaggatcctgccattgatgcatacacttagagtataagactggaaaagtaggctcgtccttattgtataggtgataggtacaacataatgataagcaacactgttgaaagcctcaaaaacatgacagaagaattcaagaaatatccaataactactctggttaagttcatagggttcacactacaaagttggttcactgaccgtctcaaagagacaactaagtgtgctattcctttggcaactacttttgaggatgatttggcagcgtaacacaatgatggtaagttcagaagcgtccaacataatggtgcacatttgtttaacgccggtagaggtcctgagggtcagagagatggtgatgtgaacttagttgagaaaacatgcacatgtggcatgttccaattgttgaaaattccttgtgcccatgcctgtgccgcaacgattactcattttgtgagcctatatgctctaagctctacctattacacaaagatacgtggaagtatacgtacgatgcaacaactaatattatcgacgaggaggacaattgagtgcttctagaacatatgcaaaacatgagagtcaggataccagtggagaggaaaacccataggtcatccaaggaagagtaatgcaggaagaagatggagtaactaatatccatctaacggtgataaagttgtggtactcaccattgttaaaattgtggcgacttaggccacaacaaaggttcatgcaaggcccgagtttgagcattattttagtattttcattatttttattagtaatacagttttatgatatattttttaagttgtttttattaattttttactagttggacctactacaacgatatttagcaacgtgtatcaacaacgttatcaatatgattaaattagaatgactattttttgtagttttctgctatctagacatgtttaacgatatttgtcggcatgtgtcgacaatgttgttgcaatggttagaatgctagtcgtctacaagttgtgacatgtgttgactatatcatcgata

SEQ ID NO: 237647 - DNA, 1092 bp, Cannabis indica
aagaattgaatggccaattcctgtcagagaatgtcgcctacttggctcgacaccagccgagagagttaaagtaagttgggacagtctgacattatgtaaagaagttctctagattgatgcttgacattaaggacatgaacgaagtcgacagacttgtctacttcctcaaaggactcaagctgtggctaaacaagagctgccaaggtagtgggtgtcagatttcgccactactgaagctccagccgagcgactgactgattacacctctgagaattcgcagccgaagaagacgaatccctagaccagcaccaacaatgctgcgagtaagaagtcaggaaagcaacggacgagtaaaattgggggaggggataagaggactcctaaatctagctcctcctctaaaagttatgctgcaatagggaagaatccccttaagtgttggctttttcaaggcccacatagggcggcttcttgcccccaccaactccaagttgagtgccataaaggcatccattgctgaagaggagcaaggatgtgaggaagatgatgaagatgaagactgcgcgtccatgagcgtcgttcgattgatggctgctcttaagaagcatggcgcaggaggaaagaaagcccttgggaagggattgatgtttgtggaggccactttaaatggtaagcaggccaagagtgtgttgattgacactggcgcaacacacaacttcatttccaaaatcaaagccaagagggtgggcctaaaactggagaaagatgcgtgccacatgaaagcagtcaattcgaaggccgtggcgacgattggagtggtcaggaaagtgaatggcaagatcgacggatgggagggcaacttgatcttgtagctgttcgcatggatgacttcgatgtggtattgggaatggagattctagcagagaagggggtcattccaattccagcaacagggaatctactgatcatgggtgagaatccttcagtggttcccgctaaagtgagagagcccccagaagtcaagctactatcagccctgcaactgaagaggggcctgaagaaaaagagggcaatattgtcattgctcccgtc

SEQ ID NO: 237648 - DNA, 1217 bp, Cannabis indica
aaaaaagtggaaatctcatatttgtataacaataataggttttgctggtttagttgccgttactaaaaaagttaccgaaaaagtcactgtcgccgaaaaaaattattaaaaaagtcactagaagtagatgtctcaaatataaataaaaatagaactagttctataacataatgaataaaaataaataacacaaaataacttaaaaccgagtttgtaacacaataaataaaaataaataaaataaaataactcaaaccagttataaataaaataaaactggttctataacaatgttataataaataaaaacaaataacacaaaataaattaaaccggttaaaactaaaatagaaccggttatataacataattgtcggtgacttttccggtgacacttattattacaagttttatcaaatttatttgttgtttttttttatcatattttaaactttaattatttttaatctcatatttttttttttgcattatttatttatgttatataaaagtaaactctactatattttctaattgggttaagatatttaagaatttcacacaaagcacctaacattgtatttttttttaaaaaattaccgttcttttatggactattgttttcttagttcttcttttttcttgaagaacaatattattttcacattgagaaaatatagtactataatgttgtagtaacgtaaaaataatattattttctaaaataaagaaattgaaaaaataataatctgtattaaaaaaaaattagtaaaaaattgaaaaaaagaaaaactatagatcaagacaaacttaaacattttattatttttgaataattatgaaatcatccataatttttaatcaaataggtacttttttttaatgaatttatagtacttttagtatttttagtttgtggataagttacaattctaatatattatatgatagtatatacatataattccacgagatgttctgtaatattcaagaaattacaaataatttaagatatctaaatcaagattgaaactattgtttttttttttttttttttattttttttattgtcgtgtcctattttaatgtttatacgtagtatttaaggttcgtttgaaatgtcgtattaggtcgtattgtattgtattatattgaattagattatatatcatattttatataatactatgttaaattttaatttatactaaatatta

SEQ ID NO: 237649 - DNA, 1285 bp, Cannabis indica
acaaccaaaactgaagttggaaagtccctatctaaataggtgtccgcatagggacttgaggggtaaatgttatcctaattttttctcacatgatgtggcatgtccacatggacaagattgatgccacatggagtacaacttgtcaacaagaaggccaagtcatcgtgcacaatatattagttgacaaggagtccaaatacttaagagggaaaaaaaaataatgaatttaccaacataaggggtctggcaagaccccctggctggccctactgccagcataagctggccagcctccagcaaaggaagggtcaggtagctttggccctagcaagcactttttgtgcctttgcagctttcagcctagacaacacttttggttacatattgggcttcaacaacccacaaaaataggagataaacttcaattatttacctattcttggggactaaataacatgttatttacttaattatttctatgtgtgcaaataggtgatatctcctcattttaagggatatcaacctatcatctcttgtaagctctcctatataaagagcactaaactaaacctaatctctctactacatgcccttagttgtgtagaagagactaggtctccctcatctcacttacttgagatttgattcttgattctcactaatgtaatctaaagagagccactatagaatccacaatacttgttatctgaatggtattatctctgttgacctgaattttggccaaccaatagcagagtcatatttatgattgatatcactacatgaacacaataagaacaagaaagtaaagggacacattatttttatagagtggcccccattagtgagtgggtaatgacatactccccttttggttgtattaatactaaagataataccactcaaataacacctctagtggattttgaagtggctctcttaagattacattagtgagaatcaataggcaaatcacaagtgagagagatgaaggagacttagtgtaatatcccggaaattttattgatatttatttggccatattttattaaatatgtagttatgtggatattagagtaagattataatcttacttaagctaattaggagttaattagtggaattttagtaaatgaataaataaagcgtaatttattaattacggagattttgttggaatatgtgggtatcatagataccataatttgaataaaatattttcgggcttggcaactgtggaacttgacgaagtggtcaaaaaggtcacgacaattaagttatattg

SEQ ID NO: 237650 - DNA, 695 bp, Cannabis indica
aacatacagataataaaaaattaacaacaaattagcaagactacaacataaaaagaccgtattttctgtaaataaaatcaaaaaaaccatacaaataattaaaatttcatgaaatcgtatttttataatttttttttgttatttttatgtttttgtgaaataatccctttcatttaaggctcaaattaggcaactctttaagaactcaaattgcacattaattatgtagttgaattaattacacatttgtaaaaaaaaaatgtgtaagtgtaactttagtgtctcattcattattcttttttgttgttgttgttgttgagagaagaggaaatcattggttctacagacattcagagagaaccatagaaatgggcaaccatttttcatgaaagcaatccaacccattatcaaaacctctttcattattcaagatagtaaaacaatttaatctaactaaatatgttagtttttatatattatctcactacaaactatattataaattattttaattatagaaaacaacctatttagatacaagctacaatgatatttttatgtaagactagtcactataataaaaggtgttttcctttagaactttgtattaaccatctaacttttatctaaaatgaggttatttattaaattaaattatatataactctgtctattatacattattttttaaaaaa

SEQ ID NO: 237651 - DNA, 1170 bp, Cannabis indica
atcctagatctttgtaggttgaataatattggtttaggttaaataattacccttccttaaacatgaagtaatcaacatacataggggtaaactagtcttaattcataaccccgaagcaacacgaaatttcaaatgtctaactgtatcaccctgttattttaaggtactaaatcatagttatgtgactatataggtcctacgttgcattccactgttactgtgcataaaatatgaaaatcataaaatattacatacatcataattaatacacctagaattcaaatatatttctataattgcataaataataatcaaaagtctaattctgaaattaagccctaattattttctaattcttaaattaaagttaagtggtcattacaactttaccatcttttgacattagtatcaagtcccaagttcggttcttcctcaaagagtgcatctcttccgacatatataactccatttcatttcttctgatctttgtttatcattgcttttgcatagctagtaggctcttcctgcacaatatgattagcaatttcaaatgtgattgctattatatcagcatgtccatacttgtctagaaccttttacttctctctatatcatatctctcgccactgtataaccttttagatcatcgcttccagaatcatcttctgaatcatcacttccatgatctataggcatttcagtctccactctttccagaggctccacctcaagcttagttcctggagcttcaattttcatatgatcagatccagcttgacttccagcatgtgtgtgaatgaatacccataccagatttactaaatgtcacatccctactaattatacattttctcattccgagctccaaacaccatagtctataaccttgactcatttcgaataccatcaagaaaatacacttcaaggctcttgcctcaagtttatttttctaaatgtgtgcataacagacacatctgaataccttcaagtgttcataacatgttagcttccctgatcaaacctcatccggtgtcttgaaattcagttatgttgaaggatatttgttaatcaaataagctacagtagacacagcttccgcccagaacactttaggcaatccagcactcaatagcatgcacataactccttcaacaatggttatgttaaaaa

SEQ ID NO: 237652 - DNA, 3431 bp, Cannabis indica
aaactatatgcaatttttataatatttcaaactgcaactgtaccgtaagattttaaactcgtaaaaatcacactgtgaaaatacatgtgtataaacaatgtttattccatttctttgttaggttgcatttaaaactattggaacacaattccgatggaatgacctttctattattttggtggaatgactattccattttaaaatagaaagaaagaccatttcaatgcaaaatttgaaaaaaatttaataatttttttattaatttttttatatattttaaattccaattctattgcattcctattccaattctcattcccacttctattcctatattttcattcctcccaaccaaacgctatgatcattatcaaattataaaattttaaaatcaatctaacaaagttttaacaaaatttaaaaatatcatattaaaattttaatatcataacatatatactaataataagtcattaactaaaaaaaataatataacatacacatatattacatatatttatctttactaggtagaagttacgtgtgcaagtatatttttttatttaatttttgttatttaacatttaaatatatcacatatatataacataaataatatctgaaaagtaaaagaagaaattaataataattttttcaaaaaagaaaaacagaatttaagtgaatattgtgtcaagttttataaaataatagtataattataaaattgatgatggcaaaataatgtgtaaggttatgacaatagataacaattatttatataaaaaaaaaaatacataatattttactgcaaaaatagaaatttatgagctacaaggtactatttgttgtgatcatttgctaactatttcattacaattcatttcccttacttatatctcaaagaaagtattgctacagtacatatatttgtcgacgattaactatttcattataatatatattttcttggctaagtattgcaggagggattctaatttttggaatgcgagtatcccgagttctgccgcgtggggagcgagaggaatcttcgctactcatgatctcattcgtagagagagctactggttggtgggcaatggtcaaaatgtggacatctggagttcgccttgggtgccatggttagcgtgggatttctatgaggctgccttcaatccaatgatccgggggtctgagctgttgtatcttgatcagtttgttaatttggatagaagccttaatcttggtgatctctcgatttggttcaaaccagatttcttggagcaattggggagactattctttcttcctcctggctctcatgactcccttgtttgggaaaagttcactggacggaaacttctctgttaagtctgcctatactgctattactgagtgtagaaaaggggacttggatgtgctctttcaacaactatggaaaaccccattttttgaacgggttaaactttttatgtggaaagtgggcaaggacatccttccatgtggccagaggctctatgctctgtttggcaatacgtcttgttgtgtcctttgcgagaatgctgaggattcgctggaacacttgtttttccattgtcatatggctcgatattgttggtttaagagttcttgggggattcgtagcgatcttctctcctttgcttcgacaagagagattttgaattggatccttaaccctccatttggaggggatgttgacttgtttcagttctccctattcgcagcctccttgtgctatacactgtggaatgtgcgtaataaaaccttccatgataaactgatagcgaccccggagtccattttccagacggtgatgaagtctgtgcgtgagactagagattgtgtggcttcttctggatccttgcttcagcctactattgtgcctggtttggataggctgtggactgggtccttagttaatatctttgtggatgctgctatgagagggagtgaggctttccttgctattctttctttggatgaccaggggaggggagggcgatgaggccttttcggtgaagatttctgctggttcccctcttgaaggagaaactttgggcattttccatgctatttccagatgcatttcttgcaattggtcgagggtgagcatcttctctgattgtaaggtggctgttgatgcggtcttagcaaggaaaatttcgaattggaaactgtcttctctcttcctccaactttttaatttgtttgatggctttgtttcttgtaagctttgttggatttctcggttgttaaatgtcgcagctcactcgttggccactcgggttgcgtccctgaattttgtggtcttttttctgacatggatgtgtttgctgctatgaactctaattaggtagcttgtgtttgtttttttcctgctgttgcggtggctttctgctgctttgtgtttgttctctttcccaattgttgctggtttttaatgaagtttcatttaatcaaaaaaaaaaaacaatttcattatatacttctcattaagtgcaaatgatacaactactaattaacataaaatattagatctcgcataaatatgattccaaatatgatgtcaacaaaatacattgcatgctatatatgattcttagtggcaattgtgttaccagtggacttagttgaaggaaactctaggctcaagtatcctcaagttctttaaatttaaaatcttatatggaacttcgtctatctacaacaggcaatagctaagcaccaatgaaaaattgactaataaaataaactaccaatgagaccaaataaacttttaattcattaacataaatcataaattacgttaatttcattcttccattacaatgcataatatgtagtaaagtgcgcgcacacacatgtatcatcttgcatgtccaagtgaactactttccaattttaaagacaacatattgagaagtgacttgaaaatagcaccaggctattccgtgaatcttgttcctgaacagaatatttaaaaaattagtagttcacagcagcaagtttccaaataacctgcccaactaatcagcattcagcatcattaacaaacccctaacaaaacactcataatcaacttattcatcatacacaaattgatcaaattaagaaagaattatctgaaatgtttccactttaaatctacaaagttcctttaatcatgatgcatttagaacaatattgacattttaagaaaaaatatagtgctattaaatattttaaaacggaaaaatttcaagagcttacttgtctccgtctcctaagaggaagcaacttagattcatcccctatatcatccaatctctgtagatgagaaaatttaactttttacttgagagttagatttgtaacatgagaaaaaaaaatagaaaaattttcaacaatattgtttttccttgaaattttggaga

SEQ ID NO: 237653 - DNA, 1405 bp, Cannabis indica
tctaaaattttggtgataaaaccctcctaaacccaagttctgttagcacttagtctcttccatctatttttggctattaactgcatggtggaatgtctacgtgtacacagtatacacgtggtacaatttcattggtccatgtaaataaatatttaaaaaaaataaaaaatttatttttctttaaaaattaaaaaataatttaaaaaaaaaaattaaaaaaaaaacctaaataaaccctaatttcttttctttttattttatttctcaagaataaaccctaattttattaatcctaaccctaatttccatctcttcaacctttcccttccgcctccctgctctttcccagaaatctcaaacaaaaaaccatagccccattgcaaatcaagctctgtcgagccccaaggaacaagaaaagctcgacattgtctttgtcttcttggtgcgacacagcaattgcaggtgacccttcgcaatctctatccgcttattcaaaaagtgtctaatgctctaaacctccgagtaaattgacctgtaaaccccgtaacaacatcaatccaactcaaatattttctagggaaaaaatccccaaggctaaaagcctcaaaatcttccatgacctttctagtcagctctccaaatttgctcctaccattttcttcctcaaaactctgcccaagaatacatctagacactatgttgttagaagtggcaaccaacatctcactcagatttatacaacaaccttttctaataatcctattgaccaaaacatcagtctcttctttcctcaccaagtggaattgttgaacccttttgtgactcaagagttcgagaacacaaattttcctggcttgtctccaatactcaccgtaaggagcaaagcccacatcttgaccgccgtaacagaagatgtcggcggctgaggttttgggcctgtcggagaaaacgacgtcgtgcttcttaacgatctctttcaccatttctgaagatgagaccacaagggttgggacttggcccatttgcaagagcattaatgggccatatttggctgagagtgttcggagtgaacggtgcgggtgggttccgagaaggtgaaggttaccgatcagtggtaacctcggcggtgacggtggtaagttgaattgggtacgtgatctaaagcgtgtgaacaaaatgattaaagagatgaagaaaattgagatggggaagagcatgggatattgcattgtcttcgtcttcttggtgcgacacaacaatgtctagcttttcttgttccttggggctcgacagagcttgatctgcaatggggctatggttttttgtttgagatttctgggggaaaagagcagggaggcggaagggaaaggttgaagagatgggaattagggttaggattaataaa

SEQ ID NO: 237654 - DNA, 2669 bp, Cannabis indica
acatgctacaggcatgtgtactacactttcaaggatcgtgggtaaagtaccttcccttgatcgagttctcgtacaataatagatatcaggcaacaatcgggatggctccttatgaactattatatggtttgaaaatgcatatcacctattcactgggatgaagtaggtgagagaaagttcttgggtcccaaagctgttcagagaacaagtgaggcaattcataaaatcagagcgtgaatgctcgcggctcagagcagatagaagagttatgcaaatccaaagcatcgggatatttattttcaagttggagacatagtatttctttaagtatcgcctatgaaaggcattaaacgctttcgtaagaaaggaaaacttagcacgaggttcattggacctttagagatccttgagaggataaggcaagtagcgtacaggttggctatgcccgcagcgttggcagctatacatgatgtgtttcatgttttgatgctttggaaatatgtctcagatttgtcccatatactgagttatgaagtattggaacttctgccagatctttcatatgaggaacaacgagtgcaagtgctggacagaagagaaaaagtgttgagaaacaagacaattgcactgatcaaagtgttgtggaaaaatagcaaagtagaaaaggcaacctgcgaactcgagacagatatgtagcagaaatatccagagttgtttaggtaaatttcgagatgaaatttctataaggaggggataattgtaataccccaaggttaggaaatcggattaacaaaccctaactagttaaatgtgtattattgtggaattatattattatataatttaatatatatgaattctaatgataaatgacatgttaagactccattggtgagctaggggtatttttgtaattttcaccaaagaagggtaaaactgtaattttaatgctatagcgtgcttatggctatattattatatattatatttgatctgtctttctgcatgtattttttgacaagttggcgcggtgtagtcactactaggtctttgggatccgaaatacattttcaggattttatttttccattatataaataattaaggaatctaaaatttataaacattgtgtgtgtatgatttatgacaattacacccttgatgaatatttatgcttatttttgccttggagggcattttggtcatttgaccaactaattatgttttcaataaaatccaattttgagagaaatgaaatgcattttctgactttttcctatccctctagctgactcctctcttgcttcatactctctttgatttctttgttttggagaccaaaagctcagcaatttgggtgtaactcttggtgtttggagcctgactttttggtaacttctagttcttcctttgttgagtttaattgttgttaggtgaagcttcaaaatcatgttcttattggtgtttaaattgttggatgcatgtgtatgagatattggatgattgtgttgttttaagcttgattttgtgagttattctccttgttcattttgtctgtttttaagatttgaattgtagtttgaaattttggtattgaagcttaatttgtgtgatttttattctgaaatgttgggttcacaattgggttttgatgctttagtttccaagctttgaatttgtgtaaagattgtaacttgtattgattcttgaggagcttggttcaaatgcatgaattgatgttgttagagcttgttttaatgcttttagctctctagtatgttgattttaaattattgagatgtttatttgagttgagaatgctttggtttgaattttgggatgttttggtgcatttttgagttgctttatttgcatttttgggttttcaacccaggcaccgcggccccctcacgtgggcagattgcatgttaaacttgtattgttcataacttttcgatctgggctccatttggggtgctccaaatatctttggaaagctcgttccaatctctgtatgtttatttgtatttcaatgccaattatatgattatgtgaaagtggatttagggattaaccctatttgtgaatcctagtaattatgactaggattactggcacttgtgctggagcagtacttggggatttggaatctccatgtacttgagacatcaagtaagacagtagttagcacgtagagttaagcacggtggtgctaatgcttgatattataatggtgattaaatgagagcagggattagggttaataccctaaactgagcggttatatggccaagggttattaccctagtgattaatgattttaaatattatgccatgctatatatgttgagtaaagaattatgcgttcaaggcataattacgttagactctgtaattagaaccgagatagactgttctaaggccttattgtaaatacacgtgagagcgtaacacgtgggtctatgccacatagacatatgtaggcgtgtgagcataacacgcaggtctacgtcaaatagacaataagtataatgccattaataattatgtgttatatacattattgtagttaatgatatttatactgtcttgctgggcttggctcacgggtgctctatgttgggctttgtgccctaaataaaactctatttcaatgtaatcttttctat

SEQ ID NO: 237655 - DNA, 1148 bp, Cannabis indica
acttgagcaagggccctgtactccgattcagtgctcgagcgagatacaacaacttgtttcttggatgaccatgacactagtgtatctccaaaatacacacagtaaccagccactgactttctatcatctgggcaacaagcccaatcagcatcagaaaaccctgttagagtcaacctctcactgtatttgatgtgcaaaccatgattgagagtaccctttaggtatctaagaattcttttggctgcagaccaatgacaatctgtgggagctttcaagaactgactcaatttgtttacagcaaagctgagatcaggtcttgtatgagtcaagtactgtaaaccaccaattaagctcctgtattctgttggatttttgagtaagtttccatcagtaatggacaaagtcttaccaactgacataggagtgggacatggcttcagatgtgtcatgttgttcttctttaataactctgttatgtatttggcttgtgataaaaacatccctgtgtcatccctgtatacctcaatgccgagaaagtaatttaaggacccaagatccttcaatgcaaaaactagattcagcttgttgatgaagagctttaatttttctgaattgttgccggtgatgattatatcatctacatagatgaggacaagtagaatttcactttctgttttgtagaaaaacagtgaggagtcagccttggaattgacaaaattccaactcaacaatgtttgtttcagcttgtcgaaccacgctctcggtgcctgccttagcccatataaactctttgtcaacttacacacatattcggggtgatctttgtcttcaaaaccaggtggctgcttcatataaacatcttcattcagagtaccattcaaaaaagcgttgtttatgtcgagttgtctaacctcccaggattttgctacagcaatggttagaacaattcgaattgtgcaagctttcacaactggactaaatgtttcaccataatcaacaccaggtctttgactgaatccttttgcaaccaatctccctttgaatctttgaaaactaccatctgcatttaattttactctgtaaacccatttgttgtcgacaatatacattccaggtaaccttggaactaaaatccaagtgttgttttt

SEQ ID NO: 237656 - DNA, 1297 bp, Cannabis indica
taacatttgcaaagtcatcaggtgaaaagttgctttgtaaaaacctactcttgaatcttcaactagtaataaccagatcaaagaacgatctcagaaaagacagtccttccctaaaattaatcatcatatcttctatccttgacaagtgaatagttattcttcacaaataaaactggtgtactccagaatgaaatactcaaactagcaatttcaagcccaacctttcctacactgaattttcacccctttcagttctataattaccatctaatttggaactttaattcaagttttactcctattatcacttcaattcagattcaatttctcgctttaccaataaccctggtggctcttttgaaaaggcatctagaaacccttggaccacaagattgtgtctcaatttcactaatgttccctttgtaatattcaacacactagctaaatattgatacatccatcccataataaaccttatgccttaaatgccacgattaatggattttagccttgaaccttgcccaagaacacgaatgggtcctcaccttctgattcaagagttaccatcttcctttctcaatcgatgtttgcattatactttacaagtcaatccaattcccaacattacctcaaaatcctctaagttagttcaactaaaacaaccaaccattcccttttttcccataactcgggaagggattaaaccacctactagaaaaataaccagtttttgaataaacagtaaagtaccggagccacttgataacacatcattaatttatacaaactttcaatcatcattctattctggttgctgtaactatggacagtttctttctaaatggcccattacaccaccttaaaagcaggctcaagtttagcatttatcctaatggcatctcttgcatctcaatccgatggatgggtttacaaatcttcgttcccatcacattagaaaagctttaactaccttaaattctcctactagaacccataactagtgggttagtaataatttttttccttgagatcattagggttaacaccctttacttgatccaacattggacatttactttcatgaatctgtcttcatactatctcctttgtgatctagtccttgcaccctcagcagtaagggttatctcaaccacccgatcataaaactagacaactcctagttgtttagccattatatctatattcaaagcaatttactcattccaccttaaagtcttcctagcggctttagcaaccacttcattaaaacaaaacttataccgtcgtgacatctttg

SEQ ID NO: 237657 - DNA, 1199 bp, Cannabis indica
taatttttttagtgacccacacttttatgcgtgtcactatatagtgtcactaaaagcctaatttgtagtagtgagctgaatatctaatggctcgtattttataggaatgtattatgaacgaggcaccaaaatgccttgaaaagataatacttaacctaagatatgaatagaagacctaactattcatataagcaatcaaaaatgtacaaagtaattcacaagataaattatttatttcaagtatgtttaagtttgcataaagtagattataactgtttacgcgaagtagaactaataaactgctcatgaatagaaaacatggcagacaataaatgctcgcatgcattttagattattaactacttaagagatatcaaaggaaaaacaagatcaatagaaatacctacatagaatatcttaagtttgatcaaagtataattgtttaagttgtgaataaaaatacaaacaagcgaatatattaaatcaaatgtaaagatgcgaggcaataaataaaagataaaatgaaagtaaagttggtcatccaataatgcaaatttgtctttgtaataaaaaaatgccacaaggggcaaaccattatcttggccatatggctattttcctatatataaaaaaatgcaaattaaaaaccaagcctacattgtaggagacttggacatatcttcttgttcctcctcaacctcttcatcctcgccaagttcttctctccttgttttctcagatagggcatgcatggcctcgactccttcacccaaaaagctaaagtccatatcagggtttgccgaccaggtctgataaatggttctcctggcgatgctgttgaccccatctttggtttcagcctcaatctctttgagccttttgtcatggtcagcttggagagatttaagggaatcctcgagctccttgatcctcttctagtcagcttggtgtttcttttcttcctcttcctttgcgtgagaaacctcggcctcaaaatcattccactttttggctaaagtgtccctatgttcctggtcggcaaagctcagtctcgagcattgtagcctactaagatgacctatgatgtgtggcaaaggagaaaagagatgccttcgagaaggaagcaaattaaaaatagtaaaactgataaaatggggaaaagtgagaacaaggaggaagggaaattaacctgatgcaaa

SEQ ID NO: 237658 - DNA, 1161 bp, Cannabis indica
aaaaaaatgtgaaaaaataactctaatttttagagttatcatgaacaaagctttacttgccaagatagcttggagccttgcaaaaaaatgaagagagaccctgggtcacctgtttgttgtgaaagtattgcaagcatgaaaactttgaaaaagtgcaacaaaagagtagggattcttatcagtggaagtgtatcttggaggtgagagaaacaatagcaaaatgatcgatctctatcgctgctagtggtgaatttatggttggaccttcaagagtttatggatacaatggatgaactcaagagtaagcgtttcacggttcaaactttagctgatatgtccataggcaacaattggaatgaagaaatggtagttcaaatttggagaagaagtgggaatcatattctaaaaattccaagaattgcccatccttttaaggatcaactcttttggaaaaataagcaaaatggtcagttctcagttaaagatgcttattgtgtagatcaagcttggaggtttgctcctacaagagacatttggaagttgatttgggatgcaagaatccaccccagaatctcagttttcctttagagaattctcacagaagacaaattgtcttttattttacacaaggagtgttatttgtgtggtgagctggaagaatgtggtcttcatctttttagagattataactttttgaaagcattgtggtttgtggggaggtttcctatgcagattaggactataccaggaagttcgatgattcattttatggagaatttaattacaaactctcacgcgataaacaagaatgaaatcatcatgtttgcaagttgtctttttgctgaattttggcatcagagaaatgagctttgcttgagaggtgctggtgccagtctcttaattgttattggtaaggtgaaagatgctctgtcatctttcactagtttatctaatatcaacaacaattaagaaagtgaaatggcagcaacttcttgtctattgagggaaatgacaatagccttttgtcctagtgaggaagagttattaaacaatgtattgttcactgatgcaccttgagttaaaggggaagctagtattgttgcagtgaggattggtagagctactggtatgtgggtgctgcgataatttgcacacgcaagt

SEQ ID NO: 237659 - DNA, 1820 bp, Cannabis indica
caggacctcccagaaagactggaagggccagcttgcaaaacctttcgtacaatggttccatccgattcactgcagcaattggccacgcttgcacaacacaggtacgagccatctgcattttaggagcaagcactataggagcaccatgctgcctcaagcgtctgatttcttcatcttgctcattgatcctggcttgcattgctacaaacttattttcccattctaaagtaacttaaggcaggttaatatctccccgacttcttaccctgcctctagggcctctgccttggcaacgtatattcgagggaatctgaactccctgactacaattggattcgactgagttaccctagctcctcgtgttttgcccaatgtctattctattagaatagcctgcgaaacaaagagctagcctggtcagatcgcgatcaagaataatttactatttaccacttattttggaaattaaaaaatgtacctcttcaaatatcaggctactaacatgcttcctatcatgattttcttataacatactaataaaataaactactaaggcaataaatgcttactaagccgtgagtcgagttgatcgctgatgatgattgtaaatgtcgtgacaatcattagaagacaacctgccaaacttagtttaggcatgataacgtgattttaacttagttgtgcagctcgtttctagtcaacgagtttaatgaaaaatatgattaattaaaacttttattaatttcttataattactaaaatattaacatatatataatcgggatcccgtttacaaaatatttacagaagtttcatagtgcatagtacaaaaattgtcgtctagcgactagacaaaatacaactggctgtccccaaaggtcgtacgatccaggcctaaccgcccaaacatgtacaatctccatccactcgctctcacaactgctcagccttagcctcgcccttacctatacatgcacaaaatatctgtgagtcgatacactcagtaagaaaagcataatcaataacacaattctaacctggattataatcaggtacctgtaaacccaattacaatcctatccccgtgtcccacacggtactgagtctagagcgtttgtttgacagtactattgactataataacatatactgtcaatattcactacatctctatgtacactaatatcactattaaaataggttatctaacatgcattcataaacaagcatgctaaacatataataacatattcatatcattattttaatcttacctcgtttccgaattcaggtgtgttggccaacttgagtggatcagctgctcgacgatttacatgcccctaaatcatattattcggacaattagtgagtgatacgctaaatcacttttaacttactaccatttattagttaataattagttaattttactactatttattaaataatttactaaatatattttaaattaaataaaaattaattaagtctaataaaatagtaatataataatttactatttattaaatatatataattgtaagacctacattaatatataaaataaaactatatatattttcttaataataaaattatatttaaataagtaaatactaattttttagttctttcatacatgaaaaattatgtattaatatctttttatatatggttatatatgattatatatatatattaagtagtgcaaaatttttaaaaattcaggggggccacagcccctataggggtgtatgtggctccgcccctgattggatatagctcacgctctaaacatcataagttagttcatgtccaat

SEQ ID NO: 237660 - DNA, 850 bp, Cannabis indica
catgtttcatcgagagaacaacttgcagacattctaactaaggctttgtttcctaactaattcaaggcacttaaagacaagatgggattggtgaatatatatcatccatcttgagggggagtattaagaagttagttgcttagctgtcttgagttaattagtacaagttgttagacgttgttagagttagttagattctgttaattttgttagtctctcgattgagcattgtaactataaaaggtattgtactctatttttcctcgattgatgaatacacaaagattttcttctctctttcttttttctgtctttgctaatagatagtgggtagatactaatgcaaaaatggactagtgtaattgggctagtgattacatgtatgaaagttcaaggagttatttcgcttatagaggcgtctctgccaagaatgccaaaacatcgatcaaacgccaaattagagagaatgctctctctattagagtatagatacttcttattctgttttggtggttgagattgttgtttttttatttggatttgtttgattgattcgagatgttcagagagaggagaagggtgtagagaaagccattagagaagctgtcaagagaaatgacatgggctcagccaagatattgcttatgaaaacttctaattccatgtttttctaattatataacaatgcaatattatgacttactgaaatgctaatacatggttgaacttttggattaagatttgggctatcatagtttcagttatgattgggatcagtaattcagtgtatcacttttgtttactttagggttttggttcttttgcttgttaaagtagtgtttaaatgtac

SEQ ID NO: 237661 - DNA, 840 bp, Cannabis indica
agcctaatgaatttaggtttaagatccctgtctatgtatctctttcattggcaatacttggagaaaaaaacaaaatttcctatttggaattcgataatcctacgctttaaatcagtgtaacttttttagtttattcaatgaagcgagcatacaactcgaattcactctatgattttataagttttgtggatttttttggtccattgctattcttttctcacctgtattactccagtcaacatgtgtttagtatttctctcataccagacttattaaagtacctaattaatggtacatttaattatcatctttaaacaaacactccttcagtggaagagattatttcaagataatctattctttatcaattatgttcacaacctatttctaatattctattgatcctcccagattatccatctttcaaaaatagaacctcacactatttttgctttaatctccataattctcaataactttctttaactcttaacatcatcacagcgaaagatatcaattttggggatttcataaaattagactatttcttcgtatgaacttcatatcctcatttattttataaattgtttgcactgatagataacatattaaattggtatgtccgaccattactacacgaccaaaatcataagatctcacagttcataattcataattatgtctttctattcctcctatgggacctcctaagctgatgtactgattttacttattaacaagctaaatattcatttctgatagattgaaatattcaattatagcattccttacttccatccaataatatatactcatctcgagaccttctaaatccttact

SEQ ID NO: 237662 - DNA, 1013 bp, Cannabis indica
aagtccacccaattcagaaacccatatgatgaaaaaaaatcttttaattacacatattcttttaataggttttaaaaataatatctatttttataattagagcctaaaaaacttattttttctaacgcacaatacaagtgaggccgacactgtttgagacttatacaaacatcaccaaatggcaaagtaattaatcctaaatggattttttgttaatcaaaaaacaaaactctaaaaaatcatagatacaccacaacaaattttaccattactcaaaataaaatttatgattaaaataaaaaaaaaattataactaattataaattatcattcttatataataagtaaaaagtctatagctcatgtcaaaaaaaatatgtaactaaatatattaattataaaaattataatttattgtaaataaatatattttagttacaatatttattgtaaataaattaattattaataatttatatttaaattataaataatttttattgtaattaaaattcacatttaattataaaaaaaaattatatagtgattataaaaaaataaaaaggaaaaatgagaataatttaatcagcccacgtgaaggtgagaatatatatgtaataaataaataaataaatagtatgagatgatgggacattaattgtggttttaaatatataattaggtgtatatgtatagtttgtacggacaaacagaataagtgaacacttataaaatgaacagaaaagtactgaactgatcagctacacataataataacaacataacatacgtaaatgaagttactttattactttacgtagtgtatgagttttacttccaatcttaacctatcatctattattacttacttcctacatatattttatgaatttcttttataattataatgactaagaaattggattgattaccattttaattgacatgatgaattggaatcgaattgacattgtttagttactaattacaatattaaatcggaagtagattat

SEQ ID NO: 237663 - DNA, 849 bp, Cannabis indica
gtctttcttggattcccttaaatcttttaggttgtactaataataattcgggggtccaatagtgatatgctcatctggtttcgacctaacacaatggcgatctgcatggtctcccatataaggcctcataaggagccatgcctatactatcttggtagctattattgtatgtgaattccaccagtgacatgtgttctccccacctacctccaaaatctaaaatacaagagtgaagcatgtcttccaaagtctatatggtcctctcagactgtccatctgtctatggacacttctacaaaaatggcctttcgcttcagtttttaagtgacatataaaaaatttgcgtcggtttgtgtaaccaacgctataaccatagacacaaatagtcatattttttgcttcacttagtaacagacgctaaaagatttttgctacaatttataactgaagcaaatagtaaagccctaatgcaaattagttttttgcttcgattatgaacctaggcaaaagaacaaaaaaataaaaaaaaaaacataaacttttagatcaccacaacccttcgaaccaccacaacaacccaacaaaaacaaaaacaacaacaacaacaacaacaataaataccgccaccacaataacccatcgtaccaccaaaagcacatcgaaccaccaccatcgcaccaaaccaccaccatcccaccggaccaccaccactacctgcaaaaaattagagagaacacgagcgagaaagagagaaaccatagctagagctaagcacacgagacggggaacgagaaaaaaataatgaatcttacctttaaaaactccattttcttgagagagagagagaga

SEQ ID NO: 237664 - DNA, 1025 bp, Cannabis indica
actcactaggtctgatgttgcttttattgtaaaccaactcagccagtttattcatgcaccaacaactgtgcattaggaggcttgcaaacgattattcagatacttaacagggacaattcatgagggattacacatcaaactatgcctgaggctttcactttaagggtactctgatgttgattgggccagctgccctgatgacagaaggtccattaggggatatgccatatttattggtgaaaatctcttttcatgatttgcaaaaaagcaacatgttgttactcgtagcagcatagaaagtgagtgttgttctttggccaatacagtagctgaaataaagtggttgtcctcaattcaatccgaacttaaagtgtctttaccagctacaccaataatttgggtggacaatcaaggtgctgcccctcttgtagcaaatcctgtttttcatgctcgattgaaatatatagaaatcgatctccatttgtttgagaccaattacttgcaggacaattgaatgttcgttatgttccatccattgactagactatcgatatacttacaaaggccttgtccaaggatcgattcaattatctaaaatccaaactctgtgtgtgtaacacactctttcgtttgaggggagataatacagtcaccaactattaatctttgttagttagttgtttcagtttttcttaactgttttgttgtaacaattaactattttcattgaaccttttctttacacttgtatccttgtaatctctaatctagaaataaaggcctctcactctttagtctgcaacttttgtagactagtgagtttgttgtattcatcactctgttcaatttgcattgataagttgaacttttaaggtcgttaaaaatgtcccttgaactattgagattgttggatttaaggatttttatctaatttcatccaattttactattttagtaattatttatgtactaaaccatgctccccagactttgatatctaccaaatcatgcccctcaaactttga

SEQ ID NO: 237665 - DNA, 1803 bp, Cannabis indica
ttgattaagtgaaccaaaacatacacaaatgaatgaaaaatacttttgttactttattgatattgaataatctggattagattgaaatagagttttatttagggcataaaacccaacacttctttcttcccatttgcttgaggatgggccacgacagacaagcttttaatgatcccatgtctgttgcagaaatcagtgaacatgtcactgtcaattgctttccgttgtttgacacaatcttctgtggtagtccaaaccgacatatgatgttcttgacaacaaagtcgaggactttcttggaagttattgtttctatgggtttagcttctgcccacttggtaaagtagtttacaatgactacgacatactacacacctctttttccctttaagagttgactaatcaggactatttcccatacaacaaagggccaaggatattgcatcattgtgagctcgtttggtggagctctagggatcttcgagaatctttggcactagtcacattttttgacatagtccatcaaatccttgatcattgttggccaaaagtacccctgtcagaatatcttcttagataggctttgcccctggcatgattgctgcagaagtcttcatgcactctatcattaaatgctcgacttctgtcttagtgacacatcttaagagtggcattgagaagcctcgtcagtactttattccatctaggattagatacctaacatcttttctgctcatcttttctgctcatcttttttgcctcattttgttttcagacaaggctccagtttggaggtaagctacaataggtgtcatctaggttggaatatcgtctaacatgtcgacttctttagggatgtaatgctacattctttcaagaactgtagtggcaccaagttttccttatcgacaatggtgctgcttgccagacgggcaactgcatctactgtggaatttgttctctagggatctaccttattgtatagcctgagcctacttatcaagtcttagatcgtgctcaaatatgccatcattcattcacataaagttgtgcactcacccaggacttgatttacgactaactgagagtcgctatatatgttcaggtggtcagcccgtacttcatgtgccagcttaatgccaacgatcaaggctccatattcaacatcattattataggctttgaaaccaaacttgattgctccgtgcagttactgcccctaggtgttttgagggcaatgcctacaccgcacagtaggtcagtgcagcttccataaacatgtagttttcgtgtggattctttaggtttttgcaactggtcttgctcttgcttattctttgactcttacttttcccctaaatcttaaaggattttaggagatatgcttttacattcaaccacaaagtctgcaagggcttggccttttatggccattctaagttgatatgtgatatcaaatgggccatgtttaatggcccacttaagtagcggctagatgcttcaggtttttacagaacctaccgcaatggttggtcagtttacacctttattgggtgagcttggaagtatggcctatactttctagatgttaagagtaagttgtatgttagtttctccatgagtgggtattgactttcggcatcgataagtctcttgttgatgtagtaactggatgttgtatatcatcttcttctattattaagactgcactcacaaaatgttttgtgatagccaggttcacgcctagctcttcattatccagaggttttgataggatcagaggttatccagttgttttttaag

SEQ ID NO: 237666 - DNA, 1814 bp, Cannabis indica
tttacactgaagaacacaaatgacttcgagaaattaaccacctcgccataagccatttcaaaatccttcagcaaattcagcacatttgtagtgtcattctcattggcacaacaaaataaatagctatcacccgcgaataacatgtgcaatatgaaaggagcacaattcgcaacttgaatgccttaattaataatgaaaaagcttaagcacagattaaaaacaagtatgaagacaaaggatcaccttggcatattcctctagacaggaaaataagacctatttgtctcccactatgagtgatcatgtattaaacagatgtaatgcattgaagcacaagaaaaatccactttggatcgaaccccattctttgaagtacaacttcaagaaatgtccactcaactttgtcatatgctttgctgaaatcaagtttgaaagccatatacccttccttgcccgctcttttacgctgaagataatgcatgacctcatatgaaatcatgatattatcagtgatgaatctccctggaataaaagcgctttgtgtatctgatatcagctgagaaagcaccaccttaagatgattggccatgactttggagatgatcttgtacaaaatattacacaaagagattagcctcaattcccccatattagttggatttttcttcttcgggacaagaacaatatgtgtgtgatacagcctaggaggaagagaaacatttgagaaattttttcgaactagaagtattacatcatgcttcacaatgctccaatatttttgataaaatactggtttcatgccatcgggacctggtgatttttcaggatgcatttgaaagagagcttttcgaatttcatcatccgagacagtgtttaaaaggtcctcattctattgggtagttatcgtgctaggaatattaccaagaacaccagcaacattggcattagaggaataatatagttgatcaaaatagcttttaataacctcagaaagtcctgggttccagtcaaaccaattactagaagagtcttgtaacttggtaattacattatgtcatttacgggttgttgcagcagcatggtaaaactgactattgtgatcaccttcacgcaaccaaagttgcttagatcttttgcgccaaaatacctctctttgagcataaacctcaaataattccttctcagcttctttaaaggctgaaatggagttatcatctctgcctcctttgtactttgctatcttttttttttcaatattgaattctatttttgaagttctgagtgtagctcttatcccaatcagcaaggtgctttccacatagagcaactttatccataatatccaaagaattaccaatatcccaactctccttaaccacttggatacacaatggatctctaagccaagaattttcaaatctaaaacacgtaacttcagaattaaaggtcttcacagttggttcaagaaggattggacagtggtcagagctagacacttccaaatttataagcttagctgagctaaaaatgtttaaccaactttgagatacaagggctctatccaaccttacctcaatccaatttaaagtccctctacccttctcctaagtgtatggctaccctgagagatcaagatcacacaaactgctgtcctccagggattgatggaagccatcgtttaactagtcagggtatggaatctcccctttcttatcatcatgtgataatacattattgaggtcaccaataacacaccaaggaagattgttgttagcagaaagggtgcgcagcaagttccaagttcaaaaccgtaa

SEQ ID NO: 237667 - DNA, 1227 bp, Cannabis indica
tttcaaggcaaggtatttctctagtggctcttttcttgcagcttcattgggaagtaatccaagctatatttggagaagcgtttatgaagccaaggagctggttcgggctggggtgcgccgacttctcggcgatggatctaacattggtattctgtcagaaccctggctacctaatgagttacatccgtacattgaatcaagccacccagctttattagggaatactgtgaatgcattgatgaaggatggcatggttgagtgggatgaagaagttatcaaagatgttttgagtgacagggatcaaaagttggtctggaaagtgccgttaagtaatcattcaagaagggattcctggtattggatgcaagatgactctgggctctttacagttaagagtgcgtattctttgctacaggccgctaaaacaagcagtaatgtaccgaataattcaaggttctggcgccagttgtggcagttgaaacttccccccaaggtggtaaatttcttatggagggtctctacaaacagtctaccaacaaggttccaactttaacaaaaaatatcccaattgatcctcgttgtcccttctgtttggcagcaccagaaacagctttgcatgttcttgttcggtgtagctttgctcaaagctgttggagccgaagtcatgtaccttatgttgcacctggagcgatggtgtttactagctggtttgagggtggtttgaaggcatggaatgtagcagaaagtcttgaagcagcaatgatattgtggtcaatttggaagcatcgcaatgagttggtgtggaactccaaacagcaagattccaacgaggttctgagtgtggctaaactgaactatgtggactggattgatgctaggaacaagcttgttgtggctgctgaaagctgtgttgtgggtggtgttgataaatggacggcaccagactttccattcgttaaagtcaacgtggatggagcgttgttttctagtcatgggaggtatggagtgggattggttgctagaactgttgctggtatagtgatggcggcaagaactttgtgcaaagggggcgatttgcaacctcatatagtcgaagccattggtatcaaagaggctttgtcctggagtaaggcgaatggatggacaagtgttatagttgagtctgattgtttaaaagtcattagtgatttacaaaagccaaaatatatggtctctccttatggtcat

SEQ ID NO: 237668 - DNA, 584 bp, Cannabis indica
ttcatatttaggatgttaatgaatcatatttgttagtaaatctagatcctagtaaaatactctcaacaccttcctccctctttggtactacttcaaagactacataaagcacattggggttgccccattccagctgactcccatctccttcaggattgtcgctagtttgaaagtcttgtacacaattatgaattgcgggtgtcccacacccgtagagattgagtatctttacttaattaacgtcgttccatcgaggaagaatgtcgtagtgggatttttctttcttggtactcacgctagcgagccaaaaattatcgtagacttgcaaaataaggtgtctttcaagggaaacttctttgtaagtgattgttctcttcttacttatttacatcaatcttcctttttcaagtaattgatgaatgttttgtttgttctgacagctcttctgacaaaacctactcctacccctgagatggttagtaggcagagacgcttgataactctcccttaaggtctctgatcatgcaaattccttctgaacgaagttaactggcgatcggggggctttctcgctgataaagaat

SEQ ID NO: 237669 - DNA, 974 bp, Cannabis indica
gtcagagattttcacaactggcggtgttgatcttggtagttgcatgggaatgatgtctgtgatatgttttttggacaacatacaagacagacttcttccctgtaagatgacttgatcacttaatcatctcatgagatggatgtgcatcacacgtctaatttatttatgaataatgcatatttttgtcttgcttgtgataattatttttgtaattattatcctgtatttgttgattttacttatgatttcgctatgttaattttggattactgctgaaatactgtgttggggtgaaattgatttaggtagtaattattattattattttgaatttttgatgaggaacatgttgcatctgaattggtattttggttaaatttttggagtaggtttaagtatggtaattctgttcttgtgaaaacctttctggttgtaaagttattctaactccaaattgctcttaatagttgaaatttgcttaacctgaatacaagacttttgtcaaactatagtgtctgtgatgaagttttgaattttattatattcttatgtgcaaagttttcttgttatgagtgcagcttgtgaagtcttggaaatcttaggaatggtttgaatttataattatgtatgtacttttcctttacaggaagaactcaagaatactactagtaaaatggcagaataaagtaaggttcttaatactcctggtgccgaaaaacaaaccaagagggagccgtcaagtcgatgcttagtcgacacaagcttcagttcttggtatattgacatcttattgtttgttttatatgatgacatattgttagatgcccaagttgtaggtgtaagattttgtccattcctttttgtattgcaagtgattttttctatgcttcaaaacttaattgaatagattctattaacaattttggtattatgtgattaatagattcgatcactaattttatataagctttaaa

SEQ ID NO: 237670 - DNA, 993 bp, Cannabis indica
tggaaaaaatactttgggatgaatgggaaaaagttcgcaacaacagccatgtctttgtttatccatcaggaccacatattgccaacatgatgcaaaattgatgcaaaattgaacgagaataagaaaatagttttcgatcccacctttcaactctacggatccctagaagcacctttcagagaaagttcagagtacatggatctccaaaagattatttttgagaaaaacgagactattccaccagatatttggctaaaaataaaagaatgatacccaatgggaaatgtttccctcaaattattcacgacgcatagcaaagactctagaaaaattctaaatttttgaaaatagtcacaattaggttcaagcccctaaaacaaagaagaaaaattcatcactatttaaagaaacagacactgtaggggtcctactccgtaagataagcattttcgaagattcacaagatccatacatggaccaagaaatcaacgaggatccctatctctttcagtacaatggacttgaatgggagattgtttattgtgaatatcatgtgcgtccaccagttggaagtgatgaagatgataaaccatcaggttagcacccacttcaggaggaccccaattatgactcaaactacaatgctaaccacgagccaattattgaccgtaaataagtagagcaaagcgattccatatctcttacttgtgtaagataacaataaatggaaaaattattgatagtcatgatatttgtaggaattttttcttatcgtttgtttgtcgatttattgttttctatgtttgtcagtttctccattttttcatttgttgtcagattgtcctttctctatttgtcatttcgttggtttgtttatttgttgtccatttatccttttgtatgtttgtttgtttgtaggaaattttttggaagtttcttattttgtaccctaccccatgaaaatggctatatatagagccatccttttcattg

SEQ ID NO: 237671 - DNA, 1261 bp, Cannabis indica
aaactaaggtcatatttccaagctcacaaagtcaaggtactaactgagcaaccactagagcaagttttgatgaagccagaagcatcagggtgcctacttaagtagggagttgaactaggttagtttgagatcacctaccatccttgaacaaaaatcaaagggtaggcattagaagacttcattgctaaatgaactagccttgaagaagacgatcgcatagactgcaactcaggaggacattggaccttcttggaaactctatgtagatggatcctccaacgagcacagttctggtgttggactcatcttaattgctccgggaggatttcaaacccacataaaattgtagtttgagttcaccacaacaaataatgaagtggagtacgaggtactcctagcaaggctatgattagcactagcaatcaaagtcgagtgtgaggattaattttgagtcttttttatagtctaatttagggtgtattttagtaatcttattattttattgttcaaatttatggttggttttagttttattttttgttaaggagaaatgattggagatccttaattttgataatgagaaaatctaatgaaaaaaggaaactttttttagcttagagtaattttgtattgccttaaatgggtcaaatattctttcttagctccaaaatttatggtctagagtcaagagtgatcactttccaaaaataaattgaaaaattctaagttttagatattgaacatgctctgtttgtatttgaaactcaaagctaatttttggctatgatctattcatttgtaggaaaaacattctaaacgaaagttctagatatattttttatctacccaaaacattttgaatcttctaattccaagctatatcatgagagttatggttaaaagactatcagttgttgcactaggaaactgcaaaaatcaacgaagaaaagaggaaatcgcttgtaaggccgcgaccttagttttttttttttttgggaacttggattttttcatataaaaagaggactgatggaaaagttttgataccattcgaaaattgggaggaattctgagtgtagaaggagagcaaagaaaaaaaggcaccagtggaggactccaacagtattctatctcttcatctctatcttttatgtctttaattaaatttcttttattttaaaatgtttattagtggctaagttctttgaaggattattatgttaaccattttgagttttattttatggattaatgtgattat

SEQ ID NO: 237672 - DNA, 2990 bp, Cannabis indica
ttggaaccacagagtacggattagatgatcacccttaaatatacccccttgaaatgggtgcagtgatgcacccttatctattttggtatctaaaaaaatatttaatctaaattttgttatgatcgtaaacgttgtagttatttaatatatttgacaaaattttaaaaaaattcaaaataaaattaacacgtcgaaaataagacgtgatttttttttttacttttatatgcaaataaaattaacagtttaaacattaatttttatattataaattattaaatttctcaaaattttataaaatatatatttttttaaataaattttaggataaatactattttggaccttctattttgcaaaagttacagattggaccgtgtgttttgttaaatgacaaaatagaccttatattttctaaaatggtaaaaataggacccttagcttaattttagacaacttttttttaaatacaaccaacttgaagacaattctaatacgaacagatacaaaaaaaatataaatagttttgttatagcacttttagatcggattataattaaaactttaaaaatcaattcaggattctatttgtactattttagaaaatatagggtctattttgtcatttaacaaaacacaagatccaattaataacttttgcaaaatacagagtcaaaaataatatttaccttaaattttatataacaaatataggatcattataataatacccaaaaatacatgtacaagacatttattgcactgtggatatgatttattacatcctaaccacccagtattggccggtcctaacatctaagacaaaatcaaattttggaaatagttgaattgttattatttaatactaataatactgtaattttgactagtattttcctacaaaatttcattactaatattcaatgctatccttagctataatccgataatcagagagcccattacaatggctcatgtctcatgatttaactaaagtttgagatacacttaaatagagagatggtaatgatccatatccactttcatgtatcattcttagttttctcaaaattaaaaattaaaaacaaaacgtatcaccctaattttcgtttttatttaccaaaatgaaatttgaatttgataccaattttaatcatatctttataactattttatatccaaaaaaaaaacaattacaaaattaaacctttccttcttccctccataattcacaacccaaagaaagaaaaaaaaaaatactaacaacgcattatatgagttgtattgctaaaataactcccaatcccaaatccaaaaccatcaatagaagaagaaggagaaggagatgatgataatgaagatgaagatccaattctcaaaaccctaagcaaatccaaacacatactcctcactctgtgaccctcacagtacccgctctgcatcaccatcagaatcttcgcaattccattgctgttcaccaccgcctccttcgtcttattctcccccaataagcagcacacgctccaaaccaccgccaccgcgtcctctgtcgccgacctcgacaccttcatcattctctccacgattgccaccgcacacctacagtctactccgattgctgatcttccctccgctgtcgttgaaacgattgagagaagcttcagagccttttcgtttgccggtttgggcgaatttcggttcgagagcgtcttcgttaggagatccaccagtcctgatccgacgagctctgctttggttgaacgagttactgaaacttcgatcaggcatgagtaaacggcgtcgtgtagggcgaaatctgaatcggtacggacgatttggagtagttcgttgaggaggttactgttttcggcgattgcgcgtttggattcggcgtcgagagcgatcgttttcaaaagtttgaccgattcgattttcgatctcgtacttccgtttttcaagaacgaccgaatagtggttagaaaactctggaatcgcttcgaaacagatgcgtgaacttgtttcctcactgaattatccatagaaatcgaatccaacaccctaacagccaactccataacttccatttccgcagttcccctacacaaaactccgacaatagccgaaacaaaattctcaaaattcgccaggattcttctattctcgtccccaaagctcgcgaaatcaacaatggcagacaagcaatcaacgacaaacactttcgcactttcgttttgattctccaaatgatgaaccagagtccgtacctgttgttcggagacggaacgagagtaggtaggagaagaggagggcgaaggaggaccgttggtttgagcccaaaggttaatcaaacggcggagagtgaggttggggatgaaatccttggaagggagggtttgcatggtagctggacaggtgtcgtgacctgcgtcgagccagtgctgaatacttgttcgatcgtatgtgacgccggtgcagagacttacgggagacctcatcacgtccatcgatatgggacacctgaaaaggttgggtacggttatgtgcagttcttctcctttaaccatttttatgatcttctctacggttagagagagagagagagagattatgaagatgtggaaggaggaaacgataaagtatggtatggttttgaggggttttttatggagagggaaggctgatgtgacgtcgttttgactgaagaatgattggtttagtctaagatggggcccactagacttctttttaatgacttatgactgtaaaaaaataataaagtaatgaaaacacgtgtgtaggtacatacgcgtgtgggataggtgattggggtggaaagttgaaacgtgaaaaatggtgtaagaaagagaaggaaaggggtaatgcaaaggcctaactaactaataatatctttgaatattctcacgcctaatatgaccgacttcacttctctgtatattaccagcataataataacagtgtatttgctccct

SEQ ID NO: 237673 - DNA, 1455 bp, Cannabis indica
ttcattgtatctttattatttgatatgtttctctttatagacttattgtacatgttatatatactgctttatatcagaaataatataacacagaaaaaacatttttccctaaatctgtcaactgtgttactcctattttgatctaacgctgttttacaatagggtataaaagacaagaacattactctatttcatcattcactactagaaaattgggttttagtgacacacattgagtaactctaaaagtgtatagtgacacttcaacgctggtcactaatgagagtgactggaaaaacgatttttagtgacacttcacacgtgtcactgaaaccttttccattcacttttggcgtgtcactatagacgtatagagtcaggtttttattattatttttggatatgtagtgacacacaaaaagtgccactatatttaatatttttctagaaaaaatataatatttatttttttaaattcaaatttaatataatataaatgataatttaaataattatatattaatacaattaaatatataaataataatttaaattaactaaatacaaacaatactaaatttcaattaaaataataaaactaaaaaactaaaaaacaaaatacaaagctgaaaatttttatttttattaagattactaactaaaataatacaatctttacacacaattttacactcaaattacaactgatatgaaacttaatacaactcatatctgtttctattaaaaaaatacaaaaacgtgaaacaaaatccagatcagattatttctccggtgtgcatttagaatgaaataatcccaaatcactttcaaaatattacaaaatgtacactttgaacaaaataaacctaaacaacaaaaacaaactcagatctaaagtctacactatcaaccacacactgtcaaacatggctttagaatgaaataatcccaaatccatgtttgaactcaaatcccacacactgccgaacccaaccccttcgaacacgaacgtcaatcgtgtacccagaaccacaaaaacattaaaggcaagacccccaaggaccttcaaacatcttccacctgcatagatcaaagacaaagagagggagagagaaagataattaggtggataaaaaatatatataccgattaagcgcccgtcgtttggaagcatttgggcggcagagacgtcgactgcagacatacgatggtagagcagagggagatggcttgggctcggcgtttggaagcgcttgtcgtctgtcgatggaactctccttggccttgaaggtcgtcgtcttaaatggagggggctgctttattacaaatctaaaggggagaagaaggatgtgagaaaaaactagagagagatgatgtgggaggcgtttgggaatggagagagagagaaacttatttttagggttttaaaacctaacctaaaaaaaaaaaataaaa

SEQ ID NO: 237674 - DNA, 4795 bp, Cannabis indica
  modified_base (4591)..(4591): a, c, t, g, unknown or other
ggctaaaaatccagctaacacaagggtaagagatatagccattcatgggtgagtatgatggtgtatttttataatttactattttatatgatagtgatatatttacgatatatatgatagtaatgtatatgtggcatatatatgttcatgcgtttatatcatatttaatatatagttgtatataacatggtatttaaatttataacatgttttatataagatatatatgagatatataatatatagaatttgtgttaacccaaaaaatttttctagcaatgtggacataatgtttgacacgtgcaagaaagataacgtcagggagctaagcagacctgagtcatagcagttgacttgggaaggggaccctagccttacacccaagttgactttgggagctctgggatggaagttcatactttaacaacttaaattcaattcactatctttcagtattatgtaccatgaagacatggagcaacctaatccaagccctgggatctaaaattacatgaacttgcaacccaaaagccaacatgggcacctagggtttcacccagaacctaggttgatattccccattagggttttagtttctgggataatcttagtgcaaatgggtcaaaacatgcattgagacatctactaggcataccacaaatatatgtgaggcatatgaatcaaattcagagtaagtttatttttgagcacccggggccccaacaccctagtgcccaagttgataatttctgaatctgggcactttccaagtatcaaatcgatgatctgacttttgtatcttttttgtcttcatcaaaaataaggcctagtgcccaggttgacattttgtcaacctgagctaattttgatgatgtttttcaagaactcttctgagcatcttctctatttttagaaaagattaagattcaactattttttaagattaaacaatacttttgaagggccataactaggatccatcacccctaattcaatgctctatcaatattgatccgattggtgcgattcaacttgagtttcaaagctcattcaatactctatcaagtcatgtttgatactccaattataattttgaagctatcaacaccgaattctaccccaaaggagttaccaaaataagctccaagttactcgcaatgtgtcctgtcgggctctgaaaaatggccatcaccaccacaagttaattttcatcgttatattatcatcttcgatcaaaaatatctaatttttatttttttcctatttttttgggcctctgtcaccaataaaaagagagctcccttagctcatttttcacattcagaaaaactaaccacaaggtcagagtttctctctctagaaattggagcttctgactcttaatatatttctgcaataccatctcgtgagaaataaaaactcaaagtagatgtaactacattacaatcgcaatgcagggagtaaactactataaatttgttgtgtctctcttataattactttactactttttcattctcgtcaatccagcgagcaagtgtcgcttagaagtctcgtcaagatttctgagttaataatgtgtatgagttatgtgtattatatatgttgagcataatatatattaagagattaaatatgaaaaaaataattatttcctatatgtttaaatgacatgtatatataatatgtattgtgtatatatatcatgcatgtatattaagtgtatatttatgttagatatgtgtgaattttgtaatatatatagtattataattaattaatatatattatgtgtatgttatatgtgagatgatagtaacatacgtaatataataattagcatacaaattttatgcatgggagtcatatatattactttacataataatatatatttgtaacttatcatatttagtgcatatgataataatggtgatgaataggatgtttatatgttttacatatattgcattaatgtatgagttatataatataataataatattaatagtaatgaaataatatttattactattgatgtggagattattatcatttattttgtaaataaagagaatcggaattcattttccaaatagtgattttgagaaaagaaaatgtgacttttaaggagttacatcatttgggaattaaaagtgataattatctcattttatgagataagaaaagtaaactatgactgaaaagggggaaagctctacaagggttccaataaggggttttgcttcagaggttctttgcttcactttagggggttctctactaccatggtgggtcagggccgcccactcaaagcttcttcttcggtgctaagcaataaactagcaacgactcgaaaattcaagggaagctaaagattacgagcaaaaagtaagggcaccgtctttggatcttgtactcaaaaccaagtcaatggcggaggtactaggtgttgatgctctattgatgtcaaatttttttgaagatgatgaaaagacgagcatgtttctgatggttccacaaatggtaagaacaatagaagatgtggctgaagtgtttctccaaggtctacactcaaacagttggatcaagtggagttgcaaactgatttcatgaatttcttggaggccaccatgagatgtgaaggtcagattaagacaggtaaagaccctactccaccaatttttcattcctctattgttgaaaatacagttaaacagaatttgagtaagaaatttaaggagacaaatcaagggggcctcctaggaagagtctagttgttaagataaacatggatgacatagaggaagaggtattatattggaaatcaactatggcaaatcatgtcctgggagctaatccacctgttggagtttttgatggttttgcaaggagaatatggatagaaaaaggtgagggcaaggttggattatgaaaccaggtatcttcatagtttggtgccaagatatgaatacccgagatgagattttggaaggaagatttgttttttgataaaaaatcaattatcattaagtcttgggacccttacacagaacttaacaaagaggatgtgtattcagttctaacatggattccactccatggattagagctgaaatattgagtgagaaatcattattcaagattattgggcaaataggaactccagatatgttagattctacaaccaagaataaatagagactcaatttcctacgtgtcttggtggaggtaaagatgtatcaagactttcctgacaccattttcttttgcgatgaaattaagcaggatcttgaagttatggttaagtatgaataaaaactcgtggtatgtcacaagtgcaaagcctttggacacaaaattaaagtttctaggaagaaagaagagaaaaaatttgttaagcctaagcaagtgtgggtggagaagaacaaagaggaaagggatgtatgaaataagaaagggaaagtagttgatgatgaaggctttcaacagaccaagaagaagggattttccaaggaaaaaagtggctatgtcaattatgactacaaacgatagtgttggaagatatatgtctaagactcactataggatgaaattaatgagatgaagaaaagagggggagagcctccgatttttaatggataatattgaccttgcttttagccaatgatattgagtcaaattaaagaaattataaataattaataacaataatgataaatataaagcaaagagaacattaaggttgttatagaggttaggccccatgatggtggcaatagtctactccccttttacttgtattaacttgtgagaagcgaagcaagaagttcttgatctctcttaaaagcttttacaatgattttcgagtatttctctctgatttttctccatcctgaataatgaaatgactccactatttataggaaaaaattacatcaaattggttttccaaaactaataagaatttaaatagaaaacttgtttactttccctaatcaaataaaaaaaaaaggaaactagatgggcttcctcttatttcttaccaacacaaatctatcccatgaaattaggataagatagtaacttgcgcttgaggattcatgagacatatctctgaagataattaactctcattctctggccaatgtctgcaagctaactggacaatagatactagtcagatggtgtagcatactctatctggacattttttttagctctttctatagattgattactttcaagggatgagttaacctagatgatatatcacaggatgacctatttttccaggtcatggaatcttctccacgtgtcacctagatggatgtcacatcaccttcgtgcaaaaattaggataaaatttggcccccaagtccatgcgggaacttcctgcctgcacatggacttaattagtcaccaaaccgatcgaatgggtgacacgtattcgttctttagaccacttttgatctgatgtgactaatcgattgtctctttgatgtttagggcatgtaatgccaccttgggtgtgcgtgatgtctacacttttttaatgagtattaactgtcagtttcgttggggggggggnggggcggcaaggacccaaaagttcaaattttatcttaaccaaattcgtccctccaactgcatgtattataaggtcaaaaattatcttatactcttttagcctattttaatttcaaacatgagagcctattattttttctttttaccttttaaagctttgaagtagttcttactggaatttcacactaccgaagccatctaacag

SEQ ID NO: 237675 - DNA, 879 bp, Cannabis indica
ttctcactgaagctgctgaacgatcaggaacactcaatcctgcctacttattttggatcaaacaagatcagttactctatgcttggctcttatcatcaatgtctgaaactattctaatgcgcattgttggctgtgaaacctgttctgatgtttggagcattctcggtcaatatttcgcatctcaatctgctgcaaaaattgatcaatatcaaactcagcttcgtaatttcaagaaaggatctaagtcgatcaatgactatcttcttggcattaagacttgggtggatcgtcttggttctgttggccaatctttgacagtgaaagaatacatctctgcgatctttaatggtttacctccagactatgatatcttcatcatctcggttaactctcgacatgaagaatatacagttgtagagattgaatcgcttcttttagctcaggagcacaggattgaaaaacacactcaagatctggactcagctccttcagttaatctagctcataatcgtggtgcgttcaagaatcgcacatcttcctctgatccatcaaatcaaggcgcaaatggtcaaaatcgtgggaatttcactcagtcttcgaggtcacctcactggaatccttatgctactggtcctcgaagctctgctcctactaatttttgtcaatcctcagctcctacttcaaataatcctcgtggtccatcccctgcttcaatgaactctaaaccagtgtgtcaactttgtggacgaattggtcatattgcctccaaatgctatcaacggttcaacatggaatttcctggtcttggtgctggaaacacagacaaaggatcttcacaaatgcaagctatgatagttctgcctccactgttagtgatcc

SEQ ID NO: 237676 - DNA, 3995 bp, Cannabis indica
attataattaaatggcttaattattataattcaagtaaggatttaaatataaatattaatggctaaaagaagtcttgttaaatatttaatttaattaaataattctaaaaaaggaatgtctatttaattaattattttaagaaaatagttaattataattaattaaatctaaaaaagaaaagtttacctgttagtaacctgctattacaggttaaaaaaaaatataaccatatgattacaataaaaatgtaaccattaaataatcaaccatttatatatatatgatatataataattatcagattttgttgtgatttgtgaaggtgtgcaaacaactaccatcttcttacatataatataatgcataaaaatggtacattaatttacactttctattttattttttgaaaatatattatttttctccttatattatatccttatctatagtttttttttttttttgagagaatatccttatctaagttgaaaatgtcaaacttaaaccaactgtcaactaacgttacccacaagagattgaagaaagaaagggttaagtagagtctacagacctcaatcttttaaaaattattatttaaaaaaaatagagaagaaaacggtaaaacataataacagccaatcaaaatcctggaaatcgtacgtaattaaaggtaaaaaaaaaagaagaaaaaaaagaaagaaaaatcaataatacataataataattactaggataaaaattacagattaagaaaataagaaaaaagagaatgaattaagaggaagaagatccagcacccacaccagtagcagtcatcaatccagtgttttcctcatccaagaacaagtcatctgtcttcctaaacgccgcgtggaccacaaccacggcggcgccgacgaggaccgaaaccaggatgttcgtcgtggcgttggtaaatagcaagcttccgatcgtcagcacggcgagcacaaccagcacgatgcggtcgtcgatggtgtgtcccaagagcaccagcggctcgtcccggagaaagtagaggaagagccagacgacgtccatgacgatgtaaacgatgagcgagatcgggtgccagagaaggctgaggaacagaattaccaggatcacaatcgcgtagttcatccggaaataagcagcgttggttcggactcggccgatcgcatccttgaagctcgcggggagtccgaacgaccggaagttgtacaacattttccatgggcggcgcgtgctgagtcccgctttgattcggtccttggcgcgtgaaatgtactcgaggtttgccgacggcgacgatgaggtcggaatcgtgccgtagttggtcatggtgttgtgttatgagttttgggtttgggggtttgaccctttggtgagggaatagaataaaagtgggatcgatgaataaatttctttttttgtgacaatcaatgcggggtttatttataatagattgtttttatcaatgtattgattactttggtttgcaaattaaagtaatatttaataattattgggtcaatttagttttggaatttcttttggaaaaagaaggcaaaaatgttaaaatggtatataattattttagactcgtgagtataaattggttgtgtatacttgtcttcttttcattgtttatgtttagtgaaagtgagtaacttctaacatgttagtagtgatgatttgaaacaaagtgagagcttttgtttggtgatttgttattgggagtatttgatctaatcaatcataacatttgaacacccatactatgtcccttttgtcatgttttctctctatctttattctctttatcctaataaaatcaatacatattatacattctggaaaagtcttctttctttctctatttatgtaatgactatttacatatcctaaaatctattttaatgagcagaaatgtgctataattacaatttgcaacttttcttgctccaaaactatgggttagctaggttcgtataagagaaaataatcaaaaataaaaggtcgttgctaactgtttaagacctggacaaatacaagtaccctcaaacaaaaggataaggtagattcgtgtgtggattagaccacactaagaattgtggggaggctttgataaagcgacggcaggaaaccaacgcgtctggccagcttggcacgtgtaatgccggtacatactagaaaaagttgtcattccctttttaaccattattcttctattatttcacgcataaactttaaaaatggctctatggctctacgttgacacttcacacgtgagaggtattatataaggagagtatttgaaaacgtgtaagttacatccaagccactggatggatgccacgtaaggataagacattctttatggtggagtagcgcacttaattaaattgctccaatagagagctccaagcatatgaagttccattgcatgtggatatgatatattcataatgcaatgcaattagcttaaagcaaataatggagccctctccaaaatttgaaaaatgaaaatgaaacgatctttttcttttttcccctttccccacattttctttttcctttttacaaaaggatagccttttcaaaaataaataaagataaaaaaaataaagatgaataattaactcgtaaaagattatggacaagtctacaatgcaaatctttaaagaggtgttttggtagactttttatttatttcaacataaaaataattttttagtttatttaattttcataattatatatgttataattatttaagattacttgcaacttattaaaaaattcaaagtagtttataatgttaaaaataaaatttatatatattgttgtatgcacaatttttttatacttgtggtaaataattatttcaactttattttcggtattataaactatacaaaacttttaaaaatttacaaattatctcaaatcaatacaaattctctgaaatgccaaaataatctatcaaaacagtctactacaaaaatttccaaagattattatgtgtcacttaaaatgtaaaattagaaccactaccctcaagaagccaaagtagctagttatcaaaaaaaaaaaacagccaatgtagcttaggtgagaaattaatggtgatggttttaaaacccaataaatgtaattaaaaaaagaaaagggtaaaattggtcttccaacattttatgttgtttcgttctaattctccttacatttttgtcttttttttccttccatttatgcctaaaataattggtggatattatttttttcttgtctttcaagtctgacatcgaattttaaggtgtcaaaaatttttgatagcaaattgaagagctttctccataagtttaattaataagcatatgtgattataaaataacacgatgtgaatatataatcagataaacaaatgttgtgaaaattcaagacccaagtaagatcaatatcaaagagataatttagctaaatactaattacttgaattcttagttctattaggtaaacgataatacattggtacttgtaattaaatactaaaacaaaaacaaataaacaccaagaggaaattgactatgattagaaatttaggacatttaactttcaattgcatccacttctgacaaaatacaatttagttttccttaatttatgtgatagcgtattaaattaaatcaatttatatttttattaggacatacagaatctaaattatataaaaaaactttatatatacttatatagtaaatcacacatatgattcgcattaagcaaataaatcttattaaagctacacaaactaaatataaatattttcatgtaatatcaaaatctatgcatgtccatttcagaaattggggggaaaactaagattgcattaaagcttagataagtatcaaacaatatccattaatatatataatacaatttgttccataaaaaaataaaataaaataatataatacaaatttaattttttaga

SEQ ID NO: 237677 - DNA, 1798 bp, Cannabis indica
ggagaaggagaaggagaaggagaaagagaaggagaaggagaagaagaagaagaagaaaaggaaaaggaaaagaaaattaagaaatagaataagatatttttttttataatttatttatttttataattttttaaattattttttatatatcttaataattaatattacgtggaccttttaaaatttgtcacatgtatatttgtgtacaagtgggcagtctattgtagcatttaattgaggttttttgacgaaagtgtaatgagcaaaacggaagttttaccgttttaccgtcaaaattttagcatttaagttcagtaagttttaccgttaaaattttaatttttgtggttaggtgttaaaaaatataaaatccaagtaattttactgttactatgtataaggaaaaaaaaaaagaaagaaatgcaaatttattctttttggctacatgtatctctcaatatgtggctaatatactaaaaaaggaaagagaaaattcacataaaacatgtttctaatttgtaatggaaagacccatacgtgaatgtcatttcctctcctatccctaagaaatagcaccaccaacaacacaaaaatatatttatataaaatctttggttttttttttttttgtgggttaaaaattaaaataaaatccaattaactctttaaaaaaaaccaaaacaaaaaaaaaacaaaaaaaaaaaacaaaattgcttcaaaaaaaaaagttaaattatatgaacatgatataatttaaattattattaatttttttattttcttgtcattacctacataaataaaataataaatagtttagaaataaccatatacacattattcattaatattctctttaaactaagaagaataagcttgatggaagagtaataaaatgcgcagaaaaatgaattaataacaaagttgttaattagaacagcctgttgcactgatcaactttttaaaggaaagacacttgagtattttacatttgttaaattaagtactattcaaaaaaacaaaatcagttgtccaaaaaaaacacttcccaaatcaagaaacgatgaggataacaaccataggatcataaacagaaaatctctcattattacattatagctttattcattcctttatttaatttggtcaaagtcttgactattatgttatttcattaatatccttcaataaattaaaattaaaaattaaaaataaaagaaaaatatatccttaaaaatagcacaccccattctaaacgctgcaaaaaaataagcaaataatttaggtaaaagtattaagtggcagattctagaatagaattgttttcttatgtttttggcaatcataacggtatagactccaaattgtgaaatatagaaagaaaatatatatagaaaagaacataagcaaaaaatacgaggaagaaataaggccagaactttgaagggagaataatcatatttcttgagggacaacacctaattctaaacctgtaagtcaacatatagaaattttgatttgttcaaatgtgttcttatttttattgtcaatcaagttttattgctttgaataatcaatattctttgagatatgagctcagtaggtatatatatatataattaaatttgtctggtttgtagacaattaattaatatgtttggtaaaccaaatctatatagaaataaagaatattatatgtagatgaatgaaatatgaaattgtatcacattattaatttctagatttctcttagagaagtatgggcgtgatcactcatatataattctattcttctctc

SEQ ID NO: 237678 - DNA, 741 bp, Cannabis indica
tgaccaaacatagaaatcataacaatggagcttcgtaaaacttgaacaacacttaaacaatctgtttccaccgaagcattattccatcatcgctctttaatccaactaagagcttctcgaacccccatggcctcggcaagttccggttcaatgcttccattggacaacattgtgcgcctttcaatgagcagtcccctttcatctctagcaaccaaacccagcccatatttatgatcagagtcaaataaagctgcgtcaacatttaccttaatactgttagcttgtggtgagatccagtgcttcgctccgtcacccgcctgaaaaccaggccatgacgactcatattcagagctcttagcactcctccattgatcaaggaatctttttgcattagcaactacatcatcctctttgaaaaagttttccattccaaacaagattgtttttagcatcccaaatcgccaacaaaccattgtaaatgtgcattgatgatcaacatccatggtctctaaagaatgcacatacaagtcaaaaaaaatcgatattcatggccacattagtgcccaataccaactcggttccagcaagacctcaccacttcacaagtgacaagaatatacaaaagtagactcctcatactgaagacagaagggacaaagtgaacttacatccacatgctttgttcgaagttggagcttggtgggaagacagcctcgagctgcacgccaacacaaaattttt

SEQ ID NO: 237679 - DNA, 1120 bp, Cannabis indica
atactaatataataattaattattagaaactgtgaggataataaaaacttgactaaaataaaacactaaaaacggacattataacggcagtaaaaaggagttccggggatccctgttataaaatatttatccaaaagactatatacaacaacaatccaaaacacagttcaaaatacagcagacacagttagtctgaaataactcctgacaactcaacacgcaggctggtggggtcaatatgtacattgctagagaagaccgctatctcatggttgttctaactttgccttgcccttacctacaccacagagcactcgtgagtcacatagactcaacaagaaaaatgataaataatgatacataaatagctaattatatatttcattatcacaaaatgattaaagtatagcattcaacggtaagtaatgtcacaagttatatgcatagaaatagttatgctcatattttgcattgcctaatcaggcaagcccgtgtcataatataatatcatatataatatcattgcacaacctaatcaggtgagcccgtgccacaacttggcactaatatatcacatcgtctaagcaaacgatctcgtacctacgcccggtacttatcatatatcactgacgcccgtacctacacccgatacgtcgctaggaatattgcatcacctaataggtgatgcccatatattatgtccattagtatcattacgttatcattgcctaatcagacaatcgataattttggaacccatcatgccatgtggtacattatacttttcttaccttgagttctggttcaggtatgttggccgactttcttggagaacgatcgatgatcttgggccctatgtcataacaataataaactatttagtttttataagaaaacactggttaatagttgtaaaggacaacttagggtttcccactgaattccataatacaaatacactaaaatagacttatattttggctctaaaacatacatcatatcgtagagctcgttgcaagattcaaagcggtatataggatgtccaaaatggacacctaagtgaaaagttatggccaaaatacgaatagggattctcccaaaaataacaaaaacagttaac

SEQ ID NO: 237680 - DNA, 786 bp, Cannabis indica
aaagagttttatttagggcataaaacccaacaaaagctactatggatatacaacagtttattactgcaaactataaaatatccaataattacaaagcttactgccccaatcctcccaaagttaattggagccatgaggtatggaatagattgaatatacctagacatagcttttgcttacggatagctatacaggataggcttaaaacaagagacaagttacacaggtttaagattattgatgaaaatttatgtttgctttgtaagaaccaaaccgaaacttctgaacatctttttttctcttgtcccttctcttctctttgtctttcctttgtgaaattatggctgggatcaaatgttgaaacttcaacacttataagattgataaggtggttggaaagaaaaaaatcagtaagtttaaaaaagctgtgtatacaacttcagttgctgctctcgtgtaccatctgtggaagaaccgaaatgatgtcttgtggaattcaggacaacaaacaccagaacaagtagcaaactcgatcaatgtggctgtgaagaaccgaatatcctgcacttggccaaagaaagtgcagccgacggatggagattggtttttgagattataaaaataattttgtaactaatataggtgtttgaaaagtttacaaagaaaaatgtatagattgatattcaggtcttcatttgaaagtcctaataggttgtaaattgttatttggagtaatgaaattcatgattgattgataaaaaaaaagacattgtttttgtcgtgtta

SEQ ID NO: 237681 - DNA, 1117 bp, Cannabis indica
tctttattgatatttaaatgatagatattacattgaaatagagttttatttagggcataaaacccaacagataggtttcttacatatcgtttgctttattgagcaacaaaagtacatacgcagctcgtggttaatgagtggtaagggtgcttaatgaattatcgagatggtgtgattacaagtatgaaattatataagtatgttagtgtgtgatgtgttatatctacgtttattgtcttatagtaagattaattgaatttaataatgtttatggatttaatcatttttcttgttgagtctctatgactcacgggtgctaaatggtgcaggtaaagggaaaggcaaaactgggcagccatgagtttgaggtctctgcagcagtgtacatatcagccgtggtgtcttggcttttgagaagcaggatcaattattttttttatgattgaaaatgtaacctacgtttgtaataatgtaatagcagttttataactagttgtaaaagaattttataaacaagggatcctcgtattatgacagtattttgtatgaaagttctatgtaaattttaatcaaacgttttaattaaaccacactttctctaaactaatagattagttattaataagtttgtaaaagtacacacgtggcatccctaagagtcagggcgttacaatgtaggtccttagaggttctcctgagatttgtttcacttctaccaggccttctaggtgcaaaggaggctaacgagaggaggaaaactatgcatggaattcagatgaaaagaaaatccatgaattaactttcctgtagataatttgaaataccattactgggcagcctatgctagtgtggccggataaattctacaccgtacattgcctctaactccttgtagatccatttgcatctaaaagtatttcaagtaagatatatgatcttcttttccagtgtacatcttccatataggcattttgaacattgggggtaggtaaagagcattgacttcaggtgagaaaggtgatgttcttgccgagtctagtttgagatctgtgagttttgggccagttagaccttgtactaggctcttaagttggtgtatttgtgcttgcacaagtgg

SEQ ID NO: 237682 - DNA, 1417 bp, Cannabis indica
ggattaaatgtaaaaagtattgaaacatacataataacgtgaactactccactcattaccaattagttttgaaatgtagccccatgattctcaagttctcaacagtgttaaacacccctcgtgtttaataacaatacttataactaaatcatatggtctccagttttaaaaacaaaataacatattagcttagcttcttaggactgatcccacacggtcaaatttataaaaaattattaatgtatttggctttatgagttttaattgggctagaaagatggatcacgatacgacgacacaactcaaaaatgacacaaaataaatagatttgtgtgatgtttaataattgtatcgtgttcgtatttgaatttttgatacgtttaataatcttgttgtgtttgcattatcgtgtcgtgtcgtgtaactacaaattaatcgtgtcgtatttgtgtttgaggtttcaacacgtataataaatgtgtcgtgttcgtatttactttaattggtcgtgttataaatgtgtcaattcgagcacgacacgataacacgaattgccaactcagtcctaagttttaatttctcaaatttttgaacaaatagttgtttaaattgtagttttatagttaattacttgtcttttttatttgtaatatttaaaaaaaaaaaattcgagaaaggaataaactccaaaagggatataaattttccgaattaactccaaaaagaagtacaattgagcactcctaaaatactttgactatgttttgaagtttgattttagtacaaaaatagaaaagtaagaaaagaaaaatctcatatttagcatgaaattaaaattgcatgcaaaacaaaataaacttgttcaacataattttttatatcaaactgaaaatttataatttttattgtctgacatatcacttttctacattttccaatcctcaacttccaaacattatgttgatcaattctcttaaaatctcgataacgggcttcatatttgggcttgatgggctggacctggacagtgaagcgtgtgaaataatgttggaatgggaaacgaagaaccaagtacgaagtggcgtaacgtaaagaaggattgttccttgctaaaattagagagtgttaccgttaatttcttgttacaatttcttaattaatttgtatgtttgaaaaaaatatgttagaatattttctttcaatttttttcacggcggtatttgtgatacttacaacattatttctgtaaatttttaaaaaaattcaaataatttatcgtgtcgaaaatactttgaatacgcatggtaaattagaatatgagaaactctatttttgatactgtatgatgaataccgctatgaaaaaatatttcggcatgtaatttcgaacgtaggaattgactaaaaaattataatat

SEQ ID NO: 237683 - DNA, 1353 bp, Cannabis indica
gttggccagactcagggaagctgtagaccgcctaactggagaaccacacactgttgattgcgatgttttcgctcaggagagatgcaaattcctgagatggatggatgaacaggagcacatccttcgatctcaccaggtagagttagatcgccgcaactgggagaccaataatctaataagacagttcagtcagaaaaccgatagaagaggccaggatctccttaaagatcaactttaaggagactgccaccaagttcttcaaaaactaggatagatcttcccctgccagagggaggacagacctttcctcaaaggtcaaacgatgagaacaactagatcccaacaactggcagcatagggggctggccagggatctctagctcaacaacaacccccattgtgcagccattagcaggccaaccaccaataggagtacccatgaccagccagagtataccacttcctccctaaggagagcgaggttctcagaggtcgatctttgactgacaaggaccaagagtgggtggaaacacccaaaatggtgatttgaggtgtaaaactgatcacttcccctatcaacacataactagatctagtcgaccgtggagtcacaggtagccaaaccctacccaatacaggtttggccagctaaggatgcatcacgggtagccaaaccctacgctttgcaggtctggccagccatggaggagtatagggcagccagaccctgcccaatgcaggtctagccagccaagcacagtagccaggtttaggcctggccaacctagccaactctcgtacttgggaatggtcgaccagggtctgcagggtctggttgaccttcaccatacactctcccaaggtatggccatccagcccctatctctttagaatctatagcctccccaaggagggccagtcaattaggtccccatagtatcagatccttctgtgaaagcacatttagactgactcagggacatgatacagggcatagctggcccaaagccttcaaccttgaacttgatcggtcaaggggatcaccattcttggcatacataatgccttgcccttgccaaagttccaaatgccggtatggaagatgtttaccggacgagaagacccattagctcacatcaaatactttgagatgaaagttgacctctaaaaggttactggtgatgtgcattgtcgcatattcccagccatattgtcagagatagcccaagtatggtactttaaattcaccctgggaagattcaactcttgggctgagttctcacgagaattctacacacaattcttgtcctcaagacttgtaccattgcagctggaagaccttgtcgaagttaa

SEQ ID NO: 237684 - DNA, 663 bp, Cannabis indica
attatattttgagacataattttgatatgagtttttcttttatagatatggatttgttaagcaatgccaaagctgagtgacatggtagggcaaagagtcccaggaaattatattcctcgatggcttggttggaaataaaaatatcacatttacaagattatcagaagaaaaaaaaagaaaataatattgagttatttatcgacatgcaaaattatttattgtcgtgcattaaaaaaatatgatcaaggtaacttatgttagtttcttttctttgtgtattagttttttgtgcgacctacattagctccaacctcaaaggagaaggcagaattattttatgaaaggcttggtagctgtgaggataatgcagatggcgcaattgattagttttcttcatttttagtggctgatgtgattttgtataatcaacaatgtattgcgccacatgtggagcctccatcttcaaattttgaacctccaactatgaatgtggagcctcatcttcaaattttaaacctccaactactgatgtggaccctccctaattcacttaaattcctcaacaattgcacttgcatccctcctcgcagcctccctcttcttatgatgctcaaaatgagttgttggagtcagagaagtttttgatagccgactaagaaaagt

SEQ ID NO: 237685 - DNA, 1131 bp, Cannabis indica
aggaagaaaaaaaaaattatgtaaaaagaaatgattaatttggttttaaattatattttccccatgtataataatgaaacataaatttaatctattaatttttgaaatatatttatatcatatgtattaaattctcaaattactattttttgcattgaaatattaattacatatataattttttaaatatatataaatatgtgtgaattggattggatcggttacttttatatatcaatcaacatatttaatccgcacaagtgcagatattggtcgtgtggattagattagatggagtattttattaacacccctaattacagctgtcataaaattaattttaaaactttacaagtgtatttttgtaaataaaaactatagactatcccaaacaattcctctcctaatcttcgtagctaattaattacaagccttgaataattttgctaatgtttcttgaaatatccatctatatatctatataatactaaagtttgagtaaaacaccttagactcctcgagattcactctcgaagcttcttcttcttctctgagagaaaacccatgggtttcaacatagattgcacacactcacaatctagaaatcaaattgcatacaaactcaagaacatcatcatacacacacaacaacacatatcgatgagattcaggattaaagaaaacaaacaaaatagatttggatacaaagatttggtctctgagttcaatctaaaacaagggctacgtcttcatcaagctcgccttagagtagcttgattctccactagattcaacaggtaattacaagtgtgatattagatttcaaccacagaactttggttgataatctctttgttttctctctgttttttttttcttgatttcttaatatatttcttttctttttctttctttgtgcatgtttatgattgagctccaagaagcttttctctctttctctctcagctcgtagaagatgaaaaaatgctttcaggttaggattgggtaacatccaatctaattcaattgaatcgaaccaatctattccaatccaattacaaaaaaaaaaaagaaaaaaataaagatatccaattataattggattggtttagatgttaaaagttgaattct

SEQ ID NO: 237686 - DNA, 794 bp, Cannabis indica
aaggttctataaaatatgatttaatgttttctatattaaagtactctttgaaatatgattagatttattatttgtttcagtgttttataaatcctaacatgaacatcatgtacaatcaaattctaaaagaaccgacatagctaaaggatcaaatccagcacctcttctttctccagcattcttagaaaagataaggattatgcgatgtactgatgcaacagttgacgatgataatgatgacgaaaaaccttttttggtttaccaaaaaaatttatttgcagcgaacattagttcgcatctcaatcatcttttcatactgttgaaatagattaattctactaatttcttaaacctcaaagaaaaagcaattgtaagtaagaaaagcattgatgtacgagttattagacctaatttggagaaaaaaactttgttactgacatgatagaagtgcgtcgccattaattcttacaatttaatacaaaagtgaagttattttgctcaacggaatgaattgaaggtagggcaaatcgttcaaacttgatttttttagggatgtcgatagaatttcatattttattattgttaatcttggatttatataattatttgttttatcaacaagagaatgtgtgttttgtttttagtttaatgtttactataattaatatttattttgaacgaatgttcagtgtttactttataaactaaattgtgttactattattgtttggattttaataataattattttataattttattcagtaattttttttagaataattatctttttt

SEQ ID NO: 237687 - DNA, 628 bp, Cannabis indica
agttgagtataccacccatttttttctctctttggtgagagaagaaagtgggaggatagaaaggaaatgagggaaataagagagaggagaggtcaaattctcctctatggtaagggttattaaaatgaaaagaaaagtgttaggataataaatccactcaaataaacaattttgaattcttcaatttatagaaacattgctactctccatttttatttgttcaaaattagaaaattattctctaaaaaataataaaaaaactaatttgaaaataatttagtaattttatagatgcatagtgatctatcatttcacttctctatctctcttaccaaacaatgtacatgaattactcatctcctctcctctcatttttttatactttgagaaatactaataagtactattggtgtctaacacccttctaagtctcatatcgttattgatgcaattaagtatcaagttccataaaatttaatgtaataatttttaagaaatatcgctaacaaatcgtaaggtgccacttctagaagttgctaggcactactgatgtctaatatcaatgctctttccatcctctcaattctctttacaccctactaaacattagggtgttcattggaccaca

SEQ ID NO: 237688 - DNA, 1078 bp, Cannabis indica
gtgaattatgagataacagccttatgatcatcatgcataactattttatataaatatatatatatatatatttaaattaaaataaatgggatgatttgatacttaatactaaaaaaattcttacttttagtcacaaccaaatttgtaactaattttaaatcaaggcccgtagctatataaatatattagcaaacaaattattacttgttgtgactaaatgtatttttaattacaatatttgttgcaaattaaaactaaaattagtaacatattgtgtctaaatactatattttagttacaagtgagttacatttagtaaaagaaaattatattatgactaaaaagttatcactaaaataattttttttatagtgaataacaatatatgataattttagacactactagtgcttttagccgttgtctttaaatatgtattatagtgatcacattttaactcactcaaattattagttctctccattcaaatctctcagccatggcttccacatactactctcaagttggtcttcttcataattagttactttctattcttttcataaatttgtttaaccaaattaaaatctcatgatctctctctcataaatttcattcatatgcaggctaagctcaaaacatgttttttcttcaaggttgtagtattatttattttgttgcaaactagttatgtaagctcaaaggcatcatctctgcctttcaacatcttggagactaattattatattaatggactaaggaatccaacaagagttgtcaatactcctcgaaaagttgtaggcggcgagaagtttcctgtggctcctttatcgctcgaacatgccttgaggcctcccacgaatctatacacaagttctgcacctcatacagcaaccattctctcggttaagaagattaccggcgaaaatgcctcaacagaaacttaccatatcgtatttgatcatggtcggtttcttcctcactgggaaggacaagtttttggtgtaatgcccgcggtaagatccactacaaaaaactgttacttttagtgacaatatttagtcacaacataaatttt

SEQ ID NO: 237689 - DNA, 3220 bp, Cannabis indica
aaattaatacaatctaaggggagcaggctattaccaaactaaaggggtcaaacctctttaaaacctggtgttatttactacttattagtttttgctctattttattacatttctaaccgcttcataattgactcattgtcgttgactaaaagcgaggtcaacaaatacactaccaacttgttttattcatattgtataatcttaattctcttgtacgaccttacaagtttatatcatctccatatgaataaggaatttttagatatttattaagtatatttctataattaatgtatttatttattttatacttatatttcatatattatgtaatacattatctattaaatgtttaaggcataaatcccaacacatataagtctcactccaagccacatgacctgacccttcataatcagctcttcccttttagaggaaagcttgacataattgatttattctattcaccatagtctttgaaagaattactatttgagacaagaaagtatcgatggaaattaagactgagttaattaaaacatacttaccagtaaacgatatagattgcgggagctccacatacgaattctaagcatattttttttatcaatcatgcattcacaatctgcttttgtaatacttttgttactgatcttcatctttaaataaccaaaaggtaatgaacctttcttgaacccaatcatgccagtcagtctatcccaagtctcacctatcatcgaagatccataaattgcagatttttctttattagcaataagacccgagctatctgagaagagttggaaatctctcaacaacagatgaactaaattaaaacctccattgatgaataacagaagatcacctgtgaaacgtaagtgagtaagcctcaaaccttcacatctaggatgaatgttaaatctttgaagattcgtcactttggccaaaattctcagaagatactccatcccaaagacaaacaacaagggacacattggatctctttgacgtaaacccattttagcaataaggtatccattgatggaaccatttatcatgaaagaaaatctaggggtcgtgacataaaccatgattagattataaacttgatgggaaattaagtgccattaacatttcttgaagaaaatgttagtcaagggtgtcatacaccttttgaagatcaatttcgtgatgaccgcttaattttattttaagaaattagcagataattagggcttattttcgaaagtaggcttttaataattattttgtaattatggagatatatttgaattttataagcgtactaattatgttatatatgaaatattatgtttttcatattttatgcccgacaacagtgaaatgcgatatttggcctacagaatcacttaaatattgtaaaatatcttagaattagtggggaaagatatgtagacatttataatgtctggatcattcagggttatggtatagaactattttatccttaggcttttaggttgcttctaggtgaagcaaaggacaaaaatggtcaaagaaaacttatataattatatttttctagaaaatttcaattattcatatttttctgtaagccctttgatttgcaaaggagtgcatagtaatttgaaatcacaataatgtgtctaatctagtagagtattacaaattttcatcatgcaagtgggcctcgcattcttccttccataatgtctcatcaaatcttgaaaaatcataatattgtgagcaatatatatatatatatgtatatatatacctccctttaacaaagtcactttgattttttgagataatagacagaaaaacctctctaagacgataagaaatcatcttagtagtcactttgtacactatgttgcagcaaacaatcaacctacatttacttacattatgaggacattttgttgtaggaatgagagtaatactagtggtgctataaaaaaattcatgagtaaaggaacgacagaactgcctccactaagttggaacctgtaatttcccaagtatttttttttaaaaaaaaaaccactgttgtacccatttgggcttggcgccttatcacctagaagaaaaaaaatagctgctttcacctcaaaaagtagtttatcttttcaacagaaactcaacctgtcttctagaaatgaccttcccttcttggactacactggctatcagtgatttccttctctccaccttcatacgcaatgagcctaaatagtactcttgaaaatcttagctcactccatcatgattatcataataattacccttaagatcccaagtagaataaattacattttgaattcttctactttgaatgtccttctttcagccatgtaaatttcactttttgcttaagaaacttttgcatatcctcatgagcctcaacatacttcttcctgaaattaatctccttattaaatggagaaatatcaccagggttctctataaccatctcttgaattttaatcaactttgaaaaagtctcagtttctctaacaaaaacatccccttttccttcattgttaatcgatctcaaaacaacgcgtaacctcttcaatttcacaaccaatctgtacattagattaccatgtacctcctcaacctaaacttttagcaattatttgatgaaaatccgtaaaagaactctaaaaattgaattacttaaacaattttcttatctcttgatgcagataaactgcaactacaaatgggcagtgatcaaaatccctctctgggaagaaactaacttcagcaaccgcaaaatcctcaatccatgtatcattagctaatatcgatcaattttttcataagctctatctttacttcttacttattattcaaagtgtaaaaagaccctgtaaatttaacatcttcaaggctacaatactgaacacaattctataggaaataaattagaactataatgtccttgctttaagcctccattgggcctttacacccatggaataatggctcttatacacaactacgtcactctgattgcttcttggaatgacgacgaacctaactaatcaacacgagtgttttcagtgtattttgtccttactcgcacacttcatgggaaaacttcccaggttgtcacccatcttcaaattacctcaggtcaagcacacttaactgtgaagttctttcgtgatggattactgaaaaacaagatgcaccttgttgatat

SEQ ID NO: 237690 - DNA, 977 bp, Cannabis indica
ataattctaaaatgcattccataacacatgatacaaaaatcaaataatacaagtctcatatcttaattaatatatatattaacctttgatggccgagaattggtgggaagcaatgaaccaagagccatataagtctcacttagcttcatccttcttattttctccttagcattatgatcttgtttcttaaccattaaatcctcaatgacttctggctgaactctcaattgcttttcatcatactttgattttttgtcatcagacaaaaatgatattctttccatgtcattattgacaagtaaggagtttgagtctatttgaggaatagtataagaagtacatatgttgtttccttgttcaacatcaaatatatgtgaagtttcatgacaaggatcatgaatggttggaaagttgctatcttggtagtgtgaggaagctttagtattttgttgtaatattccattaatgtcattaatattgcttaacaattcggcaaatgcagaaacttcttgctgaagatcaatagggtttacattcaattcatcacaaggactaattggagtactctctagaagccatagatcaccaaagccttctaaatcaatattatctatgaggaaatcatattaatagagataatttgttagactacatacaataagattattattatatatatttttagttacaaaagagaaagaaagaaagaattgtaaatgaatgaatgttcacttcattataatgaaacagaggaggtacaacactttatatacacacacttcagtcttcagcaacaacaaactaacataatacctaaccaactactctaactaataacagaatttgtaacaaactcaacaccttacaactaacactttaatactcccccttaaggtggagaggatatattacaaattcccattttgctcttgagagtttcaaattggctaggaagcaaagccttggtacaaatatca

SEQ ID NO: 237691 - DNA, 1106 bp, Cannabis indica
tgggacatatcgaacagaaagcattttttccaatatctgatcccgcacaaaatgcaaatctatctcaatatgtttcgatcgagcgtgaaagaccggattcgcagctagagcagaagcactctggttatcaacccagataaccggacactgagataactggacctgtagttctgtgagtaaagacacaatccatttcaattcagctgcagtattggccaatgatcgaaactcgctctcagtgcttgagcgtgcaacgacattctgcttcttagcagaccacgagattaagttgttgccgaggtagacaacatagccaccagtggaccgtcgatcatcgacacaactggcccagtcagcatcagaataactttgaagagtcatgtctgttgctggtgtgagagtaagccctcagaaatagtccctttaagataccgaaggagtctcttgcatgcttcccagtgaggaacagtaggagccttaagaaactggcttagtttattgataacaaaagccacatcaggcctcgtgagagagagatattgcagtgcccctattgtactcctgtagagagtaggatcttcgaataactccccatcattgagtgaaagtttagttgagttgctaatcggattggaacaaactttggcaccctccatatgtaattttactagcaaatctgtgacatattttgtttgtgagagaaacatccctgttgaatctctgaaaatttctatgccaagaaagtaatgaacttcaccaaggtctttaagagagaacttgtgattaagatcagtgatgagtgtggagatgagactttgatttggacctgttataagaatatcatccacatacacaagtaggatgattaaagaattacccgagccatgaacaaaaagagatgtgtcagatttggaagcaataaaaccccactgtatcagatttgttcgaagtttatcattccaagctcttggagcttgtttcaatccatagagagctttgtgaaggagacaaacatgatcgagtttggaagcatctatgaagccagggggttgagacacgaacacagtttcagttaattccccattcagaaaagcattactaacatc

SEQ ID NO: 237692 - DNA, 1903 bp, Cannabis indica
attcattatagatcttgcgttctttcgcttcaattaggtttttaaccaaatgtcaggttatatgtttagttcactgatttgcaatatgtatgtattttaatcaatttagctttctttcgttgggatgaaaaatcgatggttcgtgaattttttgttgtttaatatagtaatttatttgttcagtttatccaattatgatttattctcaagatgaatgctggtgaaatgttgctatagctgtttaaaattcctaagtttttttttttttggtttttaaggtcgggtccgatgggcccatcgaatagggcatcgggcccattggacccgatttcaaaaacccaaaacatgccccatcgggcgggcatcggacgggcatcgggccccatcggacccgacccttaaaagcccagaaaaattgaaaaaaaaaaaaaaaaagagtttttgagaggggtatttttggggttttgaaaaagtggtcatatattttcaatgtagaaaagtattagtttagagaaaaaaaatattaagtatatgtaagtatagaaaatcaaatttccctttagtttttttcattttacccaaagttcgctatattattaatttttttgaatgaaaatagataacttcattaagaaagaacagccaaatcggccattacagcagtgttaatagcattagggacattgctaccaacaaaaatacaatctgaccaataacaagcgccacgagcaaggcaatgtgcagcgttgttagcagatcgtttaacaaaacaaacattaacatgaggcaaagactttaaaagattcagacaatatgtaatagtagagccaaacacagaatgcatgaccacattactttgaagagcttgaacaaccacaagagaatcagtttccaaagtaacatgttcccatcctttatttttaatccaacttaaagcttctttcacaccaatggcctccaccaaactgggttgaaaacaccctgctttgtgcatgcagaacgcttcaatcagctggccattagagtcacgggctaggcctcccacaccaaaagaaccggatgcagaaaagacagcaccgtccacgttcaccttcaaaaaaccagcagctggtgctgtccagttaatgtagttgttgctggtgttgtttacgacaccaggcagagggaaaacctgttagaagcaacagttttccattgattcaacactgttgttgcagtggtaattacctcagccgctcgagtagcatttttattccatagcagtccgttccttgctttccaaatagcccatgccaccataagagcttcttcaaacaccacaggctggcagttatttaaaatctgctctatccattcaccaaattcagtccccataatagcactagtaggcacacttgacaagttccagcaagattgagcaaaattacaaccaaccaagacatggaaaatcaattcttcctctcttgaacaacaaacacaatcaagttgcacaggcacatgtttggtataaagttgagtacgagtgggaatacacccagtgattgctttccaagcaaaatgaataaccttaggaggaactttggttttccataaagaacgccaaaggttcgattccatatcagcagaccatctccctttcgaagcttgtaaccattgatagcagctcttgactgaatagaagcccgaattctcatgttgctaaaaccaaaatgtcattcacttcaccagaattcaaggggatatgcatgataagatcccgatcacgttgctcgaacaggtcctcaagtatttccacatcccattgatcattggttgctgtcatcagttgattaaccgaagcccccacaagagcaggatgagtactcgacacacacaggttggactgatcgggtaaccaaggagt

SEQ ID NO: 237693 - DNA, 511 bp, Cannabis indica
gcttattcatccaattccattattagtagttagttagttggttgttactgttaaccaactaactctgttagttgagtgttctttggttgcattgttagaaggttgttatcttctctaatgcctaatataaactatttgtaaccttcttaatcataaggaatacaaaacactgttcttctaatctctctctgttcttgtttcaattcttacatggtatcagagctttctctttcgttcatcaatggagatttctcgtacctctaatgatggagcttccagattaaagaatgctcagacatagaataatcaccaagttgtaccctgtttcttttactcattttctctcaattaaactcgatgaacataattaccttccatagcaacatcaagttctagccttgatcaaaggaagtcgaaccagaaatacttcgatcttgatagagctccaccaaagtacctcagtgttgctaatgaaagatctcacattgtcaatcttaaattcaaatattgg

SEQ ID NO: 237694 - DNA, 728 bp, Cannabis indica
atggtacgttctagagagcttgcctcggcatctgtgattgcattttgatacatgtattttgatttgtgtggtaggtgccctgctcactttggcggagttcgttatttctcaacagcttttctcaacatctcaaggtactaaattcccctcttctttgcttttggatttcgcattgtagtgctccatgtgttgtctccatttctctcattttgtaaacttccatttgtcatgcttagaaaatttagtacctctcttttactttttaggtcagggtgtcgagacgttgcgtctcactgaccttgtccaccttagtttattttctagggatatcttggaaaaattccatttgtggcttacattattgacatattgtttttctctctaagggtccttgagagaaatccgatgagatgcatgctgggctaatgttcgagaggagaggccatctaagggtccaagcgaaaatttatttagttttgagtggggagcaggatggcatgactgtcaattccaacttgtacctttctaggcttaggacatcacttgttaaaatccaaagtcaactgaaatacattgagagcacctttccatcagatcccactccctcgccttctcccgaggcttatgcgcccaccttggatgaggagcttgaagtcgcttccatttttccctctcctctctcagggttgcctagggtcaaggcctgggcatgcaagatttcttagaaa

SEQ ID NO: 237695 - DNA, 972 bp, Cannabis indica
attttttgtttacataatcatatacgttatagttatttaagatcgtacttagtaaattttttaaaaaattctagattagtttaaaatgtacaaaaataagatttaaacatcttactgctacacgacttattttttttttatattatgcgtagataattaactatttgaaccttattttcggcaacggtaaagtattacgaaattttatagaaaattaaaaaattatcctaattaactatcacgtacgctattataaaaaaaatagaataaaaaggttttttaaatacgaaaacaaattagaataaaaagcttttttaaatactaaaacttagaataaaaattgtgttgtcgactgggttactaaagtgttgaggttgagttagattgacaaattattgcaaaacttttgagtaagaaagatttttgtatggcaatgtttaagtttttattttgaactcgctctctaaatattattactcataacattactaaattagctctctaagtcatttgatttatttttagcgtctaataataattatctttcattgaaaaaaaataaacaaataaattagagagtttatcaaaaaaagactggtgtagtacataaatttcgaacattataatacatatatttaaataataattagtcaaaacaaatcgtgattaaatttaagtttacttatttttgatttagtatctcactaataaacaataaacaaactaaataatgttgaaatttttgtgtagacccttaaacgattgttctggtagattatttatctttttggtattcaaaacagttttttaatctatttttttttatgaactcataagatttaaacaattacttaccacacacgtaagaaaaataatcgttagtacaataaaatacataaatcttattttcagtattgtaaattatttgaaattttttgaaaaattgtaggtggtcctaaataactataatat

SEQ ID NO: 237696 - DNA, 929 bp, Cannabis indica
aaagttgtcatagctagttagacttaattaattagttatgtaagaaaaagcttatttatgaaattttctaatacagatatatattgagttttttttacttgagtaaatatcattttagattatgtgttttgcaaaagttattaattagaccctttattttattaaatgacaaaatagataatatattttctaaaatggtacaaatagttgcttttttttttattaaaataaagcttaacaataattcaatttagaggtgttataacaaaactatctatattttctgtatctgttcatattcggaattgtcttcaagttagttatattaaataaaattatcgaaaattgaacttaaggtcttatttttttatttttaaaaatattaggtctattttgtcatttaacaaaatagaaggtccaaatcgataaaaaaatataagtccaaaatagtatttatcctgtttaaaagtacaaaaaaaagtaataacttgaggttattttttgtttgaatatcaataaagtaatatattttttaaatgactttttttttttgagtgttttgataataaattataaatatttacttataagatattattaagtaaatatttttttttcaaatattattattagagagagaaattaagaaggatgtgattggggcaggtcattaaatttttatcttttattgaaaaattaatttaaatataccaataaaataatcatatgttgataatgacttcacagctaataaatatctatagaggttccaacaatataatttaagtattattatggtcaaaaattaaaactaattatttatttgtaaataaaagaaaatttcaaatatttaccaccaaattactcaataataattgatgaaaacttgtactaatttttaacacccggatatgacttcttaattttca

SEQ ID NO: 237697 - DNA, 5450 bp, Cannabis indica
agcttcctattctgttgctgatcgtgttatcagaagtaatgatgtttcttctgagtttcataatgtaatcttaaaggattgaaattaataaagtgatgatttattttcaaaaaaaaaaactctcagttgtaaataaataattaagtttaattttttgcggtaataatacttaatttatagttctggaacttttgtagttaactggctatttaatattaagtaaattgtcacgtgacaattcctgattgattgatcttcaaatacctttggcagggctagccctagactaatttggaccttaaaaaaataattttttaaaccatttttataaaaataaatagtatctttaaaaaattattaaaaaatatgtatatttatataaaaaaaatcatttaggccccttataggagtgaaccctaagcgtagacctagctcgcattagtttaaggccggccttggccattggtcttgtccttggccttgcgtgtcgggtgcaacttgcaagtggcacccgttgcaccgagactgcctgcacttgccgatgaatttggagtggttggtgggctcttggatgacacctgggtaaacaacccggttgtggtgggtgtatcaaaccgattcacaaatttggttgtgagtctcgaatttaaaggagaagacaaaatttgataggtcgggaccattccatgttagtgaccatctctcttcatatttggccaaattgtgttgtgaacttaagagaatgtatgattttgatgatgttattacgacacaatcagccaaacaaaaaaaaccagaaaatagaaaaacacagaaaatttagccaacaaccatttctacacaaaaaacagcataaaacaacaacaactaacaaatcgaccatcaaaataacactataaactaaatataacaaccaacaacaacattaaacaaagaaaaatcattacccattaaattcatatataatgctccatttaaaaaaaccaaccaccatcaaagcaccaagcttaatatagtttgtataaaaatttgtgttatttgataatcaaatgagtgaaaagaagaattttgtaagtgaataaaattgagagatgagagaagggggaagtgctgtgtgaagagaagggaaggaagataaataaatgttgtttttttggctgtaggggtactatgaggattagaattaaattttgtttagtttcttaatattgcacaatataagtttaggagaataattttcccctaatgtatgcatgaaaagttaaattttgtgtgtcctggaacacaacaagatagacaagaagaaagaaactaacagaaaaggccattggtatagtggccaaaaagcatccgtaaaatatcattcatcaataactaatagcaaaattctatagtattttataaatcacaacaaaattatagaaaaaacgataatgtatcagagatcaaagttaccaaacatcaaaaatagcagtttggtgcataaatataaagaaattgttttagttatatataatatgcctacgtaagctgtgaactgttaagtgttgggcgttacagcaacaatctttagcaaaatttcataaaacttcattaggcaacaaaatttcccactcttcatggcataagcccacaccaaagaggtataaacgggttattacttctcttcttctcatgtatttgtattaatttagatcaacaatatttaatttttttttcaaaaaaaaactttgcaaggcaaaacaaatttgttatcttctgcgcttggactctttccgcatctctgcaaagtaggcatctaaattggattgttcccataaacgcctctgaagaagatcttcctttgttacgtcgtctgcaaacaccatatacaaagaataatctcagggacaaacaagtatgatgtctaatattattataaggcagcataagaaaacaaggtaatggtctgggagggactctggtccttatttaataagcattgttaaacaaaaaataaaataaaaaaaaattgaactttactcacccatatttacccatgaatcaagacgcaccctaagggctctctgtgtaaggtaagaggcgtcatcccaagtatatggagatttctttaccttgtatctccagaaccagtgaccacaccaaagtaaaagctagatttatcaaagaaattgaaaatgtaagtcttccaatgatatgattctgaaatcataaacttgacaaaacaggctaacaaaatatacgactccagcttcaaaattgtgtagagttggagaagttcctgaacaacatttaaaggaaaggcaaagaatctaactttggaaacagtgtaaggtagaagtagaaagcgaacacagagaagttcccagagagaaggtttcccggcacccgttatctgtaggtcaagttctttgcttagatcttcctctgttttcctgccataaaaaattggctcacatcggttttaatcattattcatcaaggataatgagcacaaaagacaaatcatatgtattttataaataagtggaaaaaagagaaagcaagcacagaagtatttgaaatgtaagaaagccacgttagatgtttttaagacatcaactcactaaatttgtgaccataacaaagatttatgacatgtgctaaataatcacattagtcgaagctatcatcaatagcttgtccattccaaacatcataaacaggcactcaatttctaagtggaaaaagtattttatattcatacttgtccatttgcttgctactctttttcttatttatagctcctccattgcgctcaagctccaaagccttcagtctatttttgtacgcaggtgtcttcttgaccatgtctatagcctaaaaaaacaaaaaataaaaaaaaataaaaaaaattaaaagaatcacgccaaaagaatctggctgcctttcctaatcttctatgtcataaaataacaaatttgcatatgaagattgcaaaaagtatccaactgaatttttcattccaaagaggtgtcataccacaagaagaattgccatataaatggataatatacatcaaacggtgtaatatcaaagttcactgcatgccacttgaagcctaaatgtgcctctatcacacaatacctgattataccttgtccactgattaaggtattgaaatcctgaaagaaccagaagaaggccaataaggacagcacgtggatcctgtaaggtagaaagccagacagtgttggaaaaaaatacacataatgaaattgagctcagttatctacttgcttaatttaaaaaaacaacacaaaatatcttactgtcttgtaaccatagtacgcacgatagtaacgagcagtgttgtagaacacctaagaaaaaaaaattatcaattttattattttcagacattggaagctcaaataaactgaaactctcactattggcaaattatcaatgagtcatttcttctctttcattgtgttattacatagacatgagagactagtatacagatatggagaagttagtatacacatgagtgaataaagattagcattcattcacgtgagagactagtatgcagatatggagagagatgaaggtaattagtaattattagacatcagccacatcataaaaaaaactagaaatgaactcttagtagctaagtaagaattggaagttagcaatggtctaccataccaagattgtaataccaccacgttcaccactacaaatcgagtaaagcgaactcactaatttcagataatttacttgaatcctactggttgtagtatgtactactaatctagaagagtaatcaataggaaacatgtggtgttaggaagaaaagtgtttcattagtaaggaacaggcaacctaccctcttctataatattgatccacaagctaaaaaccaagagtaagtataacgttcaaaaatgagcactgctataacgcatcctagagtgcccaacaccctagaacatggcatatcgcaaagcatgtccacatatttaaactaaaattaatttaagttcaaatgtctggtagaagcataggatgttgaacacgtagtgctctatagcatttcccttgaaaactaccaactttataccattatggtacaacatagttcaacaatttactggacgagttttaacaactactagtgaatgatgtggtctcactctcaaataatatgctagttgagtctagtactcaggaattttctgtgtcattactccaaaactaagcaattgcctatgactaacaatctacaaacacatccaattttacctcctccggatgtgcgattgcataatcgtactgctccctcgtggcctcatccttcaaaatctgcaatgtaagacaatttatttcaattctcaccttacaaaaaaggcttaaaattcaaaattatcagcatttgcttattcaaataactaaacatcgcaatccatttttattttttaattacctcatacgcagtagcaattttgacaaaaagctttttcgattccggatcaggatttttgtccgggtgactgaatcaaaacaccaaaaacacagaacattaaacatttggattccataattagggatagaaataaagaactgaataaaatgaagatctcactgtttcaatgagagcttatagtaagctttcttgatttccgaagaatttgcactttgtgtaaccctataaattaagagggaagagaataaagtaaatacgcaatggagagaagggtaataggaaaaaaaatatgagaaaaattttgagttgaaggagaaatcttagcagccgaaccccaggagatcgtagcaatcatcttcgtcgcagtagatggccgttgacggagatatgagaagagacagcatgagagctaataggagagcgaaccaccgaattgttgccggtggcgccatggccttcggaccggtcagcttagaagtcgggttattataatgggtttcgttcgcggagggagagcggagcggactgcctttgtgctgtgtttggctatacaaaacaaaagaggagtctttctttccaattcactaacattgctttcattacaagtcaaaaagtcaacggatctaaaattaacaaaatcacaaccattaagatcttggatgggaaatgttgtgtaatattttgttgatgatattttgtaataggtaggggtcttcgtggtgtgggtggtaccgtttttgactattttttcaaaccaacctgcacatgcggtttttcaaattttccaaaccgcactcgcaccgcgaaattaaaaacccgcaaaaaccgcaccgcaaaaaatagtgcggtgcggtgcggtttttgtggtttaggcagtttggactatcactaaataatttaattttcacaaatacaacaaactttgagcaaaacttgtcaaaataccttaaggcttgaaaaaaatattaaaaaaaaa

SEQ ID NO: 237698 - DNA, 960 bp, Cannabis indica
gacctgggctttaaagggttggccgaccatgacctcaataggctgactggccataaaaccaaataacctagttggccattacctccacaggctggtcggccatagctccattcaaccagccagacaatggtccaatgtggctagccacctggtctataccctggctggcttgatccgccaacagtttactctcacacttctagtctaatgtgaccaagaagtaaactacatcttgctagcaaaatcccttgatgaaaggaaaaaaaaaaaaaaagagagcaagccaattcaaagcgacatgtctgcccataaagagttactaggcccttcgacaaatagatcaaggaaagaaattcttcttaagagacttactccctgaagaatattccttgacaacaaacaccctacatcaagcatgcttggacccaactgaaaaggtttgcactgagttacaagataataataaaggtgcatacaagcctggtgagtacaacaaaaacttagagttagctcttcaaccaaaatattggaatagagaacatctcggtaagtgctctcgctagccaacttgtatagtggttattctattgtttcaccgtgcaggaatccataaaagagctagtacccatcgccctaaagtgattgccttccatcactcttcagtaatggcctttgcacggtaagccctgcagaggtagccatatataaaagagctagtgcccatctcttttcaacatggcctcccatcactcttcaatgatggtcgttgtgcaataagctgctcaggggtaggcacaacgtgattttaaaagcaaacactaagttgtaagcttttgttacatgtaagaccaattgtgtctaaaccccttgctaacaaagataacttcttaaagttattctttttcagttccacatgcgtacaccaggtagcacccccaagaaaattcctaggcaaggtct

SEQ ID NO: 237699 - DNA, 885 bp, Cannabis indica
ttttttctttatttcttcaatgttttgaatttcatctcattttgggaatttggaagtctacttttattaatgtaaactattttttatttttgttttttttcaagagattgaatatatatatggatgattttttaatgggtaacacccattcacgggtaataaaaaaattgatgaggtggcaatttggtgacttgctatagtaggtcaccaacaagattcttttttagaataaaaaaattatatttattttcttaattatgatgattctaaccaattagaaattatttttagaaataaatttactttgcttaaattactctattatctttacactaaatatgaaaatgtattaaatatggaggatttttttgttgggaggaacaacacattcgtttttaattattttttaacaaaacatttattttttcttgatgggctataatgttcattaaaaaaggtttataaaaagagaaattcattcttacaatcttttatttattctttattataattttacttttgtttaaattaatatcaattttgctattattatataacgtggatcattaatatgataccgcttttttcatattaaaacaacaatatcacgtcatttacttaggtgagcgtgtggagcttagaatataagcccacacactagctactgttttaactctttttttttttttgaaaaataatattttatctctttaattattaacgatgtagtttttcaatattttttatttagggtattagatttgatatacattcagatttaataatacatgaagttttgaatttggtatactaaaatagtggtgtcatttcatcagtactccactttagtacttttattacctttcttatctaatggatcaaatg

SEQ ID NO: 237700 - DNA, 696 bp, Cannabis indica
aaaaagatccttcgtcttcgatcaactgttaatgaaactggaattaatgcagctgtaaagagaggtaaattcagttcaaaattgttttattactcgtatattcaagctcacactgttgattatgctataaacatttgggatagaatggttcttccaaagcataggttcattggatggcaaatagtgaatgaccagctgctaacaagagacaacataagcaagtttatctccataacaactgatctctgtctggtctgttgcttggaaaaggagacacaccatcacctgtttgttaactgttgtttcacccgtagagtgatcaaagagataacaagctggtgtggcatttttgactggccttccaacatcagagagtggttatcgaggtcttccaacagcctgcaagagaaagtgctcaatacagtagttttggcgacattgtacactgtttggactaatagaaattgttgtatctttgagatgaaatgtaagacagctagagctatgagtaaagagatcaaatcttgtgtaaaaattaggttcttaagcggctgtaatgggggaaaagggaagcttgatagctttatttttaatgtcatttcaggttggctttgagggctgggggtttcggccagctgctttgttttgctttcgttctttgtattgttcttgtttgtttgaataaagaatcttctt

SEQ ID NO: 237701 - DNA, 593 bp, Cannabis indica
aaagggacagacgatttggctccccttattaaaaatacgttccgatagatactctaaatttctttattttaaagtttctttaaaatgcactctattcaggctcaacatttatatatattattgctctaaacatattttattaattattttaggttttattaataatcattttttatgaaaatatgtatatatattgatattatacatttgaaataaataaaatataataaaaaattttaaaaagtaaggttttgaagatttattttaaagaagttatgtatggtgtaatataaaagagtgcagtaaaatagaaaataaaaataaaattctagtggtgtattttaaaagatagagtagagaagttgttgagagtactctttttttttaactttacatttataatttgataaaaaaaataaattacatttatactttccctacttaattttcttcattccgttttgtatttattaaagctttaaaaaataaattctcttctttatattttagctgacctttttttttttaagttttctttccttctttctcttctccctctctatttttatttttttcaaattctctctctctct

SEQ ID NO: 237702 - DNA, 547 bp, Cannabis indica
tttttctcatttataaacttttatttcgtaattaaataaaaatatttatatttaatatattaatatggaacctcttcctatgtttgaaataattaaagattagagcattttaattttgttaattgctgtctttttctttcaagttttagtcattaaaaattctcaattgtaaagtatgtatacactactctacctaaatatgtattgggaaaattttaaaatggatccctaaaaatgatttactgatacactcttatttattttggcatttagaaaacttttttagactaattttttttatgattgtgtacattacagttgacacattatgtaaaattttgaaaaaattaaaaaaatttagcacattgaaaaataaggttcaaactgtctgtctgttacatgcgtgtgaaataaattgtatgaacattgctttgtatactgcaaaatattctgaatttatcaaaattcacaagatgtcttaaataattataatatatacaataagtaaaaagaatgcattgtataaacaccctatgtattattatag

SEQ ID NO: 237703 - DNA, 644 bp, Cannabis indica
taataaatgtgttgtgtagcctaatatataatgtttctactatttcttagtagctaaattgctatacaatattatatctggatatatatttaaataaccaaatttattatatatatagaccattgttataaatttttacaaaaaattatttgtgattaaaacatagcatttagatataagtttgtcactaatttagttttattcacaacaagcattgtgactaaaaatacattcaatcataacaaattgtgatttttgtaactaatacttttagtcacaatatagaaatgataatttataattaattagttcttttttatttttaatcactaattttattttgactaaaaatataaattttgtagtacatgtgcaaattgctactattgccaacttcattttattcactaggtagcgttttagttggaggtaatgaaatagaatggaaaggaaaggaaacaattttcattccatttttttgtttggttgtatattaaaatgttggaatgtcattctaatatggaatggtctttccatcattttggtagaataactatttttaaactaaaaggaaagaccaatctaatgcatagtgagaaaaaattcaataatttttttatcaatttttttatgtattttaaatt

SEQ ID NO: 237704 - DNA, 1789 bp, Cannabis indica
tatttagcatggcataacactcaaaatcatttaattactagggtaataaccctagaccatataaccgctcattttagggtaataaccctaatctcagttcttaactaatcataaccataatataaaatatgagtgccaccacgcttaaatctatgtgcaaactactgtcttacttgatgtcccgcaaatgtggagattccaattccctgggtgctcctgaccaagtgccggtaatcctaatcacaatattttaggattcacaaattgggttaatccctagatccattctcacataattataaaattggcattcaaaatatagataagaatatagaggtcgaaataagctttctgacgatataaagaacgtcccaaacggagtcccgagtcaaaagttatgacgagaacaaaatccataaaaaatataataaactgccaaagccatggtcgcgaccagacttgcgatggttgcgactagagcccaaataggggactcaccctctctagttgagcactaggtcatgaacactaaaataggtcgcgaccactgggtttaaaaaccttgaaaatcatatttaactcaattgaaacttaggcaaaattatcccaaacctaccaaatcatggtagggcattaaaacacataatttcaagcttaattctcatgtaaacatacatcgcaaacaaaaataatcaaggccaatatcagatttctaactctgaaaacaaccctaaaaacttacactaacaagtatagatgcataactcataatttaacaagttcaaacgaccaaatagccatcaatttactccaatcctttacacatgcattcaagataaaactttttgaatagagcatgcttttcaaactacaacaaatctaaatagaaagttcagcaagaaaccttagagcttaccacaaattcaagcacctacccacaatagattcaactccaaacacctccaacttcaagaacaattaacaaagtctaaacttttttagaagaaggtgaaagaggagaggggggttttggtttagggtaggaggaaaacaactcaaaaaatgtgtttcataattatccaacatcacattttattgaaagtagaattaaagggtcaaaaagacaaaactgcccctagggccataacaccacatataattcatccacgggagaaattttcattatcacacaacacatttactcaaataattttcagaatattcattaaataataaaatgccaatataaaatcccaaaaatatatttcggccccaaaataccgaattgtgactataccgcaccaacttgtcagaaaacacttgcaaaaaggacacagcaagtatactatataataatatagcccataagcgtgcaattaaattaaatttacagttttaccgttctcaggttaaaattacaaaaatgcccttgactcgccaatggggcttaacatgccatttatcaacttaattcacatacaataaattatgtaataatataattccattctaatacatatttaactagttagggttcgctaatcaattttttaatcttaggatattacaagtttggcctctgccaattttatgaaatagtcgacaacgacaaagacatattgcagtcctccttccccttggggagtcattcgatgagatctatcccccatatagcaaatgaccatggagactgtatttgtatgagcttgttcagtggagctcttgggatcttagagaacctctagtacttgtcacattttttgacatagtccattgaatcctcaatcat

SEQ ID NO: 237705 - DNA, 575 bp, Cannabis indica
aaggctttttgttttgtctattataccaaatacacatgattatatttatgcaattaataacgaacaattatgaagaaaaaaaatgacacatgaaaatgggtttattatttctgtttgttcgtagggttaaaaatgagtttgtgacatattttgggtcttttagcatcaatttgaagcttctctcaacacatcttaacttagtttagcctctcattaataaagtggagtatctttgtatattatgaaaaatagagagcgcaagtgaaataagcaagaaataaaaatgaagattattttaatatacttaactaaagatgctttggtagtatggcttaatatatgaagtaaatgaagacacggttagtttgataaaactaactaaagttttaacaacctgaagagtacctcaactaacttaattaaaactaattctaatatatgtagaaaataattactatttatttctattaattaatttaattaataaaaataatagaaatttttacattacatttctttttcgttataattattctcatttatagggataagaatttgaattattaaaaaaattg

SEQ ID NO: 237706 - DNA, 920 bp, Cannabis indica
actggtgaacttgtaagatacatccatccatgctatcattttatacttttatctaaggaaaaatcgttgcgtaattcccttttgcttgataattttattcttgcacgctttgttttatgtacattcgacatgttgcttgttttccttttctcaagcaagttttggtttttcgtacttgatggatttcaagctattactatctagcattaagctcaaatctcttctcccaaaacccgcatttagatttggtaggattgtcaatagatgacggccgttaccaaagtttctttccaattttgttacataagctagtgaagaaaatgttttgattgcatatatgtatgtgtgtttattttcattcccattatagcattgagcagctcaatatcttcttcccaaacccgcatttagatttggtaggataggattgacaatgcacgacagcagttaccaaaatttatttttggactttgttacttaagctagggaagaaaattttgaacatttgacaactttttagttaattaagggaaaacaattaactgtatagataaggcgaaaaaaagacattgttttttagttatatatatgtgtgtttattttcactgccagtatagaattgagtgcataaagggttcatttctgtgcttatttagaattactagttttacgctagaaggctccacaaatgaacttcatgtctacaatgttataatattttggaatgtactgaagaatacttattaacactgacaaaagggtttttatgtaaaatgtatcacaggaagttcgagtgaggttttctggttatcagaaggaggatgatgagtgggtgaacgtgagaacaagagtgcgggaacgatctattcctttggaaccttccgagtgtcacaaggttcaagtcggggatctgtctctgc

SEQ ID NO: 237707 - DNA, 351 bp, Cannabis indica
cttgtgactaaaacatagtatttagtgaaaaattatcgctaatttagctttagtcacaacaaatattgtgaataaaaatatatttagtcacaaataaatatttgttgtgactaaatgtatttttagtcacaatacgcgtattgtaattaaaagtctaaaattaaatagtgacaacttgtatttaaatattatgttttagtcacaagtaactttttgttatgactaaaagtcatatttagtcgagataattacataagacactaaaaaattacagttttacgtttaaagatttttattttttattttacattttttacggtttttcatagaattatataacatgaaaacaac

SEQ ID NO: 237708 - DNA, 937 bp, Cannabis indica
taccttgtttctttgcaaaaaaattaggacaatatatacatatacaatacttaaaatatatacaatataattacaatatttttataaatacattacaactacaaaatacacacaatacttattcaatataaaacacaaaatacatacatatatactattaaagtttaaattttaactttattaccgcaattcggcgactaacaccaataaaaatgtggccaccatgcacaattaatagaattaaatcgatgtacattactaaaataaaaaaataaatttctaaaattaatagaaatcatatttataccttaatggacgagatttaacgttttctccactaaaattggtggttggagttataaccaccacaattacttcttggcttcgatttacacttaaaataagataaaaatctaaaaaaaattgggagtataggtttaggcatggaaaatagaagatttttaaaaaaaaaatgggctcaaatggtgaaaaaatggtgaagatatcggtggtggtcgtggtggttggtgagggtttggctcttttctttggagctttgtctggtttgagatactggcgagggtttgggtgaatgaggaagacaaagggttggatgttgtataaaagccctatggcgttggttatttgaaaataaccgacgacataggctacaagtgtcaaaaataaatgacacctatggcgtcagtgattttcaaataactgataccatagggcgtgtttttacaattttttatttctgattagaaatcgaaggcaaaggattttaataaatgttatagctatggtttttataaaataaacgcctctaaatgtcaattttcaataggcaagtatttttacatgttttagcttctatttttataaaagttatgaaaaaaaacagcctctaaaaggttgttttgtagtagtgactact

SEQ ID NO: 237709 - DNA, 987 bp, Cannabis indica
ttaaggcacaaaacccaacacctggttggactgactatccattgtctacctgcttgtagaccctaattgacttgtcgatgaacgttccttgtaatggatctcttattagatcctaatctcctccggtagttctagcattggactatcttatcaggtcattggcctccctattatggtggttcagctccacgtgatgggcccggaagatggtctcctggtcgttcatccaccttaggaattcgcatctctgctaggtgaaagcatcacaaccaacagtgcatgattcttcttgtcctgtctaagtgacctgccttacatcttctctaagcctagccaactcaatatcatccccaaggtccaacttaggctcatcaatagatggttccccaattcctggccatgtctttgttggattttgtgccctaaataaaactcatttcaatataatcagatttactaatcaataaaagatcagaaatcattttatgttgcacgattcacatgatttatttcatgaatatgtttaatgtataaattctattaagtccaaaatatatatatttattcatgattatagtgtcgtccacagtggaatataatcatgattatatgttcaaaattataagtctcacgatttgtcagtacactggatttagacggacattataattggcgatacggtatacttacaccttgaataagtgttatgttctttctagggcattagcaaagtttaccagtatcaaatgtatggagtctacattggattggactgatattgaacttcgataagatatcataaacttactgttatatctttctaagtcaatatcactggttaatcttaggtctatagatcttaatcttgatatggttaggttcattcttagttttattatttatgttcttcaattttctcgttaaccaattggaccttctcgtgacattgggattaaggacatggtagttcaattgagtgagagcgct

SEQ ID NO: 237710 - DNA, 737 bp, Cannabis indica
aaaactctgttttatttcatttctttgtttcattatattttaaagtatttttacatcattttagtagaataactatttcattttaaaattaataacaggactactattttgatactagataagaaaaaaatttatatttttatcaaattttctatacattttaaatttgattttgttacattaatttctattctttatattaccattcttacatgttcatatgtttttattcatttcaactaaacactaccttagattgtatttggttgatgggaataaaaagaaattcattttcattccacggatcgagccaccctatacataagggggtcatgtctctccaaaattctaaaaaatatatataagggatatttgcagtgaaacctgcatttataattgttacacttatgactttaataaaaaaaaaaataggcagcaaaaataattttatcttacgattttgttgtagtcgtactatatttttgtccattaagtgtcaactcaaaaacaaagtggtgacatattattagaccatgtattaaataagctaaaggactatatatatcgccacgtgtttctgaactagcacttaacgggcttaattgacacttaacagctaaaaaagggtacaactgtaataaaattgtaaaataaagtacttttgccgccacttattttgattagggtcatatgtgtaacaattgtaaattttaaggaggtttcgctgcaaatatccc

SEQ ID NO: 237711 - DNA, 1033 bp, Cannabis indica
ttctttgcggatgacctaattcttgttggtcgagcgaacctagtagaggccaacagatattggcaatgcttagagaatttctgctcttggtcgggccaacaggtcaataaacttaaaacgtctattttcttcagtagaaataccccggaggatttgcgcggtgtaattaaggaagccctggggatcgattcccctgaaggttgcatcaaatatttggggttgcctctctttagatctaggcagaaagatgcggatttcaattttattctggataatcttacttcaaagcttcagggatggaaagctaagactttgtctaaagcagggcgagctactcttattaaatctgtgggattgtctctgcctatgtatgctatgcaagcgactaaactctctagtcgaatggttaacaagatagatgggatggtcagagatttttggtggggctttgaaaaaggaaatcatggaattcatctccgagcttgggataaactgtgcctccctaaatcgcggggtggcctgggtttccggaagaccaaagaaatgaaccaggcctttctggccaaatgggggtggaatattcttactggaagtcaatctttatgctgcagtgttttaagagctaagtatctaaaagggcaagacttcctagagttgtaactataaaaattcagattcctggttctggaaaagtgttgttaaggcaaattccattttgagaaaaggtgcctgcaagatggttaccaatggtcagaatactatgatctggggggatccctggattccgcaccgtaaagggttccgcccgaaaccgattgggggtctcaaccctaccatcaacagggtggctgacttattatcagccaatggccagtgggatgtgtctaaactgcgaggctgttttgatcaaggaacggtctctgacattcttaaaggtgggcatccaatctggagctggtatggatagatgggtttaggacattagaaagtaatgggcgtttctcgtctaaatctgcgtatttggctcaggctc

SEQ ID NO: 237712 - DNA, 787 bp, Cannabis indica
acaccaattcatggctgcaacaggggtggcaacctccccaactagtgagaaatcaaaaataattaaaagaaaactaattcaagcagaaatcatatgagcagctcaagcaacaatcctatgagtagctcaattgttacaacaaggaacccaaaacaaactgtcttaggaaccaagaacaaactatcccagaaatctaaattcagaatggaaaacaaagaataaaacctttttgaaagtttccaatctgaaattcgatggttcaaaaattctgacatttcaaaatataaaaagctctaacctttaatataaaatattgaagaaaataaatgtttattaaaacattacattttttttaaagcaatgacattaaaacatcacattgatacttagatagaagcttctttggtggagatctttcttttcccttttattttattttattttttgtttttgaagaaggttaccggcatgaattgtattcccattgtatttgtttgggactaagcatttttcaagatagctgaacccattcttttcttgaagctaatacatttactttcattatatataaccattataatgaaagtaaatggaagttaaaaataaccattataattcttcttaatcttgtctgcaataagcacagccacaatctcatcatcatcttcaatcacttctctccctttctaaaatttacaaatctcttcaatattagtataaaataaagacaaccttccctttattttcttctcattgcatcacaaagaaagctccttcttcctcatct

SEQ ID NO: 237713 - DNA, 1116 bp, Cannabis indica
cacattgaattaatggaacttaataaattcaatagataattagaacggtaaaatagtaattttgaccagctctaattaggtccaagcttatattaacttgtcttaagtcgtactcgtgtaacacactcatgcagatttagtgttgtgctagaaaactcaacctaaatgtagagctctaatttgtgagttggataatctcatatgaatgacgattgaaatactatcttttattatttttcttttatcttaatttttgtaattaaagcaaaaaaaaaatattttaaattttttaaaataattttatgtattattttattaaattttaatcttttacgttctcatgttaaattcctttttttttttttttgtaagaataacttgcacttcattaaaataaaccagaaagtactaagccaacaagttatagggattgcaaagaaccaattgattagagtctctatacacatgctcaactttaagattaggactgaaagataacaagttcttaatacccactaaaatatcatccagaggactagcattccaattacaagaattaaatttatccactatagttttacaatctgtctttaaaacatccattggaagatgaagcagctgaacccattgaatagcatgataaattgcctttgcttcagctatgattgcagggatacctccaatacaaggcttagctacaccagctttcacaaaaccagaatcatcagccaccacaataccatagctatgcttttgaccacgaacatcaatggcagcatcagtataaacctgcaaagaagatccagaagcaccatccgagaccctgcttggagcctgagctgaaacactataaggctgaatattttgctgggcatcaagatactgaaaaaaataaatgacactccaatcaaagatatcagcagcatgtataacattattacagtgtatgtaattgtttctttgattccacaaagcccacagaaagcaaaacaaaatgctaagataatccttatccaaagcctcaaaagaacacaacaaaaaatcagtgatatcaagatgtttatacttatgataatgatccgcaaaccttgaggatttccaagcctttctcaatct

SEQ ID NO: 237714 - DNA, 1515 bp, Cannabis indica
cttttactttaattttattttttgaaatgatatgatgatctttcaatttcattatatataatagttacacgtaaaaagaaaatattgttattatttgtggtgaatatgcaaaatttatgtatgaacataagccacgtgtcacgtgtgggagagtgaaagtgcatggaaatcctatcagcaaaaaaaagaagaattagaagaaaaaaagataacaatattataaattataattgactctcaaaatcaaaagatcttttcaatttatttgctacttgtaaaagacaattatttccaattgaaagtgcatgaaaaatgtatgcacaattaattaattgcacatatccaaacacaacaaaaccaaagcttctttttcttttttgtgatttgattttcatgatatcatgatgataatgatgataatgataataatgataatgatgagcactagttgttaacaactaacaaatatagttgtactgcagctgatgataaagtgtgaaaatttttgtatgattgattgattaattcatgacataaaatgagtcaaattttccaatttttattctttctttttcaaattgatatgttatatatatacacacacacgtacgtactcaatttccttaccttaaagtttacatatctctctctaattctttgaaagtaactagctatactttatttatgcatgcatgtacgtaaatataacttgcatgtatattaatattatatattttttataagtggtggtagtagtaataacaatcattatgactttttagtaatagtaatattaaatatatatgaacttttccacagtacgtgtattctacaagttaatcaataataaataatagttactttttttttttttgaaatatatgataatattttttttgttttttcataattaattgggggagaattgctaatagtgatgtctagtattttttgttattgttatattgatctaattaaatatcaggttttatatgattaaaaaaaaataattttgaaaaaatattgctagtcaattataaaactctacctataaaaaatatcagtcactattaatatatctaattacaaaaactgctatttttggtaactacggtttagtttttttagtgactaaatgcgacatctagtcacaacaaaatattacttgtgactaaaatatagtatttagatacaagttgtcactaatttagttttagtcacacaacaagtattgttattaaaactacatttagtcacaacaaatataatttttgtaactaatatttttagccatagacattttagtcacaatataagattgatgatttaattagtcacaatttttttaattttaatcacaaattttagtaggactaaaagtaagatttttttgttgtgacaatactcctaatttggaccaaaccaataaaatacaatattaattataaattatgtgtaatgtttatatttccccattgactcataggccgccatgcatatatatataatataata

SEQ ID NO: 237715 - DNA, 671 bp, Cannabis indica
aattgtggcccatgacacttcaataggtatgggcctgaatctttgttgcccgatccaatgggagacagggagagttttatttaactgacccacctgtacgcattgtcgtttataagatattgacttgttcctgctacttgtattttgtctaacaaatggccaccttctcgaactagtgctccgccggcacaccagcttaaacgaattgcattaatttattaattatattatagtggacttatacaaaaccatctcactctatgtgcatttatacatatatataagtataaggcatgtgtctgtattatgtatgaataataatgggtaatcacaatcctaataataacagcactaattatagtatcttattctatttgttcaaaataatattaataatatggtgtgcatcgccaacgttgttgtcccaacgcccaaccccagcaaacaccatcttctagtaagtgcaatggtgttttcttatcgtacgcctacactggaggccgtcccatcccaccagcagtagtggacccaaataatagaccagccgtacaggttcgaatccacgttgacgctgctaaacaacggccttgatgagctcaaatcatggaaggtgttcttgggttttcagcaccgcgaagttctggtctctgcttctgactctgtaataatat

SEQ ID NO: 237716 - DNA, 715 bp, Cannabis indica
tatcggaccaccatcggaccccaatggactaccaatttttttttttttttatgtttttgcactaaaaaaagtatgaaaatttgagaggagtatttttgggttttagataaagtggtcatatattttcaatggtgatatgtattagtttagaaataaaatattaggtatatgtaagtattaaaaatcaattttccctttcattattaactatacatttagttcatgatcctaatatatttaagagaattatcttatacattattttttaatttttttttaaatttacagtttgagtttctcaagtagtttgtccgataatttttatattagttgttatacagattttgattacaatttaagttgctctattagttgcaatatgaattttgatgtgaaatttcgtaaaaatacaaaaaaaaatattttaaaatttaaaaataaaaaaaatcttttaaaattataagatgtattgaatttcatcgatcttaagactaattaattataagaataataaattatatatcttatatattttattatatttttataatttatatatctattatttattctaatacaattatacaagtacaactcatttaccagagctgatcactacactacaacactttaggctttatttgaaaaatctacattttatagatattttcataaaactagaaattgaaaatatatttctctttctttttttttt

SEQ ID NO: 237717 - DNA, 671 bp, Cannabis indica
tggatggccaactttgctttatatgcatctatctttctcttataatgcctcgtaccttatacttgaattaactataatttttcattgcattcaaattcacaaatcaacgtttatattttgatccaatttaaggtactttgagaaagcatttccactattgtcgcttttcctttgatacacttaggtagttattaatctactatgtatatgtgcgagcagttatattcttcatatgcttttcgattcccgagcagttatagtctgccttattatacgcgagtagtttactatctaccaaatattatgtgagcattttaaatctaccatatataacttaaaattaaacttaaacatactttgaataattcaacttataaactattttctatatttttgattgctcatatgaaagttaggccccctattcatatttaaggttaagtattatttttctaggcatttctgtgcctcgtttataatacacacctgaacaatgtgagtcgataaatattcaactctgtatgtgagttgttttatgagttgatctcatttacaactgctactttgattttcttatctgaagaaaagattcttcaattttttgactttatattgtccatagacaattttaatcaattgtcctctcttttatggaaaaaatttaaaatggg

SEQ ID NO: 237718 - DNA, 1643 bp, Cannabis indica
agtgatcacccccaaatgatttttaaccaccccaccaatactacgacaactatcagtctgaccgacagcaatatcaatattagttgtccccttgttaatcctcgaaggtttccacctggcacccacattttgatttattcacaaccaaacgctcccgtgatttttattccaaaactcatgtaagtaatcagtaacccaatccagagctagttccatcgaaggaacaaaagaataatacaatgcacaattatgcatatacaaagcctgcaagaccaaatacaacaaaaaaaatcaaacttgtcatttagcaacatccttgcaatacggctaagaaagtcaattcaaatttaaaatcttttttttttgttgaggagagaagtaagtaataccacttgttgaaataaatccccatatgtactgtccagatcaacattgtttaacaagacatacaaagcattaaacctaagtggccttcggcctctaacaacctactatgacagaactagtagttagttgcaaagtttgttaaaactgttgcaactaactcccagctttctcttctaccctacaactataaatacatacaaatcaaactgaaaaatagagatcatatcaaaaaatttggagaggaatagatttacagaggttaagtcttggagccctaggtttagggctcggagatccaaaccaataggagacatacacagaaaaagaagaagaagaaattagcacaatattcaaagagaaagagagagaaaataaacactgtaatataaaatggattaccaattgtacctgtgatttggaatcctactttgtaacttttttatcttgaaaatctactagtggaaaagagcttttctgaggcgagctctaagaggatgtacccaacaatatttggggaacctctataaatcttggtgcactctttctaattttttcttttgctcttactattgtgtttatctgtttgtgtatgaatctagggtttatttttgatatggaaaggtttgattgggattttttgggttgtatgcagtcttactctcaagaaactcgaagctctgctagggtttcgatctttggctaagagtgtgtgtgaatgaattggttctagagggtaatgtttttaattagggttaagcataaacgacttgtcgtttggggttgatgcttgtcgtttagccctataactattcgagtcaactgaggtttgactaagggtgaaaggtcagttttgaccttgggtaatgcttgatttgtttctgttgtgtgtagggcaaaataggcaaaattcctacaccactaaatgatgccacttcaagatttttattcagtttcatattaaaattttaataattggataaatactatattcagttaattttatcaaatatatatatgcacaatttattcataccttattagaacattactaattattttataaatttgtatgattattattaaaaggagaattactctatatactgtttttttaattttttttttcaaatttacagtttgggtttctaaagtggttacaacgttagttgcaatagggatttatatacgattttttgttgcaatttgagttacaacgctagttgcaatagggatttctatgtataattccgtaaaaa

SEQ ID NO: 237719 - DNA, 637 bp, Cannabis indica
gggggaaatttcaagagagattcgagtaagaagtgcgagtatcatggagaagtgggacactccaccaatgattgtaaaaacttgaaagatgaaatcgaaatgttggttagagcgagacatttgggacaacgggctcggattcccctcaaaatataatttttatattaacgtggtctttctatcacactctatttaattttttcgtgaaatgaatgacacaataaatagtatttgataaattgatgcaaattatatacttttcaacttttttactttaataattaaaaaactaaaaataaatattttaattattataaaaaaattattttattctattatttattaacgtaaaaagagtaaaatatgtaatttgtatttatttatcaaccatcatttattgtatcttttattttacgaaaaaattaaataaaatataataaaaggattaagtttatgtaaaaattatattttaaaatatattagtattattaatttttagtgtaacaataaaaattctaactattctttctttgaagagtagagatagtgtgtgctcaattagtagattgtttccaaaaatccaatttaaatcaccatccaaaattatgttgtgagatttttgttttttgtttttttt

SEQ ID NO: 237720 - DNA, 2732 bp, Cannabis indica
tctctcatcttgtcaacatctaagccaaattcatatataaacaacaaaacctcaagtcattttcaccaccttacactgttattaacgtccatcaagtcttcttttattaattctttcatctcttttgttgaagccattaccataaacaaccttcattctctcatatatatatatatatatatatatatttctttcattattttggcgtcaccatcactatcatttatattcaagttttaatgttcaactatatttgattaaaagttaaggtatatcattctatttttttttttttttttagtgttagaatttgaggttaagttttatatatatattgttacagatataggttagttaggacagttagttagtaaggtatttttgttatttgttggttgactctgttttgtcttcagttgtatctgtatataaactcctcttgtaatctttctttaatcaataacagattaccttcttttctcttttcttctctctactcttaaacatcacatggtatcagagctctctctcattcgttaatgcagatcccttgtacttctaatggtggagcatcaagattgaacaatgctcagacagagaacaatcatcaagcaatgctacctaaatcgtaccctatttcattcactcattctctctcaattaagctcgatgagcacaactatcttccatgacgtcatcaagttttggcttcgattaaagggattcgacttcaaaaatatcttgatcctgataaagctcgaccaaagtatctctctgcaactgatgaaagaaatcacacagtcaacccagaatttgaagattgggagcagcaagacaatcttctggtttcttggttactctcatccatgtctgaaaagaccacaaacagaataataggctgtgacaccactgctcaaatatggcatgctctaaatgagtactatacaactcttaatgctgctaatatagggttatacaagactcaactaggcaacattaagatgacaggttcattaaatgactatcttctcaagatcaaagggatagttgatctttttgctactattggccacaaacagatgcctcaagatcacattgaagccatattcaacggattaccgtacgatgtgtttgtcaatttggtcactacaagaaaggatgtgtagactgttgcagagatagaagccttattaatggctcaatcggctcgaattgacaaacacactaagaatcttgatatcctgaaagctgaagctaatctctctcattcaagattcaatggttataatccatataaccgtggaccctactctgcacctactattccaccaggattcaactgttgtggtccccctcattctgatggtttcacaggaaattctatggctcgtggtggtggtcctgcatctaacagaggtggtcccaatactcaacatggcaatcccttcaactctggacgtggcccgagtcaacaaacactactacaaaaatgactttttgcttcagtttttaagtgacacataaagtatttgcttcagttggtgtaaccgacgttataaccgtagacgcaaatattaatttttttgcttcagttatgaaccgacgctaattggttttttgcttcaattgttaaccgaagctaaaaaaaaagtttctgcttcagttcataaccgaagcaaaaaaccaatgcactaacgctaattgttttttgcttcagttatgaactgaagcaaaaatatttttaaaaaaaatttaaaaaaaaatctgaaaccaagcaattctaaccaaaaataaatacaatatcagatcaatcccttaatgaaaaataatacaatatcagataaacgatataaacatttattaatacaccaaaaaataaaaatccaaaaaccaaactattaaaacaaagaaagatgccaagaaatactctttcgggtttaaagccatgcaagaactagcatttgtacatgtttaaggacttcactatatattcaaacaagttttatctttataaaagcatcacataatctgtctataagatttcaagctgaaattcttacttcttccataagaagacaataataacaaaaatagaaaaggaaagaaaggcttgagaaagaaccaatatgcctggtttgcccaatgatcagggaccgattcaacattaaactcaatgctgcggcacttaaaatcttgtacatttcatacccaagaccagcctttgatgccttggccaatacaaactcatgttggcagaacttctctagagaaacatttcgaactcaatgagcacctgaaattgtaaaaattcaagtaacaattatactagtactcttagatgccaaacgatagaatatttgaaaatttctaaatcagattctatattagcctttaaagattgaaattttattgggaaattgataacctgaaaaatatactagcatctaaagactataaaaacaggcagcaaataaccccatttatagctgaacaaaaaaagtcctttcctcatctcagatatgtttatatcaaacaaaaatctcaacaataacatttttaaatataaataaacataatacatttattcacacttgctaagatctaaacaagtgaaaaaaataaaaactttgaatcatttctcaatcttattgttaaaaattttatatgtaataaaacaagatacttattgtttttttttctaacacaaaatttcataccaaattccacttaat

SEQ ID NO: 237721 - DNA, 1257 bp, Cannabis indica
tttagccatggagacggcggtctcattacatcatccttttgttttggtggagagtgattcagagattgttatcaagaacctaaaaggggataactctatttgggggattgatgagaactatgtgcgtcaatgcaagctcctctctacttttatgactaattgtaatttttcttgtatagctagaaactgtaactacgcggcccataatgtggccaaatgggcgtttgccaacaatgttacgggcatggtagagatatatactataccctattaatatcttttgtaatgaccatgagatctaacttcaattttatttataaatgcatttttacaaaaaaaaaaaaaattattttagatttaaataattattttatatagagcatatgcatattattaatattatatattttaaaatgaataaaatatattaaaactataaaaaatgagaagttttggtaatgtaatttaaaaaagtaatgtatggtgtaatttaaaaatatgctgtaaaaataaaaaaaatagaattttttagtaatatgttttaaaaatggctaattagtataatttagaactttgacatgtattaaattatgccccctgaacattttaggccgttaaaaattctccctgaaatgatttggtagatatcaaagtatgaggagcatggtttagtacataaacaatcactgaaacagtaaaatttaatgaaattagacaagagtccttaaatttaacaatctcaatagtttgaaggaaatttttaatggcaaaaaaagtttaaggacacgatttggtacatgtcaaagttcaggggaaaaaattactaattagcctttaaaaatataaaaataaaaatacatctaattatgaacagatgaaattattaatttataaaaatgcattcaacccatgtgtattgtgtgcttcttccacatatctaatttatgaacgtggaacatatataaaataaagatatctaaaagaaactgtataatacaatatcatctcacaaaaatcctaacttaatacaatttaaagttattgagaaagtaaagaccaaagccaaaccattagtatctataacatgtaaatgtaaccaacccaaacacaaaaaaccaacccaaaattacgacttacctttaattaacgataaaaattcctgcaaatcctacaaaaatattatagaacacacagagctaaaccatttataataaaagttaaattttttagaaaaatatgaaataaatataataagaa

SEQ ID NO: 237722 - DNA, 663 bp, Cannabis indica
gcaatggtgatcatttgcaaaggcttgcaaccaaatccataatgaggagcatgtatcgtggatggaattggaggataagtggccatggtgccaatatctgggatttaaagatcagatagatcatctacatctagagcctttactatgggtttatttggtgcagctgctgaagagaaaggacttgaggctttggcctttgcactagaattatggtccatgatattggccaaaagggccagtttaaagaggatagtggtggcaaattatttattagtagtggcattcttaatttgcattcaacattactacactttgaactgaaacgtttaggtaactagacacaacattactgatcaaagaagaagtttcatttatggattgagtggatcttggaataatagccttagtactagcattttcttgtttctcttatgattctactggcaaaagtggtcatggatgtggtgctttcctatttgaaagggttggaactgctgaggataatgaatttcgagccaagcgcgtgagaagtgaccaggcatttcctttagagaaatttgttcagtacctatcatacccagaattagggagtacaacctctttaattcaggtccatatggtagttcaggttcaataccattattaattttttccatcgactcc

SEQ ID NO: 237723 - DNA, 930 bp, Cannabis indica
atggcctggtgcgctgggttctgcttatcctaatctgatggcgttttggctgcccatctagtttttcacaattacaatgatctatcaagtcaagggaatcaaattcacaactttacatttctcatttctagcactcccgaaaatgaagagtttcgagtctcccatttctgcaagcaacaacatctccgagaactggtaaccagctttgccagatcatgtacatggattaagttgtgtcaaactatcacttaggcatcttaaaggacatcccttacatgtttctacacttacctagcatccaggttgacgtcagatgttaacctgggccctaggatgtcaacttgggcattggatgttaacctgggcactgagacctgagctaccttcagttaaatggccataactcaatttttatccaattgatgcgcttcaacttgaattttgaagctatttaagttctctatcaagtcatgtttcacactccatatgtaattttaaagatattttcatcaaaattcaccctaaggaagttacaaaaataagttgtgagttacccgcagcgggactcgccgggcaccaaaaattggccatcaccaccaagagttaattttcaccgttagatcaccatcaacagtcaaaaatatcttatttgtattttgtcctatttttgtgggccttcctcacttataaaaggaaagctcccttagctcatttctcacattcagaaaactacccacaaggtcagagcttctctctagagtttggagtttttgatacttagtctatttctataattaccatctcatgagaaataaaaactcgaagtatacatagtcccattacaatcacgatataaggggtgaactactataaattggttttgtctctcttaattacttaactacttttattcattctcgccaatctagc

SEQ ID NO: 237724 - DNA, 693 bp, Cannabis indica
gataatgatgttgaaaagttttaaaatgatgtcaataattgtttagaacaacgcaagaaagttatgcatcttattgttgacaattcttcactataaatgacactaactacacatgatgccataatatctcctttgttgtatgtctcgaactatacatgtcagaaacattaggtatttaagtgtaagtggatctactgattggtgtgatgataataatacagaaaaaaagggaatcgatgttggaatgtatctgactctagatggttttgagagactcatcatgtctctgagtgttttgtgggttggtttagtaggaaactcttgtttatctctaatttggaatgtcagtgaggtatactcaatggaaaaatgtgctcatcctaatccatacatttttttggtcagttcctatacctcccccttaacctcacacatatacacacataattaatcttatatatatatatatatatatctctattaatctttctcaccaaaaaagaaaattatctctccctctatatatatacctatatttatataatacattactaattaacaaacaaaaataccctatttattaatgacttatcaaaaattaagatattccatcttaaatataattacagaataaaaataattctgattacatggttggctagtatgacgcattagccctttttttttattttc

SEQ ID NO: 237725 - DNA, 1488 bp, Cannabis indica
tttatatatttctttgatgtttttttttaaaccctacatgccccaatttgaagggtcacacatataattataattgaaatgaaatgaaagcagcttttgtttaaaatctttatctgctcatccaagtatcatatcagtaccagctgtacaacttgtactgccattatctatcttaatagtggcacagaacattatagcttattcctttcattaatgggaaaatacacagaaaataatatttatctgaaaagttcttttaatcctgaaaactagaagattcaaatcagtaatctacttttgattgttcatttgaatgattaaatcaacctaattttgtttcttagtttaggagatccattattttgtcatattagaaaaagaaaactaataataatagtaaaaacttacaagagaatggaaggcttgttctgctcttgaatctaatcctcatggtaaataatatgtcaaaaagaatagttcatgtggtatagttcttccaaatggaaaaagtcttcaaaatattattcctggtaatttattgactcgccgatgcaggtcctggaaggctttcttgttcttccaggaagggtcttcaagaaagctagtcctcctccgaaaaggagctccggatggctaactgttcctcctagaaggtagtcctgaatagtcgactccaactagttctttcctatcagggaaggtcctttagcggtgccttggaccgtaattccgggagccctcatactcactcccggatacgcacttccttaggctgatgtggagacctcgaaggagagttggttaagtcagttattgtctaactaacttaaccacttatcttcttgcagccatcgactttaggatcttgatcctaaccctatacatataactccaacacgtagcattttaaggttggtaaaaatacagagacgaccagtttgggttgagagagaaagagagaaaagattgagaggtagagagagagagaggggtacagagaaaagagattttgtaagaaaaattttctgtagatgaagaagattcttgggtatgagtgtgagagttgaaacacttttgagggaacccatcagagaatcgatcttgattgtattgtatatgttcttgctcaatcaataaagagaaatttgtggtgtttcagaactgtagtagagccatagatcacattgatctatcagacttgaactagtatatatcttggtgttagattttatagttttactactttaattctttctggttttccatgctctatttatccatcttttctttcaattattgttcgtgatttgtgaatcttgtcattactaattatttaattgtttaaagtttagttatttttgattctactattttagtcgtcagttctaaaaccacaagttaaacatgacatggatttttctttctgctctatacatggaaaaaattgtttttcttttttaacatttgaaattatcgttaaacactaat

SEQ ID NO: 237726 - DNA, 640 bp, Cannabis indica
acacagcatcaaggagagacccaaactctcgaaacctgtggaatcttgtactactttggccatttcattttcaaatttccctaagttcttcatctatgttgctggtttttttctcaaattgttctattgctattgctctatattttggctacccccgtcatcggttcacatatttatcttactaaatgcatacatatgagattttaatcatttttatactaccacacataacctctaaaagagtttagggaaagaatatttacctcagttaacattatggcagcattacgatccttaatgaacttaagaaccaatgcatggtattttctcgattttggttgccttctaagatattctataatccagtatcgaagactgatgttgctgagccttcttgctactctagtattcatgtttatgatagaggccattccttccagctgaccgggtgtaaaaggaagagtctcacctctaagaaatgccttaacctgcaaactcacataatttttttaaaacacaccatgaaccaacgttttcaggagtagtgctacaagcatacaaaaaaatttaatgaatacacgatacagcaacttcaaggaattacaactaatacaacaataataagagatattgttttact

SEQ ID NO: 237727 - DNA, 775 bp, Cannabis indica
ttttttttaattagtttctcatttttttttgggtcaatccattggaatatgattagactcatgtcaatgtgtatggaatatattatttcatgaaaaatacttcttctcctcctccctattataccttgagttttggagaagtatataaatatattatatactactaatagcagtttgttatatgatttttttctcaattgtatgtctccaatttacgatcaagtttcttgatttttttcttctacaattatcttattagttttatttcaaatatggtaacaatttttaaaggttctaaaatcaccttattattatgatcaagttagttacaatttcatgagtcgcttacaattcattaattgttaatatatttttgtagttattgttaccaacttatcttgacactaattttataatgtgaagaaaaaaaaaactataggaaaagaagaatctaaaattatgatgaaaaataaaaaatatccattttagtttcgtttattttctttatatgaaagtaaatctatttaaattattgattatttgtttttgaaaaaaaaaaactaatgtagattcaaccaaaattttatgttaaaaataataatattacaataacaagcttattagttggaattccatcatagttaatgatattatactttttattttgaatttgttctcccaaatgtaaaaaaaaaattatatagtaagaaaaaagaaacgtttcaattcctatatgcaatatatagatttatattttacaaaatgtaacagataa

SEQ ID NO: 237728 - DNA, 1072 bp, Cannabis indica
ttcctttatgtatatatattgattgaatagcaatgcacccctttattattttgatgagatgcgattggctagcgatattccgtaaaagctattatattaaattatatgggactcgatacttagttagactaataataatattgacacataagaaagtcctagacaccactgatgctctttagtatctctctattttgatggatactatgatccaatattatttaaaataaggaaccaattcaatcagagaacccaattgtgattttccgtggattcagttttgctaaaggccactcacattgtgaatgtgctttatcacttaactacaagaagagattcaaccagagtaaattgcggcaaaattttttaaatttcgatacattagtaattagcttcaaaatttattttctgacaataaaactttctaaagtttgtgttctgttagtagtttatcatttacatctatttttaatcattaatgccatagtagactgttaataataaaaaaataaatagaaataacaaagtgtaaataggacacaaattttgaggattttgcggccaaaacatgagttttggaagctaattactaacaaagtaaaaaatttgagtattttactataatttactctattcaacaaaatatattttttatcgcgtgacgtattttaactcttaacttttatttaaagtaagctgcaacgttctttctatagatataaaatactgtaattgcctcaaataatattttattaacaaaatattcactcccttcgtcttctttctctttcattcgtattttttaaaaattggcgccaaaccctcccatactcgtactgttcttgaataatgcttagagatatcccaactataaatccatctcgctttttttgggaaaaagttgttagaaaagttctcattacaagagagaatatgaggattacaatcaaaatactcaaaatagaaatagaagtattccatcaagattacaagaagaataataacacacacaaagcttgaccaaggctcaaggacctttgtcctaaaaatcatttcctccctcatatggaca

SEQ ID NO: 237729 - DNA, 688 bp, Cannabis indica
aaaaaaaaattataaattatatatctttattcaaatataattattcttatatatatagagatatattgtcttaatttgagacttgaaaaatgtatgcttaagatcaggccggctaggggttaaagtcgacgttgattcatcaattttaatttaacatctctaatttaaaatcgaatgtaaaactttaattttattaagcccctttatggcatatgaataaattttcaaatgtaagatacgaataaaattaaaaaaaatcaccttataacatcaacgtcaatttttatgtatgaattcattaaacaacctattttctagatgatcttttaaaaaaaggaggggattctaaaaaattttctagttattttgttctctatttctattttaaaaaatccgtagaaaaaatattttgtttctactgagttaaaaaaattgttgatgtctctagtaaaccaaagattgtttaataactattttgcttcaattattcctataacaacaaaaatagaaggtttagttacgattaaaaataaattttctcttttcatccatagattagttattcttatttataattggctcaaactggatttgattttttttataataatttaaaggttattcttaaatagaatacacttaaatagatgttctattgtattaactattattttttttcttcactaaa

SEQ ID NO: 237730 - DNA, 640 bp, Cannabis indica
catatataaagtaataattgatatagcactagtactactacttattattttttattagtatgtttaaattaatttttaaataaacatataaatttaatgacttgtacaaattaagaactgccaagtaatcattaatttgacatttaacgattaggtacttacggaagtttcaaaaatataacttgggtattattaccgctaaaatttaaactaaaatatttataccgcaaattactctattttcattctttcctaaaaaaaagaagaaaagactcggaccccatacataaagtaatatttttttaaaaaaaaataacagtgtttcttagataaaagaaattagacctcacaatcattatatctcatattctcaatcatatatatagatgaagaaaattacttagagcactcacaatagctctcctactctattctttaaaatgccttattaaaactttactttttattttacctcacacatttacattatactatatatcaacttttttataattttctctaaactatttaaataataactttataatacacacaaataataaaatattatatactacataatatttatttatttttacacttacaattaataaaatacattataaaaaaaataaaaaat

SEQ ID NO: 237731 - DNA, 816 bp, Cannabis indica
ttaaggaagcaatcaacttgaacgagttcaatgggtggcgtggacggaggggaagggtattgagaacacacgataaaagaaaccatacggtagacgcagggcatcaaacattcgatactcacacttactcaagcaaacagccgtccttttgaaacttttctcttaagcctcaccacagtagttgttcctttagtctgtatgtccgcttatccgttcatccgtccaactaccatttacattttatttatttcccgttattgttatttttttactacaatcatactgacttgagcgtcggagtccttttggctaaattcccaccagtgctctcaattaaatttttgtgtctctctttgttcttaacaggttgttggtgctcaaattccgtaattgtagattttaccctctatacttatgccgctatttactctattattattatttgtaataatatacagctatttctaatagaggaggtaaaagttaagtatatttgtaataatatacaattttatttatttattatttttttaaggaaaactataattttattgttaattattatattttgtattatatatattttttttttgagagagtgatataaatcacactatgaaaaccgtcgacgcagaagaatttccagtcaacaagctaattgtctagtcaaagatatacagagtcagaatatgagtcactacaaacaaagcgacttatataagaccaaattatctcgaaaatttagacaaaacaacttgagatcaccttaaaaaacatccaatacaaacaaacacctggaccaaaactacctacaaa

SEQ ID NO: 237732 - DNA, 1114 bp, Cannabis indica
agagctggaagcaaattattgaattagttttttagccccaagtttattgcccaatctaatcaaaacaagaaaaatagaaaggaaatgaagtatttttccatgcaaggtacaaagtcgatggcagcgtctcataatgaatttataagtaaaattattaactttctatttgcaaatttttttacaaattacacaaactaaccctatttttgattaggacgtccctgaagactatgtaattcatagttggaaaaaaaaccaccttaaaaaaggaacaaaggacacttggattagtgagacgtgcagagaactataagtaagtttcaaatttttgctgagttttataatatttttaaaatgaatgaatgaaggtaatattttatttgatgaggagcaaatgcttgaagaggtttccagcatgacgggaacagaaatgattcccgagatggatcttccaccaaatacaagcaatttcaagctatgattaaagttcttgggaatcgatcagactatcaaagaggagtgggttataaattgaaatacaaatcggtaacaagttcccgaactcaaagttaagctcaatcacaaggcccttctccatccattagtcggaagatatgggagcctttgctgagtttatgttaaaaatgcgtgataagattgatcagtctggcacctctagtgacccttctctacatgacccacagtttgatatttttttacaaaaaattttaccatcacaatagaaaggtagtgcgtccacttcaatcccacgtccaatgtcaatgccacaacaacaagtttttcaacaaccataatcgcctcaaatgcctcagttctttcaacaacaacaacacaattctctcaacatgtttgctggctcctcacagtcgcctcaattacattacatgttcgagcatctctcacagtctcctcctatattttttctggatgccacaggaggatctctgacacaacaacctatggttggccattttggaggctcatcgcaacaacaacaataccatatgtatggacaatttgggtcaccacaaccacaacctgtgtacggtcaatttgggtcattgttgcagcaacaacctgtgtatggtcaaat

SEQ ID NO: 237733 - DNA, 866 bp, Cannabis indica
tagtatttttaaattaataaataaatttaaataccaataatattatcatttattataaacaaaatattatgatgtatatttagtctgtttgtaaactaaagatccgcaggaacttaaatttgtataataaaagttttttaataaataattgttttatttaaatatgttttaattaaatcacaatctaattagtcttaattagtttattattataaattaatttatacatgtgatatattacactatgtcgtaaaacaagtcttaagagtgcgtttggtacgagatgttcaaaataatatgattatagagaatattcaaaaaatgagaatatgattgtagggacatgtgtaaactgtgtttggctatgtagtgtaatatgtaattatattcctgttaattaaattacactgtttgactgagtatagaaatcttatatatctaatgttaattatacataaaaataaaattattatttatcaaaaaaatatattcgaatagcttgaattactaccaagcaatctgactccagctttactttctagcatacttgagttttaatctagcttagcgcttcttttataccaattgctgtctatactagcaaaactgcccgacttagccatcataattccccttaagagtctcgagtgactatgccataccaaacgcagctcgatcacgaaaaatggtagcatcaacagtgaccttgattgtatactcctgcggcttaacttgaaattcaactccatcaccagctttaaaaactgaaaatgaagcctatgtacctctattttgggttgatttttattgtacaagacaactcgtagatgagataaaaatataatctaccgtaacatacttttggt

SEQ ID NO: 237734 - DNA, 1580 bp, Cannabis indica
atggtttttgagaggcttgaccgtgtactagctaataatcaatggtggaatcattagtgtagttgacaaaagttaaacacttaagccgttggtgttctgatcattgtcctcttgtggtgacgtttcaaaactattccgacagacaacaatcaaaaaaaaagtttggggaccatagatttcattacgaaagtgcttggggtgacaagcaagaatgccacaaaatcatcaaggaaagttaggaggagggccatttaattacttcagcagctgagttaggaaacaagttggatcaatgtggagatgtgttggggcaatggaataaacagcaaagaagagagagccaatctcggattaaagagttaaaaaaagaagtagaaactttgtcttgggatcacacagaccaaggatttattagcctaaaagaaagggagaaagaactgaatggataccttgcaaaagatgaactgttttggaaacaacgtagtcgggagatttggcttgctcatggagacaggaacacaatattctttcaccaaaaggcgtcttctcgtaggaagaaaaatcagattaatggtctttttgatcaaaatctgaattggaggagttctaaagaagagatagaacagatcatttgtgagcattttcaagacctcttttcagcccaagaccccaagtgcgacttaatggctcacctccaaagatttgttccctcacggcttagtagaagacaaaatgaaagccttcttactgaattcacagcagctgatattcttcaagcaatgaagcaaatcaacccgttgaaggctccgggagtatatgggatgccccggttattctatgagcatcattggacggtcatagggtcagacataaccagaatttgtttggatatacttaataatcatgcggattgccgagcgatcaacaaaaccctcctttgcctcattcctaaaatcaaaaatcctcaccaagtgacagactaccgtcccataagtctttgcaacgtcagctacaaaatagttacgaaatgtatagccaatagaatgaaagatagtttgaaggaagtaatctcggagaaccaaagcgcattcattagaggccggctcatacaagataatgccatcctggggtttgaaagtctacattgtatgaaaaaaggtcgttttggaaatgggaaaaagatggctcttaaactagacatgtccaaagcttacgatagagtcggttggagattcttagaagcaatgatgctttgtttgggttatgacaagcgatgggtggataaagtcatgaactgtataactacagtctcattctcggtccttgtgaatggagaaattagtggtctcattcaaccccaacgtggccttcgtcaaggcgatcccctctctccctatatgtttctcctttgcttggaaggtttctcttgtctcatacaagaggctgaaagagcggataaaatacacggtgttaagtttggaagagaaggtcttaagctatctcacctattcttcgccgatgacagttttgtgttccttgaagctaacccaaccgaatgtagaagtatgaaagccatatta

SEQ ID NO: 237735 - DNA, 650 bp, Cannabis indica
tttgggtacaatacatataaaaagaggtatgtttcaaataaatataaaattagaggcaaatttggttaattgattaataaaagaggcatttttcaatttacccctattagtaatccatatacatatgtttataagaaattttacattgcttaatactatttaattatgtagcatctaccaatattacttttttctttttttattgaaactaatattaattttattaattcaagatcaagacttgatattattattattattattattttaaagaaagcgtttataaatttaaaagatgaagactcgatattaggcatgttgaaaataataccttttttgaacatgaaagatagctttctccccaaccaccatcgacaatttgtttttcgagtaaaaattctactcccttacgcatagttgaactgttgttatatgttttaccaaccgcggctagtgctcctagggcaaaccacgacgcatatgtgaaacaaattccccaatttccatacctatatttacaataccaacgataacatattaattaataattttattttcatttgtttatcgaaacaaacatttataaatgagttcgatgatgatgatacgaaccatgaaccgtcatgcctttgtatgttttctagatattt

SEQ ID NO: 237736 - DNA, 782 bp, Cannabis indica
aaaaaagttatcatatattcaagtaaattctctttaattagtatttatgatacgtgagaagaccaaccctttatatcaaacctagcaaggagatatatcattcacgttttcaactaacataacattaagtttattcaccacaacaaaaaatgagagtttttgctaattaccaaagcatgagagttggttgaataaaaaaaaattagagttgaacctaagtattaacgatcaaagattctcctaacaaggttagtacaacttattgttttaagattatttattcttatcattgtacatgttctactagttggacaacatgcaaccttaactaatcatacatgtgtcttagagagcatttttttttttgatgaatcagaaaattcattgcacaaaactcatttttacaacctataagcaccaaacaaggccttaaaataatctatacaactttgtatttacaaattttgaaaccaagctagatctttttgctttacttttttgggtaaaacatacaaagttctactctttacttcccacttcacttgcttaactaactcagctgcttggtgactatttgcattccatagtaaatcatttctagctctccaaattgcataaaccaaggcagccactgctgctatattaacgcctttgcagaatttggagaccttggacttccggatacccttcagtaacccaagcaaggagtcggcctgcactctccaattcagccaatctttgatcatcttcaagcaatctagagcaatgtcacacttaaaaaa

SEQ ID NO: 237737 - DNA, 652 bp, Cannabis indica
tttctttaaaattaaaaaaaaactaatcctctttctcttcttctcttcgtgccgccccctactcctcctcctccttttccttcttcttctcttgcaaaagcagctgtgagggttgcaaaggatgctgctctgctccgcctctttctcctctacaaatctcaaacttcttctccctctctttttctcaatcgcaggggggcacggttcgacgggagaaggacgtctaggggatgggatttttccaccattgccaccacgactcggttcgacggggcaagggcggtatgtgaacaacaaggacaggatcgccatggcaggaacagaactccatggcttgaacttaaacgccaaagacaaagaaagggaccaagactggccgaagacgaacctaggcaaaagatgattagggttcaaagtcaggcgaggcatttccaagatctgataatgcctctgcgtcttcttcttcttcagagagagagacagaggctgtaatagttgttgttactcttgcaaaagcagctgtgagggttgcaaaggatgctgctccgctagtgaaaacttctgagcatgaagaagaagacgaagaagaagaagaagaaggaggaggaggagtagggggcggcgagatgagaagaagagaaagagggattta

SEQ ID NO: 237738 - DNA, 651 bp, Cannabis indica
taaaactttaggggatgcttgacgggtttacctgacccagtgtattgccctagggagctctgatgttgtttgttaagatgtaagatggaacgctatagatgtgtatcataattgggcattaaataagttgataatcaagaataaatatccactgcctaggatcgatgatttgttcgatcaacttcaaaaaaagtgataagtcgatattttatcttacaagtattgtcaatttatgtactaaaattcttaaattgattctttaaattattgattagtgcgattttaatttgttagattattttaaagactaatcatgtatttggagtcatttgaaggaatttttgcacattttggtagaaaatggtggaagccggcgagcttaattttacaagacaaaaattaattgcaaatttcgataaccttggaagcagaactagacttggagctaaacgtaaaagttgtagatttctttctctctttttagaatatcttgaatcgtccaattttgagttgtattgaaaaatttatgaccaaaatactaatctgaacatgcgatagaaatttttctacagcaagtcatggccgtaaatgagcacttctcttcgccacggtgagagcatgattccacatttttccaaattttatcttttt

SEQ ID NO: 237739 - DNA, 605 bp, Cannabis indica
aaaaaaaaaaaaagcatttaaagattttatgacttttttatatggtttactgaacaaatagtataaatcaaataaaaacataataactggtagggaagtattaaacggtatcgaagaggtgggtggtagataaaagcaatttagactcaaaagcccaataagtaagtctggaccaaagccacagcaacatttacaaaaatacgactttcggatttcatgtttaaaataatatgcatatgcaatccaataatttcctcaaaaacaatagggagagaaaaatcttcttctttcttttcctttgaagttcaaagaacttaattttatatttttaaaaaggtggttaaattattgtactttgtaaattaagcacattattatatatatatattttaaagtaaatcaaattattaaaatttcatgtttttgtgttttatggtatgtgtgtggacattaataacttatttttttttaattttattttgcgaaaacattaataactattattattttgagaattgtgtggatattattgtttttattatattaatatcttccaaacaagtgttattgatcaaaaagaagtgttattaatagttatttaattg

SEQ ID NO: 237740 - DNA, 649 bp, Cannabis indica
gatgtaaaacgacatcgcttagcctatgtttattagcaaggatagaaaataagatggacggagggtttacgaagagtagtttcgttttttttttttgaaaggtttttcgaaagagtttagtgtttaaatcttattaattatttctttcaaaaaaaatcttattaatattttttgacttgcactgattttttaacttgctaaattcttccatattagtaaatttaaggtctctaaatgccaacatgaatgatctatatgtaaacgtttgtacagtgttacgttatattgatagaattttatcacttttcaacttcaatttgatgtaaaatgacatccattaaactaggttttgtagttggagagaaagtagaatgaatggagaatttaaaaatgatagtgaataaaataattattaaaattataattttattattttttaataatttatatgtatgtatatatattttaagaagccaaaagacatctcatgtgatttttttgtctttttcttggattcttctaattttagaaaaattgaaaagagtattactattaagcactagtggtgtttgactaatattatttcaaagtaccgacttgcaatttgctaatgatactttataatgttacttaattgtactaataacaa

SEQ ID NO: 237741 - DNA, 1743 bp, Cannabis indica
aataatttccaacagtatctcattcgactgttcagactgagtcatatgaacgagacctccacataatataacactagatcccagagaccaccacattattattaaataaatatacaaaatcaaattctcgtatatttagtttatccatccttttatttcctctaggttcactttatttgattaatcacttaatattctcaatattaaatgtaggtatttattcaaaattttagttttgaaattgattaatctagaaccgtctattagtcacatctatctaattctattaattatgataattaatgaatccaataaatcctatggctaatcaagttggatgtttagaatgaattttttttattttcacatccttattagtctttgatgacttgtcataactaatgtgattctttttggttaagattatataattaataagaatatttattttttgtttcgtaaatgatactataatatatattcttcaaattaattatctctcataattttaaattccaataaattttttaaaaatagattcacctcttgaatggtcttttaaatacactctcagtatgtttaatactctcactcaattagacagtttcttatgaatagtcttttaaatatgcttcaagtatacttaatactcctactcaattagacaattacttatttgtccattgtcgatgatcatttttattaagactattcttaattcatgatctgaaatttattacttgtttaatctcattgtacaagtattcataaatttcaacaattaaacaattatgatattcaaaacttgtatctcatactttgaacatctattttaaattgtttatccaatactttaataacatcccctatttccatattgtattattagtaattattaatgatagatatctatcactatattatccaagaatttcaaatatctaataattactaatttattatattatttgaattcaatctcattgttattcaaatctaaatataataatttaagttaatgacctagtcatcattctctttatggatatttaactgaactatctcatataccattttattgattactctaatcaatacaattttaataacgttaaaatttcttaattataaaaattcatcgttcaaaatcatcttagtgtattgaataattcaatgagactattaatgcatgattattgaataatcatatttcgactccaaagttcgaaattagaaagaattaactttttcactaaggctgtgatataccatatatcaaaatatttactaatttaaactagttagattttcaaacctttccttggtatatcttgtattttgataaatctcattcattgaaatctttatagttccattagaaatcatgatttagaagcactaattgttgttatgaagaacaatctagttttctcaaaatcatcttgtattttaatgagtagtatactcccactaaaatactttattattgctgaatttaattgatggtcatgattattaaaatttaattttgactctttaaaattatccttatttaattgtcatctttattgagattcaattgtatgaattctttctatcaattattctcaatgtagtccaaccactttcattaaaactcttttcatgtatttaaatcatatcttaaattgatttaaaatgttaagttacaatctattacattaataaactcaactattgaatgtttaaatgtgagttcatttc

SEQ ID NO: 237742 - DNA, 919 bp, Cannabis indica
tagaactaagtggcttctcttcaaatatgagggtcttcagaactattgctatttttgtggagggtttgatcataatttttcaaagtgtggttcattccttcagcgttgcgatgagggatgtgttccacctgtccttccttactaggagaacattagagcacctctgcaatcgcattttaagagggatccctttgagctggctaattctattccttttgaggaaatgaatcttaggtctttgaggtagaatcaagatcttcaggatgctgtcgaccaatttctttcccaggttacttcacccctttctcagagtcctgccattactgagggatctattgctagccaagctgttgtctcatctcctatttcatcccagcaagtggaggtttctgcctctcaattcagtggttttcaaaggcttttgtgtgtcgtttctcaagttactatgaatgaggctccttctattgtccatactgacaaagggaagggaattcagacccctatttctaataccccgtctttggctcttatggataaagaaaaagggattcaacctcctacttcctttgttccacagcttcctcttaggcctcttactatcggtggaggttcgggtactaagaggtcttttcctaggcaggatgtggttgttggttcgtccattcgaagcatgctgaaaagagctcgggctactgggggtgttgagttgatgtcttctaatgtttctgatcaagttgtactagcgggtgttgctgagcaaccccgcctggaaaaatgagttttatttgttgaaatgctcggggtttggggagcccccgagcattccgtaatctctcctttctagtgaagcagcataagccttgttttctttttgttatggaaactaaactaggggttggttctagttttagttttaagt

SEQ ID NO: 237743 - DNA, 553 bp, Cannabis indica
tgtgttattaaaatttaatatatagagaatttcatttgttagaattttataagttgtactaagtacccaaaaatgactttgaccatctccaattggagaaacaaaaattaatttatatttgctacaaataataattttgtgatatttttgtatttacttttactattacaccccaatgtataattgtaaatcttgatataaaatttaagagaaataatgttaaagagcattagtggtgcttagcaccctttatgtgtcaatgtcgctattggtccaactaaatatcgagtaactagtttaatataataaattttagggaatattgttagccaatcgcaatgaaacatgcctagaggagctagatatcacaaaaattacaatttgttttggctaaatatatttttaattataatatttgtcgtgactaaaactaaattagtaacaacttgtatctaaatacgatgttttagtcctaaataattttttattactactaaaaagtcatattttattaaaaaaaaattatattataactaaaatattgttactaaaa

SEQ ID NO: 237744 - DNA, 1133 bp, Cannabis indica
tccttgagaaaagagaaagagtggtgcttagacctagataggcattgaggcaaacctaaatacttactaataaaaggtttgtcttgaagatttagattagtaagaaaaagatccttaatctgaacagagactattgggagagaacaaaatagaatatttatggaaattaatagacttgtcctgaagctttagtatatatatcaaagatgtccctaagagcaacacaagaatctctactagcagcacaaaaaatgagactatcatccgcaaaaaataaatgagttaaagaaggagctctacgagagatagagataccctttaatctattcctatcctgataagctctaagtaaagaagataacccttcagcacataaaataaataaataaggagaaagagggtccccttgacgaagacccctagtaggcttgatactaccatggacagtaccatttatcaaaaaagaaatctttgtagtagagatacacttcattataagagacacaaaagtttgaaaaaaaataaaatgagacataatgctccccaaaaaatgccattcaaccctgtcaaaagccttagccatatcaagtttaagcgcagcccgctccatcttgccatgttttctagcattaatagcatggacaacctcttgtgcaagagaatattatcaaagattactctccaagaaacaaaagcactttgggaagggaaagaaccttatcgaaaacaatttttaagcgattagctaaaaccttataaatgactttataaagggtattgcacaagctaatgggcctaaaatcctatatagattgagcatgctgcttcttgggaataagagtaatcaaagtatgattaatggaagaaaaatcttgactattattaagacaatcaagcacagcctcaacaagatccttacccatattggaccaattttattgataaaagaaagcattaaggccatccagacctggagccttatccccagagagttgaaaaagagcctttttgacccccagcagccctaaaaggttcccctaaacactcaaactcaaaatcattcagagggggacctaaaacaaaagaatttgatctacagaaacagaatcacaatcctgcgaatgaaaaaggtt

SEQ ID NO: 237745 - DNA, 869 bp, Cannabis indica
tgtttaaacaacatacttgtgagtagatctaagatcctggtaaataaatattccaacaacaacagcagtgatcgaaaagcctcttccgtccttagttgtgctgttaaagctctcagcccagttactcttcattgcattgtaacatacccctagaaagtacgaccgaacccatttctcaaatccaatttccttaaatattgtgcatacgcaacattcattgtctggatgttctcaaattctctttgaaactctatttttgaatacatgtaggcacatgtattaatatgatttgtgaagacgccagtcttgaacttgttgttgacgttcataataatgtggtgtagcatgcaccgtggtgtgcatcagggaacacgatctctaaagcatgaataatgctttgatgcctatccgacacgaaggctaagttctcaacatcaccaatcatttctttcaattttctaataaaataggtccaagaattgtggttttcgcgtcaactacaacgaaagctatcggaaaaatatggctgcctgcatccagtgccattacacacaacatttgcctaccatacctagtcttcaagaaagacccatcaatgcatacaataggttggcaaaacctaaacccacgcctacaaggacccagagagaagaaacaatacttaaagcgaccatcctccaccacaaaatctgtgatggtacctggatttctcaaatgtagcatgtgcaagtaaccaggtaattttgagtatgaatctttaggtttaccccaaactaggtgtagtgccttctctctacacctccaagacttttcataactcatttggattccgaaatccttgtgcacatctctccttatataagaggcca

SEQ ID NO: 237746 - DNA, 986 bp, Cannabis indica
acaaaaaaaaataaaaaatcaaaacattaactagtcatgatgatcaataccaattcttcacgtaatactttttctttgctaataaataacaccatgcccgtggtttttcgctcaaaatggtatctggttttctgacataaatataaatgattggaatattgtctaaatatatatactatactacagataattttctagttattatacatacacagtatatattgttggatattctatgatttttttgattattctatgagatctaggatgcccacggggccgagaattagcggggagtactctcccgttcctatcccgttaaaaattttaattcccatctccgcttattttccattgggaacgagaccaggaatcccctaatggggtgaggacggggtgggaaatctcctattgtaaaataaaatttattttaaaaaattaaatgtataaaattattaaattacataaaagataaaatattacatattatttagtattcaatatagtaatcattattaaaaaatttaactttaaaaattgtaaaaatgatattaatatactaaaaaaaaaatacaaaggcatttataaaatatataatattaataaaaaataattaataaattaaacagtcccgtcggcgtggggagtgtcattccgtccccgccctgtttaacattcaagtacaatatttatcccgttcccgtcccgttccccatttagacaagaaatctccgccccattagagtcgggtccccggggcaccattcccagggagaaaatgtgcatcctaacgagatccaaagatcgcacttaatatcaattattgcgattacgaaaataacatttcccgtgacatgaggaaaattgtatatataatcaactactttttcaaatcatcacttatttgtttctctaaaatcaattttactactataccaaaccaccacattaatcaatggatgatgtaggatttttaccaaattacc

SEQ ID NO: 237747 - DNA, 1016 bp, Cannabis indica
atgaaagtgagttttctttatgaatggaagccatcggtatgtatttattgggcatttatcaactaagtgtaggaagaatataggggttgagaaaccaattacaaggaagatttgagttcctaaagctatggtggatgagaaggtgatacaagaggaagaacaacctggtcctagtaaggttaagaataaagtgattgatattttttagacagttaaacattctgctaagaacaaaatctgttcagtgcaattagcgttcttaactcttttggagctttgaatacgtattcgtggaatatatttaagtggaacataatcttaggggatgtttgattcataagaatagaaattgtaatggtaattaaaattctcattactttgtttgctttcttttttaaattttgtaatccattacattgtaatgattattatatttgttgtgtgaaacagaacaatcaatgacttacgatacagtttacagtatcaactaacacacaatacaaacaagaatcaaaatactaagagattacaagaattcaagataatgaattaagcagtaaaatagaagagaacaacactaggtttaacgagttcaagacttgtgcaatgctctacatctcaattggaacagcagcaaccatatctttattgatatcagtgttgacaaggttacaagaatctttacaaacttctcaaagattacgagaaaaagtttctctctctagttcagactctaccctacacaatcacgattttcactcaagcaaatgtggtttgaatctcacacacaggttacaaagatttacaactatatataaatttgcattgttgccaaatatatctcctaaatatcatgacagaattacaccatcataattgatccagctcatcattagcaacaataaatccatgtcatctatgcgctttcagtatgaacaattcgaaagaattgtaacatcaaagcattttggtaatcgtacatgactgttgtcgtctcgcttttgctttcacgtaag

SEQ ID NO: 237748 - DNA, 1081 bp, Cannabis indica
acttacacaatgatatgtgaaatatcttttctaaggtattagcaaagtacattactatcagatgtattgggtatacatcggactggaccgatattgatagtgaaaaagatatcatgaacttactgttatatattttctaagttaacatcacttagttgatcttaggtcaacagatcttaatcctgagatggttaggtactagcttaaatgtattatttgtgttctttgacttgttcgttaaagctgaccaattgatcggcctaatacttacattttggaaacatagtagtgcaattgagtggaaacgctaatcatagatatagaatctatatcttctataactattataagtgaaactacaatttcttttgagtttggcttaacgcgctaaatgatagcgcgctcatttcagtaattatattagtttagtaaaatatcaattacaagtagctaagtattttaaggataaaatacattgaaaagtagtacgataaatttatccctacttgatgtagatcatctatagaggatctttgattatttgaattgaaacaatagataattcatagcgtatctatatttggtaaaaaaaagaacattctatgtaatcgggagtacaattccgaatctatagtggagtgaggaggaattaataagttaagaaatttacttagtagattttgggtctacttattaggagcttggttacagaagcccatggtccccacattatttggaataatattatcttgtagacttaattaattggttttaattaatcaattagaattctaaataagactatgtcttgtttgttaatatgtaagaataaaaaaaaaataatataaatacttcataatttaatactatagttaaatatactaataaaataatacaaatgacataaatatatataacaaaaacaatgcatttattgtaggaataattacataaagcacaattttttgtaaaatatttacatttttacgttcaaagaatgttttttttacatttttacggttatccaaaaaataacacgaaaacaacataaaattaacaagaaaacaacataaaagtaaca

SEQ ID NO: 237749 - DNA, 3964 bp, Cannabis indica
atgagcttaaaagtttggtttcttagtattaattcttctcggtgttggtgttgtattgttactagtgtaattaagtatcgggtgttatataatttaagaaaataacttttagagcatatcgcctaccaatcctaaagcgtcacctatagaaagtgttgggcactactaatgcccaatagcaatgttttatttaaagtgtaataaaaaggtaaattttgataaatttgactatattttgtgttaaattagcaaatgctaaaatataagatggttatatttgtttaccctgtgaggtttgcaagggagatcccaccacttttctccattgccttgaatagtaccagttcctgtgaaactcatattatccagtctgtaaaacacaagccattgcttaaggctatctgctttaggccattcctctggtccatctggtgtcattaataccccatctacctatattaatcaattcacaaaacaaaacacaaaatcaattttcatttccctttttttatcctaattaataattaataatcaataacattacttacttggaacattaatccggggctgcagggtccagaaaagatagtagaagtaattttaaaacaataatcagcaggggccaaaacgacaccggattcaacaccacaggcagctttccatgcctctttaaaggctgcagtgtcgtctgccacaccatctccaactgcaccaaacgacataacatcgaatgtcgtacaattatctccccctcctgttgtcgtatcatcatcctctggtgctggagcagggttgtttacataagggtctgaaggtactactactggtgatgatgaggaggaggagaagaagaagaagggtctgatggcacaactgaagctgaaggtgttggggattcattgttgttcttgttttgcttcttgtggtaatgaaatcttccttctacattgttaataataacaatcatccaaaaaattagtaacagcccacgaatcatctccattggttgattcttttttccttctttgtatatagcttgttctgaaaaattataacagagggagagtagtagtgagttatattatatatatgtagtacgaaataattggagcagaggagtcttaattttatagtgatgaatgtttttaaaagttcactatgatgtgtgatgatgacacgtgttctgtttttgttggttgaaatgtggtggagaagagaaaaaatgaaaaaggtttttgaagggtttttctttgtgtgtggcaataatctggtagtgttacattacatgttcttttgtttttttaactagattcttcctagttatctctcactttcttttgtctattattttattttttaaagttttagaccgtatatgacaccatgttatgtggtccaaaaatctagcagctaattctttttcttttttttttttcactctgtccaacttaaaactgttttgatacacataataataatatttgacatacatatacacatgtgcatgcatgtactgctgctttttaccctctagtgtaatttttatatatatatttatagaaaatgcagctatgtttaagcttgtgaactagtttgaggtcagtaagatctagaactcagtgccactgccacatgtcttcctctggtgctttacatgtttcacctccccaacaaggctagctctccataacatagatagatacataaccaagtaatgtgcctattgactattgagtatataaaaattcataataaatccatttaaaaagaccattttggaacttaattgtactcatttatactagtataatttgtttaggaaatttttgaagttaatatgtccttaaaaccaattaccatatatttttgtacctttcaaaaacaaaattccatctaatcatgtgtatgtagacacgtatgtataataccttacaatatactaattaattaaactaccaatattccttaatgctatacgtacctattaaaagactgatacatatattctttacgtttgtattggctgcatttattatttatatatatagttaccccacttgttaatttataacgacatgagatgagagatgttgtgtgtgttgtgtacgtacgcgtacttgattaattatactacttgaaatacatatataatagtcgtgtgatgccattgccaaaccaatagttttttattaagcatttttagtaagaggaaaaaatctcaataatagaataagaaagatattatagagtatacgtgtatacatgataaactttttggaataatatatgtagaggaaaagagagagaaagagagaataattgaaaataatatatgatgatcagaagagaaagcattattaattgggtgaatgtggggggtttcatgatgtaaaatcaaaaactctcgtgactcttcattgtttgctagctatttgtggccacggaagcaggaaggcatgtagctattatatatatatatataaaataaataaatatatatagagagagagaaagagatcaaataataataatatatatatatataaattatatataaaaaagtatatatagctgctcgacaatagaattttaatccattcacgggttcatcatccaatttctctatggtccataacttgttagtttcaaccaaacaatttcccccacactataaattaaatatatgccaacacaacacatcactaatacaaaaaaaaattaaaaaattctgtattatatataaatataaaataattaattattattagtcaattataagttaacaaagaataaagtaaccaaccacaacctaactaaagccaacaactttaatttgtatctcacgtgatatatttttacacattatatatatttacatatatatacacacacacaagtatataaataatatccaatggcaaaattcacctgattattaacttgcacagatcaataatgggcaattgaggagcagcttcagtagtagtgatataatggtcccatgcaatgcatgcatgcaaattttatataagactagctataacttggagaaacatatatatatatatagttagagctagagtgtgagtatatatatatatatatgtatgtatagatatatatgtgactagcttattgctttgtgagatggcagggggtgaggaagtggggtttttataggtgttaattaactatgtatataggaaaatggaaggaaccgataaagtctgttacgttgcatggttttgtctgaatctgtcacgtggggactcagaatcatactctcttctcttctcttctctctctatatagagatagagatatatatgatctctctatattgctccatgatagaaacaaaaggttgtgattgaaaggttgtgattgattgagtacatgcacttttatattattattattattattatttggtgggtgagaattaatttttaaattcgtggtttctagcaatgacacgtgtcttaaaagttaaaactaaaatgagtatatttatctgtatgtttccaaaacaataaaaatgagtatctataggttaattttggaagggaataaataatttcgaaatgtaaatataaattagttaaaatgaagtagattgccttgtcttgtttagggctagtcagattatcttacttggggctctttttttatgatcaaatcgctccttttattttttgaaaatgatttaccaactagtacctcaagaatattataatgtgacggatttaattatttaatgaagtggatttgattttataaatatatatataaaagctaaaatgaaaaaatatgcttaatattggtgtcatgaactaattatgctgatcataataaatagaggattgttattaattaggtttcttttgttttttgagaattcaactcatttgtattttattaaaactaccctgtacatcctaacaccacctcaataatcaggcct

SEQ ID NO: 237750 - DNA, 665 bp, Cannabis indica
aaagggacatttataactaattgtaaatttagggtcattttgcatggtccatttctaatccccacaaaaaataaaagattcaatcacattttggtgcctttatggcccaacaatataaattggcccagctcaaatgttttgggccactttaatttagcagagcacataatggccatttgcacccaatcagacccaaaccccatgattatgagcttggacgatctttgatgtgcctcgtggccacagtcatcagcgactggagccactctctccattacagagatacgtttggagcaactaaatttcttctataaataggagttataaacaaggaaaaaagaacacaatttttagtgattaatgtttagtctgaactaatttttcttaagcttatgttacagtttttatatgctgaataattttcttgttggttataatgtttataatttgaataattattcttcatcttcttcatttattttatctacaaagtattatacgcaatcttttatataaatattagtcattgtctattattattattatggccaaacctcacttatatttgagggatgtgaaacctcaatagattttaaaccattagattgatgtaaaatgtgtagttttggtatcttatagttaaagatagtttcatttatagtaag

SEQ ID NO: 237751 - DNA, 1259 bp, Cannabis indica
tatttaaatctttccattcgattctggcagatgacaaaactcgtaaaaataaccgtgtatgaaaacaagttaattatttaagaagattttgtgcatgaaagtcttaatttttatttatagctatttacgtgagccgtgagcgtggaaataagtaaagtataatatcttccttttttgtggtggtggtagtcaatattgcacttatcacctaaaagtcgtgaacatcaaaaggtcaaaagtcccttttcacaggtgaagaaaaacagtatgtaatggttcatattgaattttgaaatctcaaacgaatatggttagggtcatcccactttaacttcttttctaattgactcaatttctaatgtagaaaacactacaccattttatactcttatatctaaagtgaaaggaaaagtgtattacatattaaatgtagtatagtatagtagtatagcagagatatttgaaagagaaaatgtttttttttgttgagtgcttatggccttccaagttcatcgatcatatactacaaaagaagttacttttcagtgataattgttttttaataacatacatttttttttggttaaaatgttagtcacaacaaaaaaaaatatattaaaaatataatattggatacaattttgtggctaattcagttttagttataaccaatattttgattattaaaaacacatttagtcgtgataatttataatttctgtaattaaaaattttagtcacacactttttaatgtatataaatgtcatttttctaaagtttgggctcttgggctcgtcttgatcaagagaattagttcaaaaacttatttcatccctctcaagaatattaaagcaatcattcaatcaatgctattttaggatttatcaaagctagcttatactctcaacctcaacttggtgctcttagctgaaatgagaatgtaaagtagtcatgtcactcaaatgcatgtatggctgctattcataaggtttactcacttcttctgaagatatatttatttaatatatatataaggttcgtttggtacgttgtattgtaatgtattgtattgtattgtgttggattgtgttgtattatattatattgtattagtattatttaatacaatacaatgtttagtattggcttgtattaattgatttatgtaaagttataatatatttttattacactcgatcccaacaccaactacgggtcggtaccgggtctgggtcgaggtccagtctcgagtccgggt

SEQ ID NO: 237752 - DNA, 852 bp, Cannabis indica
ctcaaggactacgagatccatgacggcatgggtcttgaactctactacaactgattcatccttcttcttccgtaagtcgtcgtcttctttttcttcctaaaagttttttgcttttgttttcttatatataccctgctattaaattaatttcaattgtatcttggttgagaaattggtaaaattccatggaaatcatatggctacaatagagattttaggaacatttgagtttatgatgttgaggaaatatgttgatttatttttcttttatttgttttttaatttaaaaagaaaaaccttattaattgattaggctagtctgctgtgacaataagtttttaataataccttgttggaaagaacattaatccaaacacaatactataagacatatatgatgtgtaattattttacatgattagtaagattggaagtattattaagaattttgatggcaatttgcgtgaaaggtacattgttgagggtaaagatagggtcaacacagtctcaatctcaacatcctcagagctttactatatttcctcaggcaaattgtatatagtttggaagaattttctactgtacagtacatatggcatttgattttttatatagatagcttatgtttggaggtattaaatacttttctacttagagaccaacgatttatctaatgcttcactggacatgaaagttatttttggtgggggaactatgcatatttgggatctaggaccttgtgatttaattatgtgtagttggaaagtttaatccagaattttatcgtatcaacttgagaacaatttacaatttaacatcagatttgttctctgctatttaattttttgttgt

SEQ ID NO: 237753 - DNA, 572 bp, Cannabis indica
atataattactatacacatatacttactttcataaatttttataaaattctaatagttttttgttaacattgttaattttttatttacttgttaataatagtttagggttatttttatttattaacttctcaactctctaactttacatctattctttctctctttttgtaggtaaatggtaggaccttgaccctattaattcataaacatttaaattttaaatacattctcatctctttttcaatctatttaaataatcattgtctctttcatagctatttcaaaaatatttaagtagaacaattatatgcaactaaggatgtatactattacttgattggtatgagtatatatatatatgtgttacaatattatttttttaatctattttagttttgtccatacttttgtatttaatgtttttattcttgagtgattttttttatagaaccaatcttgatgatagaaaaacaagatttttcatggaataaaaaaaatatgatgaagaaatattttcctaattttgagtaagtaaattagtttgcgataaaaagtcttatttattataata

SEQ ID NO: 237754 - DNA, 885 bp, Cannabis indica
tgagcttttggttgacatagatagtcccacgatcatttcgtattaatgcacatatatctataaatagtaattaaattactgataagctgttaatttctatgtctaaatatacggttattacagtcattttatgagacaactttggtttacaagccagtggtctgtgagaagtgacctccttttactcatgtttggggtagagcttattgagtggttggtctcctcgacgcctattctaagcttgtctaactcagagctgacccactttgttcagtttgggcctatgttgtgctgcaacttgtagtttgctaggaattaggactttcatgaaggtaccttttggactgtgtctgctatttctaagatggctaatgaagggtgttggtgcttcaacaatgcatcttgtctagtcatacacacgagggtagtcccacccctagcccttttctctcttgtgggatatgttggttgcaccttgatatttgtcaatgccattatttaaggtcattgggcttttagtgctgcggttatgttgggggcgtagtagagccattaatgatattacacaactaaggtctattgctcttcgcctcttgaagttgaagcgttgacccttcttcgtgcaattaaattctataataggaacccttccacttctggtatttgtttcttcactaattgctaagttgtggctttggctatagcttcttgtaaggttccttggaatctttacattgtgttccttgatcttttatttcattagaagcttttgataatattcgtgttgtttggattctaacggctaataatagagttgttcatcatgtcgctgcttgggcagtgtttatgaatactactaaaaacattcatctaaggaaggtggat

SEQ ID NO: 237755 - DNA, 1313 bp, Cannabis indica
gctaaaaatagcctaacacctttccattacctacacatggaagtagatctgtgagtcgacaaactcagtaagaaagcatataccaacttgcatctaggcgcccatacacctatttacaaggcttaacagatgagtaagaacgttctaactaggatacgaccatgcaccatgtaccacatgcactcaaaataccttcgtactagtgttgttatggtatggaccgcaccttgagtactgttaagtgttgaactacacacacattgtaccttcccgtacaagtcctggtaacaccatgatgtactttcagacatcatacaccttaccaatccactctctaccgtaaccgtacaagtgttggtggtctacgaatcataacatataagcatgcatatacactaaacatatacatacattcgcatatccatattacacattatatatacagtaattgccttcattccagattcaagtgtgctagccgacctgaacgaaaagtctcgtgctagatggatgccctaatcacataatgaaaccgggtaaatcacatgatcaaaaccctaatccaagaaacccgaacccaccactctaggttctgttatactctctagggattactctaacttaggaaatagggaaacacccaactaaggcactgaaatggacaataattgagaaaatggagcattcggggaccctaccaaaaccggcgtactagtaaaattggctagccggtttacactagttcacccaaaacccccattttttgctcaaaacttcaccaaatgcaaccaaaccttccagagtgcctaattagggtatacaaaataaattccaaccagtagttcacagaaaagctcaatgaaactcaacatgccattaaagatcaaagctttgagttcaaagctcaaacttgcataaatttaacacaaggtggtaaaaccagctactagaacctttattcaacctaaaatgatcataaaaatcaaaccctaagtatttctaaccctaataaccaccaattaacaaaatcacatactcaaccaaccacaaaattcaaaaactaaaggagggtgttactagggcttacctttgattcaagaacccttgaatctctactgaatttccagaaaaacagctaaagatcagttggttcctccttggtttggtgttgctcgaagagaaagagtttctcttgacttttcttaatttctctatattttccctaaaataaaactaaggttaattgaattaaccttgctgaatattttagtcgctaggtgtcacatgtctaggcagccacctaactctccatt

SEQ ID NO: 237756 - DNA, 986 bp, Cannabis indica
acagggaatctactgatcatgggtgagaatccttctatggttcctgctaaagtgagactgccccagaagtcaagctactatcagccctgcaacttaagagaggcctgaagaagaagaggccaacatttgtcattactcccgccgtgtacgatgaaaaagtggaggagtccactccacctataattgagaaggtgttagatgaattcaaagatgtgatgccggacgagctcccaaagagactgcctcccaggatgggagttgatcaccaaatagagctggtgccgggtgcaaaggccccagctaaagcagcataccgaatgtctcccccgaaacttaaggagttgaagagtcagctaacgaagatgttggaggcagaattcatcaaaccatcaaaggcaccttttggtgcccccgtgttgttccaaaagaagaaggacgggaccttgagactgtgcatagactaccgcgccctcaacaaggtgactgtgcgcaacagataccccattcccttgatcgctgatctgtttgaccagctaagtggagcaaaatacttcacgaagttggacttgagatcagggtactatcaggttcggatcgcagaaggggatgaaccaaagactacttgtgttactcagtatggggcgttcgagtttcgcgtcatgccgtttgggttgacaaatgcgccagccacattctgtacactcatgaacgaagtcttccatgatgtcttagtcaagttcgtggtggtgtacctggatgatatcgtggtctacagcgccactttagaagagcatcagaaacacttggcaacggtgcttcggaagttgaggaaagaacagttgtatgtaaagcggagaagtgctcttttgctcagaaaagtatcaagttcctgggtcatgttgtggaacacgggaagacccgtaaggatatggaaaaaggtgcgggcgatccaagagtggacgaccctagccaatgtgaaacaacta

SEQ ID NO: 237757 - DNA, 1558 bp, Cannabis indica
ccctctgtttcgtttgaaaccctttatccacaagtctggcttttagccttttccaccgagccatcactgtttgagttttgttcgaaacaaccacttattttgtattacctgcataccatcaatatagggaacaagaatccatttcttgtttctaataagagcataatattctgtggttatagctgagttccatttcgggtcagctagagctttcttgacagatcttggctcaagaaaattattagtgaatctagttattgtagcagctaggagtttaggcttgtgtataccagacttggatctggtttgcatggggtgatagggtcgggtgtgatcaggtaaagtggtttgttgtggttgagttggtgctatagcaggtggtgttgatattatgtctcgggtggggtctgagattgatgcctgtggttgaatgggagttatatcaggtggagatgtggttcctgtggacctgtttgttgtagtaatggggttgggattatgatctggtgtgggtggagtatcagggaaaattagtggaggtataggtaaggtgattggttggtaagttgatgagggagtatgtgtaatagtgggaaataattgagaataaggaaaagtttcctcatcaaatttgacacttctcactatgtacacacgaccagtagagtgcaaacatcgatatcctttatgataaggactataaccaagaaacacacacatagaggtcttgaactcaaacttgtgtttattgtagggtcttaggaatgggagcaagcacaaccaaacgtttttaaaaaactataatcgggtttttggtgaaacaatgtttcaaagggagagatgtaagaatttctttgaacaggcagcctattaatcaaataggtggctgagacaaaagaatcccaccaatactttaaaggcatttttgcttgagcaagcatagtgagcccaacttcagtgacatgtctatgttttcgctccgctctaccttgttgttggtgtgtatgaggacacgggtgtctaaagacaacacccaattgagctaggataggtttcaatggtctatattcccctccccaatcggcttggaggcttttgattttgaccccaaattgtctttcaacatagttgttgaagaattgaaaaacagtttgggtgtcagatttgagtttgagtgggaatatccaggtatatttggtgaaatcatctatgaagattatgtaatatttgaatccctcatgagtgggataaggggaaggtccccaaaaataggtatggataatgtcaaagggtttggttgtgtgatgttgtgaagatagaaaggtacattgatgtaatttgccatattgacaagcattgcaaaaacttggactggctgtaggaatttttaaagaatgtagaactttattcaaaacaactatggaaggatggcccaatctttggtgccatagatttacaagagaaacatttttgctattattgctactcttattacatgaaaaagattgtaaatgctgtcttggaacagggagatggtgagattgatttgagtgtggtg

SEQ ID NO: 237758 - DNA, 808 bp, Cannabis indica
ttttttaaaaaaaaaaaaccaacaaatcaaatttaaaaatggtttctttttcttacagccacaaaaaagaatagttagacacgtaggccttaacccaactaacaccctagcctagccgagccgagccgagcttatctgtgagctgtaaccaacgtttctatgaacctcaagccgtcgaacctaggcgaaaatttctccttatccgacgtcgttttcggcgagcttttccttcccgaacacgaagaaaagtcctgcgattatgaaattttaaactaatcaaaacaaatttaagaggaaaatgtctcaaatcagcgaatcgaaatcggatcatcatgaaaagatcttagttacctgattggaagaagaatctagagaaacatcgcgtgttccggcggaggaaccgaaagctacggtggatgccgccaacaccgaggcaaccagtgttcccgaagccttcatcttgttctttttcttctgtgtggagattcaatggccgaaaaacgacgtcgtttcgtgtagatctccacctattttcttggtttaactttttctagggtgagaaatgagagaggtgtgtttatatactgctacttcattttctttatgattaaattgtatttgattttgttttgagttccggggaaattcagccttggagtctggagaatattcgccacgtaaattgactgggggacccacgtaaatagtatttaattttgttttcgatcggacggttgtgggtgggggttgttgggttgaatcatgtgagtggaggagggtgtagggtgtggtaatgtggaggcgagag

SEQ ID NO: 237759 - DNA, 1438 bp, Cannabis indica
ttcactaaggacttgcgacattgagtataagcaagactgcagggttagatcagtacgagccaacgagtttactgttacccacctgtgcgacttacacgcgagacctctgagggggctagtggcgagaccagtacaagtggctcgactaaaataggcgctttgagccttgagcacatcagggtaggagcaataatcccccttcgcgactatttcaagaactttgtaaaccacctcgggcttgccccgttccaactgaatcccatctcctacagaatcctcgcaagtttgagggttctgtacaaaatcctgaatcgggagtgccccactcccttggaaatagagtatctctactctgttaaagttgttcctgcgaggaagaatgccgcaaggggcttttactatctcagcactcactccggcgatcgcaagatcatcatggattttccaaacaaaacttcattcaaggatgatttcttttcgacgactggcctctccccgattggcacaaccactttctgtataattcgtaagtgattatttgcataagacttggttgaattaatccatgtcttttattctaagttatctgactgaaattttgttttgttctcgaaagctatctcaaaaagacctgcccctacccttgagatggccgagcgatgcaggctcttgctgactctcccgtatggccttaggtcatgtgactaccttctaagcgaagttaatctgaggtccatggatctcctaactgacaaggagtttacttgtgactacaaatatcccaagtattcttcttgatagaaggttcctatcctagacaaggaggaaatctcaagatcgcgtggctcgggcactgtaccttcagaatactgcccctgcgaagccggcgaaggagcatcctgaggtaatcaatgtggttggtcaaccgcactgcttaggactgaacgtaacactgtagttacatttcgagatagccattctagtgactatggtaaattccttaggcggaaaattatgccccaagctctccttttacttgtcttcaatttatgctaacactttatcttatctcgcggaaatgcatttgaaaggtctcatgcagtaggaaaggaaaggaagggggttgaccaccttggagtctccttctgatgccgaagtggagccccccaaaaggcaaaggaaaaccaccgctaataagaagaaaccctctcaaaccgtcaacctcgaggtccttgagactgaaacccaagatctgattcctcctccgatcaccgtaagtaccgaacgagcctcccctaaaagcaactcaagcctttgcctcctcgagccagggcattgaaacactgcgtgtcgaagcaggaaagactaggctcagagttcacccaagagtttggggctgcatgttggcgcctgttcaaggctctccctccccatgatt

SEQ ID NO: 237760 - DNA, 3593 bp, Cannabis indica
tagtcaacctagcctttacattccttctaatcattcaaaatggagaacagctttaaggtaaaagactagagtagaggcttactataagctttaataataaagcatttacaaaatttatctttactactttaaagatattgtgaaaaaactaagaaaaagtattttatgtagtattattattgggtattagtggtgcccaacaatttttataggtgacgctctatgattggttaacgatatttcttaaaaattatttccttaaattatatgagacttgatatttaattacactaataatgatacttaataacaccgaaaaaggtactacatacagtattttttaagaacctctttattgtggtattagtggcaaaagaagtaatggactataagagcacctttaatgcaaggttcattcgaagttgttatagcctatatacaatcattcttttttttaagaagttgggcaccgttgcccctacacctaccaccttacaacttttctcgtccacctcacctacaaatgtctccacactctcacaaagccacaagccacttttgtggcaacctcatagaagaagaaggtatggctttggctttcaacaacaagtagagtcgatagagttagagtaagaggttgtggagtaaggcctactaactaagtacttgggttggaatggaagggatacccttgaaagatgttaccttgggaatcaataattcagtgttcaaaatatgctagaggaaaatgaaagatttcatttttgtcaagaggaggtagattaactctaatttatttatagattaactctaatttagctagtatacttcccagaatctattcaaagatctaattgttatttcttaatgtgcctaacactacactgatatgacgtcttataattagttaacgattttccaataaattaaaatgcgtaagacccgatattgaaatgcaccaacaagtgtgattgtagctcaaccacaatgaatctattaaggtctagcgcttgtacttcctcaaactctaaatcaactagcaataggttgggtattatccaccattcaatacattcaagactcaaaaagttcattcttttcacaaatataatgaaaagaaaacttgtggttttgttattgatgttctcttccttttccggaattgaaccatattcctcctcaatcatagaaatgaagttcttacactctaaacacatccacattgctctcttgtcatcgagaacgagccttaaatttttttcatactctccttagaactgttgattccaccttgtactaaaagaagtgacttctgttgttcggtcagaagacctccaaggttgttgagcctgcagagattcgaatcttggaacaaatgctaccagcactttccatttccaacaccccttacccctaagaccacccactggggttgtcttaatcaaacaacataaggacttcaacattggataaggtaaaatcacagcaatgaggtatatgagatatctgtaccattgcattaccaaactctgcttctatattcctcaggacaactaaaaacctgttcatgttctgagaagaaaattgaaaactcaaccacaatgagctttgtttgcctcagttttataaagagcaattgcatggcttccaatccatgtgatgtgccaactttgaaaaagaatagatttttattctgttcttttttcaattttgcctattgcagtttcagtgctactattgattaaatgacatagaaatgtaagtacaagagcatcaaaagaaacctaaagtaaaacactcacatacaaaagtggttaaagaacctagagaatgagctgtgacaagctagcgaaagagccttggaacagatctctttggtactttcccttccatctttaaccttctataagcttctctaatgtggcaaggcctcactggtccagattctttcctctcactcataacaattctagctgtgcatataaacaagtacaaaacaagcaaagtgcattactaaacataaagaacttgttcacacacaaatttgtagagttgaagagtaaaagaaaggagtacctgtttcaacaagttcaccaacaaacatctttgcaataccagatacaacaatggtcaaaggcacagatattttctgggttccagtgatgctagttaacaactgcagatgaaaggaattgaattgaatgaaagaaatgattttgatgtataattaagaagcaagaaagaaaaagaagaatacccttttcatgttagatttctgaaatccagctctgcggaaggactcgtaacgactcatctgttcctcagagaattgggaaagaatagcttgcatcttggccattttatgagggtcggaggcagaaggaaacttttcaagctcaacctccacattctctcctcttcctcgtcatcatcttctctcttcttccgaggaattggtggcagagcagcagtcaatgccatggatgaagaagatggtcctctgtctctgtctctatcgccatctctatccttgtcatcgtcttcgcgagaaacagctgtagagggatcagtagcaccagtaccagctccaccaaggtcttcttcatcctcgtcttgattgtgttcttgctcttcctcaaaggccgcttcaaaaggatccttggattgctgcttcggtaactttttgggttcttccatttttcctcttctttcttccttagatctctctttactgtcttcgttctttgatggaatttttgttgaaaatgtttcctgagaaattagagtaaatggctcaaaaatatgtcaccttgtaacctaatgtccccattttataattggcagaaaaatgacaatttaatactattaattaattattcctgccacataaaattctcttatttctcatacttttaaatgtctaatttattttttttacttatctagaaacctataacttgaatattcttaaagttatggtaatgttttggggatttttatggatttgttggtatatatgttttgtaatatggtatattaaagaaaatatttagatttctattttattagctctttgctttatataagaaaatgaaataatttcatttgtttgtggggataaatttgaaaatttacctgctgaagaagcttttcctctgggattattctgaccaagaagttttgcagatgttgagattcatcaattgaaggagaagaagatagccatgaaagtaccttagttagcagcacacatgtgtctcaagaactaccataccaaataggcctgctctttaagagaaatattctcaataggcaagaaaaacacctaatatgacgatcaaaatgaaatatgatagaataatcccatactcatttaagttctcattaagaaaacataaacaaatcaggtaataattaagggggggggggggggtaaaggaacgttattgatgtttgatcagtcaacagtaagaatatagtgcagcagtacatagaagaaaatgaatcttagagtcaatcaataaaatgttaaatggttggatgaaaagattaacgttgtttgtctcactataaatctaaacacttaaaaaatt

SEQ ID NO: 237761 - DNA, 1331 bp, Cannabis indica
aacctttgcattatgacatgacaatcatgggatttcaatccaacaatattgtcattagttactttttttttcaagttcgaacaaaatctacctggcaatttaacttccttcaaaaatttacaaaacacttgcttatcattagtagtcaacacataaggggcatgggttttagcaatcttttgtgagcatctttgaaatccataaggattgataaattctcatatttttcaaatctaattgtctagcattagtggtgtccttaaacttgtcattatccaagagagtgccaagaatactatcacaaatattcttctcaacatgcataacatcgatgttgtgtttcaactcatttgtactccaatactcaagttcataaaaaatacattttttcctccagttagtatcagtctcacctctttttttttttccccggagctcgttctgatagaccattcacttgttctaatatttcagaacaagtaaatcatgttggcggaagtctcttctcaacatttccatcaaattcacaatcctttctcatacgatgattggatggcaaaaaatgtctatggccaacataagatgtcttaccaatcactcgaatggaactagtatcctcgttgcatgtaggacaggcattatatccctgtccactccatcctgacaagctattatgggcaagaaaatcattaattgtccaaagaagagctgcgcgcatgttgaacattgagttgcttgtagcatctcttgtttaaacaccatgagtccacaatatgttcagctcacccaccaatggccttaaacatacatccatgtccgtaccaggtgacttcggtccaagaataaggagagtcaacatgaaattgttatcttttatacacatctaaggtggcaaattgtaattcaccaacactacagaccacatactatatacgaaaggctcatgttgccgaaaggattaaatccatcagtagctaagcctaagcgaacattccgaggatctcttgtaaagtcaggatgtatgctatcaaagtctttccacacggcagaatcaacaggatgacgcataacaccattttctctcacacgaccagtacgatgccatactatctctttggttgtatgtcttgaactatataatcttttcaatcgaggagtcaacaaaaagtaactcatcactttatgcgctactctttttccgcttgtgttctcattaatccatctactggtcccgcacaccggacaaaaatctttcgaggcatgctcattgtaaaataagcaacaattgttcttgcatacgtggattgattcgtaccctaatcctaattttc

SEQ ID NO: 237762 - DNA, 1112 bp, Cannabis indica
ttgataaaactaactatgaattaagattctccactattatcaaattccatttcaagtatgtcatcatcacttgaacaaaataactcatcatcacttgacaaaactacgtcattattgaagaagatagtcccataatcaaataagcaaatagataagcatgtaaaacacaaaaagatgagaataaagataaaataagcaactaagacaaattgcatcactgcaaggtttctctaattttaacaaaattggtaacactcaaccaaattgaaagaaacccaaaaagaaaaacgaacaacacatcatagtaattaatgataattatacatagatagtaatatatatatatatatgttctaataccttgttttcgtcaatttttgtaatttaccttttaattttgttgaaaaacagaaaacttaattgttccaatatatctttgctttttcatgttctacctttggatcaaaacaatctattaacttttcttattatacgctgggctaatgggtccgaagagcaattatatctcaataaccaaatcatgttgtaaccacaataatttttctctttggtttaatcattcttttttttttttatctgcaatgatttttctcttttgtcccaccccctttcttttcaatttatcttttatgcatgatttgtggatttgggatttagacactaagaacaacgaattaaattccttattattattatagctggtccaactcaaggggaataagatcaaaaaattagaataaaaatcatattacagtgagataaaagttaatcaaacctgagagaataaggaggaaacacaagtcacactgagagaagcttgacggcgggataagcttgatgaagatatttagacttcaaagggaaaatcggagcgaatgatctgtgaagaataagaagaagaaaaataatttaggggtaaaaaaagaattagtgcatgttttagcatcataaaactgaaaaaaaccgtgttttttttggttttttaaaaaaactaagtaaaaaatttgttttttctgtaaaaaacaatttagggctttgtttggtccttgttttttgtaaaactaagtttctagaaacaaagttacaaaaac

SEQ ID NO: 237763 - DNA, 577 bp, Cannabis indica
gaagggtgctggccttgacaagaaatttttgggtgaagcattgaagactgcttgctatgtgataaataggtgtcgttcaacaactctcaaattcaaacaccacaagaattctggataggacaggtcctaactgttgatcatctcaaagtatttgggtgcacaacctttgcatacactagacaagacaaactagagcgaagggctctcaagtgtttgtttcttggttaccctgatggggtaataggatacaaactatggtgtttggaagagggacatagaaaatgcataatcagcagagatgtgtattcaaagaacatgaaattgctatgaagacagatgcaatgaatagtaggccgactgacaaggagatgacgggtttagaaattcaaagcaacagagaagaagggcatggttcagatcaggtgaatactcaagaaagcatacattcagagacagataaacaagcaatagaagtacactataaatatatacatataaatatatatatcaatgtttatatacaaatttaatgctttattatattacatagtttagcaatattgtcatggtacctact

SEQ ID NO: 237764 - DNA, 780 bp, Cannabis indica
aaacaagataattacgatagttcagggaagtatttagccacttatcctaaaaataaagcaaaagtacaaacagaaaaggacatccacttgttaaactccttgtcaacaaactaatttatttcctaaaaatcaaatgcttataaattctaaatcacatgatagtacaatagtatacacgcctggcaatgaagacattaatggaaggtaatagctgagaacattgttaacactatatggagtcagatcatggatagagggaattagaaacaaagaaaaaaaaggactaatttaaaagaaattaaattagtagtgaggacagataactggtggtgaaagtgagtatgtttatggtgagatgcatatataccatttttgctggaattttcctgttgtggttgtaaactacataatttgcagattttttttgttttgtttaatagtgaaaaatattgttcaattacaaaagcaaccaattagttgtgtcttgtgactgggttgaaaatacaactcttaactacaaaacgggttcatatagatagatttcagttcagacgaatcaaagcactaatcacagtaagatgagagtattaattacaaaagatgtttccaccatttaaccatgacagaaacactagtactctaacaatatatgtcatgaaaattagtaaggcattagtaaggaagcacatattttcatttttcagtcaacgctgttggaagactgaaaggaatacctaaagggatgcaaataaaactcaggagggagcaaagatggggtaa

SEQ ID NO: 237765 - DNA, 901 bp, Cannabis indica
caaatttgcttgcttgctttgaaaagtatgaaagctggtctggccaatgcattagtaggaaaaaaagtggtgtagtcttttctccaaagaccaggactagggagaaggagagggtcatgaacatcttaggaatgccccttttgggtaagcaggaaaagtacctgggtaaccccttctttgtattggcaagaaagcaacatgacttctcctttctcaagaataaaattctcaataggcttgagggatggagggctaagcaattgtctcaagcgggaaggctaactcttataaaatcgattttaagtagcatcccttgctatacaatggccacttgtatgattcccaagtctatatgtacagatattgatagcatcctggcgcggttttggtggaagggacaaaatgatgataatctcaacagacggtatttggctctaaaatgttggtctgaactctgtcaaccaaaacgaaatggaggtttagggataagaagacttcatgatatgaatatggctctgcttgcaaaattggcttggcatatgctgtgccaaagtgagaaaccttgggttcgaattcttaatgctaagtattgccacagtctaaacttcgggagggttgaaaaacataatagtgattcttttgtttggaagggaattctgaaggctcgaaaaatttgtgcggatggtgtggggtgtctgattgggatgggggactgtgatatatggattgttccttgggtcccagggttctgcccagaagaagtgcaacacaactctataatactccaattcacaagcggtacctgtacctggaatgaagaactgatcaagaaatgttttgatcttggtgtggctaaagcaatgttgggttttatgccctaaataaaactccaattcaatgt

SEQ ID NO: 237766 - DNA, 870 bp, Cannabis indica
cgtaggattgataatttgaaaaacaatcctttatgcgagagccgagtctcatccaaggtccatacatggggattgttcatccaaagtcatccacgatcatttgccttttagttcgatgaagaacaccttcatgtcccactccacatttgtaacacacatgaggtagattctcatacttgaaatagcaccacaggcctcctccataaggagaaacaagcccaccagcaaaggtttcttcaactgtaaaacgacttggaaccgaatatactcattagtggggaagccatttttccacatcctatcgatactcaccaccaaactaatcctattagccacgacgttagcatttttcagcgaccaaaaacgcgaggggatttcatagaccctcacccaaattggccgtgaggttaaatctacagaacgccaccgactctcttctgacatttgtttaataatcataaaaccatcacaaatctaccatggggcgttcttcatagcaagttctgcttcatgcctcttcatgaagtgaaatatgaaagtattcctggccacctcctcaagttttcagccttgagccatctccattttattgataacatcaaacggagtaaatcatggaaaatgacttttttagttatcaatcttaccacgacgaacttttcgttgaagtctttgcccacttcagcattagcctttagcgcaatagagaagttacaggcaatatgagaatccatttgttcaacaacttctttcccaaccatactcgacgtcttagccagctacaaccaaaacaaaaacagagagatatgacaaggaagagcaagtataatatacacaaatacaagggagtaaatgttatattattttata

SEQ ID NO: 237767 - DNA, 834 bp, Cannabis indica
cattgaagaaatgctcattgcttttcactttccttggaatttcattgatctcatcatggtgtgtatcaaagctccgagattttgcttactgcttaatggtaaaacgcacgaattctttgagtccaagaagggattgagacaagattaactgatgtctcctctcttattttttctaggcatagaatatatgtctacaataatgagaaaagtgggttattggaaaggttttaaataccatgacagaagtgatacttgaaagttgaatcatatgtgctttgcagatgacctactattattttgtcatggtgacttcatttcaattttattaatgttgaaaggtctgaaaatctttttcaacttctggtttactaccaaatgaagaaattttttagttaatttgcttcaatgatatgaaggagggtgaggttacccgactccttgaaatgtcaggatttacaagagctcaccttcctttcaggtatcttggcatcctaatatgttcacaaaaaatatcagttgttgaatgtaacggaatctttgagaaaaaattcggttggatcaaagtttagagctctaggaatttgtcatacatagagacaatcacattaattaattttattttgattaccattcactcttattgtgcctaaattatgattcttccaaaaaagttgttaaaggatgtagaagctatttccagggattttctttggaagggttcgaaacacaccaatggtactcttgggttagtggcttggcaaaatattgtttgccaaagaaagttggggtttgcgctttaggaaggttcttggttggaacatgactgcaatgaga

SEQ ID NO: 237768 - DNA, 1101 bp, Cannabis indica
tatgatcctatcttttaattgactatagacataggtttaaatttcagtgatgtagcatttatatcttacctcactagtcttgatcttcttgatcctagctagctaatttccaaaattctattaaaaaattcggaattgaaagctaccctataattggatttagatgtaatactacttgtacttgattacttaaattgacatatttgcttggacatgtaattatacagaaccatttttgaagataatttaagtgatctcaattatattcttcaatttttatagtttcctaaaataattaagtttaatcacgtacattttactaattattaaaacttttattttaaatattcacatctcataaatatgagcattgttattgggtatcagtagtgcttaataccatcaaaatcagtcgtcttgcgattggctagcgatactccctagaagttatttcattaaactatatgagatctgatacttaactagactaatagtgatattaacacgtaagaatatattaggtagtaccactgatactttttaacatttctctataaatatatatcaagttattactaattaatttgttaaacaaaataattctatatgtaattattatcttatatctaaacacattttatatttaaaatgtaattactaaactttgtaattagtactagcagctacacaatttaattaataattatacaacaacctccaaacacacaaagaaaatgaatttgccaacttttaaagggatttttacaaaaatactgaattttagtcaaaagtttacaatttaactgtcgtacagaattttttataaaagtactgtctttttataaaacaaatgtaaaaaagtggaaatttaatatattatatatacagtataaaatttacacaatatttttggaaaaaaattctgtcgcacaataaaaaaaatacaaaaataaaaatttcaatatatgatgtaaaagtctaacttttaattagctaaaaaataacaagaagaaagcatcatattggaccgaaaacttaaaagcatgtttggtattgttttctgttttttgttttaaaaaattatttttaaaaatgagaaca

SEQ ID NO: 237769 - DNA, 979 bp, Cannabis indica
ttttaatagtaaaagaaacaaaatctaaatagaagggacataattatgtaactattatattttaaggaaaaattttaataagtaatatattttaagggacaagatcaggtaatgtcgaaagtttaaggacaaaaatactaattattctttaataaaatatgatggatagaaagtacacaagagttgatgaaaaaaaagttggtgaaatgtaatagtttttcttaatctaagggtacttttctttgttttcttttatacaattggaaatactattgtattacatataaatatatgaatgctatttcttactttatttgttcatgtcatgaacgtacatgattaactctatatatgatatgtaaattcaacttaattaattgtcacatatcttttatgaatgactctactacatctataattaattaatatagattatgaaactaattaattttataattatgagaaaccctagatcatgtaccacttataagttgaatcaagtatatggaaaaacattgtgaatttgtatcataaacaaaatcaatacatgttgttggatacatgtcaattttgaaggtcgaactactataatttgatttgactattaattaaaaggtaagaaattttcattaacatagtcaatcatacaatttttacaatagtgtcctataccaatcctcaatatattaatttattttagacaataaatttaaagggtacgtactcatttaggtggcatttagttggaagtaatgaaacagaatggaatggaaaggaaataattttcattctattcttttatttggttgcatctaaaacacttagaataccattccgatggaatgatctttccattattttagtagaatgactattctattttgaaattgaaagaaaaaccattcgaatgcaagatttgaaaaaatttaataatttttttattattttttatgcattttaaattttattctattccatt

SEQ ID NO: 237770 - DNA, 4210 bp, Cannabis indica
ctgtttatatcaatattcaaggatagtctgtaggctgactttatagagaaatcaccattcgactctggcaaccagagccaggaatctttctactggttgtttggaagcgagatgctaaggattcttctggagtcatcttcattaaaccactatctaactaaggtatgatcccattcattgttttggatgaagttacttaccatgctaattccgcttgtggcgtcaattcggggaattggttggaggcgccccccgggcacccagggatcgaaccagatggatgtgcttctaccatctcctatcctcctatagaggcctttcatgagttaagatcgctccctgagaatggccttccacatcactgaatccgggcttttgatttccaagtccaaaaagctttggttttgtatgtatttgtccttcattagttgcccccaaaggctgttctcatccatcagaattttccaagcccatttcagaagaaacgccttattagtagcgagggtggatcgaaatccaagacccccagtcaccttaggtgtgcaaagttttgcccaagacacagtgtgaagtgttcgcttatcatctgtatctccccaccagaagtccctaaggactctatcaattttgtttgtcgtcgacactgggataacgtctgaggaagtcacatagtttgatagcgttgatcccacagatttcattaagcatgtcttgccagcgctagaaaggagcctagccttccatccttgaacacgcttgagtactctctccactaagtgattcgtatcctcagtttttttgatcgatcggaataggggtagaccgagatacgttgctttgttgttcattcttttcattcccaacagctgggaaatagcttgagcttttcttggggtgacaccctttgaaaagaaaattgaagacttcagtccgttaactgcctggcccgaccaattacaatatgtgtttaggtaatcaaggaatgatcttgcttctttgaaggaagcttgcccgaaaagaataatgtcgtcgcgaacatgagatgagtgatggacgaacctcttctcgatagcttaaacccttttaggagaccagccttccctttagagagcagcaatcttgataaagtttcagctgcaagtatgaatagggaaggggagagcgggtctccttgtctcaaaccttgctcgggtgaaaatttccccacgaagaatccattgagcagaactttaattgctgagaccgaaatgcaagtcttaatccattcaatgaacgtgtttggcaagcccatcagaccgagtgcgttaatgacaaactcctaacccattctatcataagccttctccaagtcgattttgatgagcatgtatcccccttttcctttcctcttcttcatagagtgaacaatttcccgagcaatcatagtgttctcagcaatgtgtcggcctttgacaaaggccgcttgattgggtgagataatcctttggagaaacggacgcaatcgggtggcaataatctttgatattaccttgtaagttgtattgcacaaagcgattgggcgataatccgtaacaagagagggggagtccttctttgggatgaggacgatggaagtatcattgatgtagcttggaaattccttatggttaaagaaatgggtgatcacttggaaaagatcagattgtaccgtggtccaatggtgattgtagaagctcggtgggaatccgtctgcacccggggctttatctttccccatttctgagactgcctcttccatctcagttacgaaagggatagagcatagtatattcccctcctctctagtgattactctttggaataggtccgtaggaattgaggcaggaccatttcttgggttcctaaagctttctctaaacttttcgaggaagcaattggctatttgctcttggtctctaatccaatctccatctgggagtctttgatgcattggatatagttcctccaacgacgaactatggttgaggacataaagaatttagagcacatgtgcccctcttgtaaccattgcacccttgaattttgtttccaatgtatttcttccctaagaagggcttcgttaagctgcatttttgcttgttctatcgcatttccattaatcgggtcttccatttcaatctttttcaaaaaatcatttgcagcttcgacttgtttcttaacttccttgaattggagtttgttccatgtcttgagcttgtgacgggtagcttttagtttcctgttaaagctgaccattgggttgtggtggcattgactagcccaagcttctttaaccacccagacacatcttgggtctcttacccacatattctcgtacttgaaggaacgttttctacaatttgcaccagctgtggtatcaagtagtagaggtctgtggtcagatccagtggctgaaaggtgatttatgattgcgttggggaagagaatgcgccaatccggcgaagccagcccatgatcaagccttgcccttttcactgctcctcccatttggctaccattaccgcctttaatccaagtgaaaccaggacccaaatagccaagatcaatcaatacaactctttgaaccattcgacggaaatcgaatgcatatctagacggattgcttcgtctaacatagttgaagcattctgaatccttcaatgtcccattcatatccccacaaattaagattggtgtacccgcattcatggctagttcccccgtttgagtccagaattgctctttttcacttccgtgcggcggaccatatgtaccagaaagtttccagaggcagccaggaggatccgaagagatttcaccaatgattaagaaacggcttgcgaactgtatattacaattgactcctttcatccaacacattccaaggccccccgcacttcaaataggagggacatagtgtgatccttcaaacttcaacttgttgcaaattctcgagaacttggtgcttagtaaccgaacttcagacagaatgatcacttcggggttatgttgatggacgagcaccgccaattggcaaactgtcgtggaattcccaaggccacgacagttccaggatagtattttcatggcgatggtggaggcttttctgggcaagtctccatagccccgaaacgaaaatcctcctgtctgttatcttgtttgccttgattagtcgcaatgtctgggatttcagtgatgatacaactcgtactaggtcgtgcattcttctcaattactacaaagtggttatctagattcacagttagatcaaaggaactaccttcccagtggctaaaaattgttgatcgtcttcccgcccttggcttagagtgttgctttcctttgaacgattttggcgttgctgcaagcttcacttggttcttcggtggtctgcctcttctctatggggtattggattcctctatgcctgccggagttttttgatccacctttgattgaaggtaatcagtaagtaaccatttttaaagtcttgaaatgaacgaaaatagttgatagacagaacgtgaatttttacttttgagacaaaaatactttgagaaatgtctgtaaaaacatgatgggaaaaatgatatcaaatatgggttctaaaacttaccacttgcataacatcaaatcaaatattgacaaaaaattttatagactctcctattaattattaaaatactaatataaaccataaagttttttaaaattatacccaacatttgttattttttttatataaaattacactaaatataacatttatttaataactaaaattttattattgaattaaagtttaagtataaaaataccaaagtttttattaaagtgcttaaagagtcaacatttattgtggcattggtgctaatttttggcactaatactaaatattttttaaaaaaattaaaataattaaatttttatgtacttataatagtgtggaattgtggtggcaacatctaggattatgatgcaaaaaatacataaaaaaaaataaaatattatattttagaatgatgtgaggataattgacacaagattacatgctattaatctttgagtataataataattcacatttctttttgtatttaccggtgccattttagatattgttcccattataatatctaataattgaccttatgtacatgtattgtaatttgtacgtaagtatatgatgtat

SEQ ID NO: 237771 - DNA, 2892 bp, Cannabis indica
ataactgctacagagaaaaataaagggaagaagccggaccctttcctgaatatttgctataattataatgtagaaactattgctatatcattaataattaatagatattaaataaaactagaaaaacatggtaagattgagagtcgactaaatttaacaagatatcgatgtcttgggaatacttcttaaatgtgtaattatgaagaaaaaaaatgttagtttacccattttactagtaagaaaagaatgaatgaaaagaaaagtgggaataagaacaaaatgaaatgaaatttaatatctataaatattttttttgtttatattattatactagaatggtcttttttttttacttatagatgtaacagtagttctttcacacgattagtgtaaaatcgtttcattgaaattacattttaatattttaaagtataatctaacaaaataatcattatgagaatttattcatttcttttccattgtatttcactacccccaatcaaacaagcaattcctccttcaaaatatgttgaaatccaacgacaattacatattccaacataaactagtctcaaacttcaatagcattattaaggagaactactaatcataatagaaataaaatttcataagtggatttacatactccagtccactacttactcaactctcctactttcatataagctcttccaaaatcctaactagcaatgatctagttgaattagaaaccatcgaactcaaagtcacatactcaacagaaaaacaataataaaaacacaataagaaacctctcattcaaagattttggtatctgtcttaaaagtaccaagtcaaagcaaagtttcaattttgacacaattatttaatcccaaaatgtgatatgagaggacaaaagtcttgagttccaatcaaactcaatatggattggtaatacttatttattttatgaagtaataaatgaaaaagtcttattataagattaagcttctccttgtcattgatatcattcctcatcctcttgaggaggttcatagttcaagtccagcaaagcagctcttttggaattactactctctgttcacaacaaccaacaagatatatgattagcttatatatatacatataaatacagagagagaaagagggaccttgaagatgtgaagtatttggcaaaaggggtttgtgtagtctgatagcatagggaaacatgagcatgttagagagtacaatatgtttctccaaggacttgtcaatcttttttgaataatagaaattgttgatccacatcttttccactcctgaagaagatggtatcactacattttccacttccaaatcacacagagtctgcaaaacaaaatatcatagattcatcacacaattaatattatcaataaatttgcacaaacacaaatgtttctcatctctattaaagccacatcagattggtgacttattctcttgatgtataatactcttcatatataaaagtacatatttcaacagtgataatactattctatacttctctcataaagagaaaaaaaattcaaatttttgtatggaaaagaattgtacataagattataagttagagcttacagattcaattgcaaccattagcttccgcatcattcctctgcccctgtagtccttagcagttgttacaaagggtatttccgccattttctttccatgtattctgtccaatttttcaaagaatactcaacaaattagctctatttttttctttattattattatacataaaatatatgagaccttaactctaatatatatattattaaataatacctgatagatgcgactacgattatattatcgtccttttctaagatagctgtataaaaatttctgaagttgattctgctcaaatttgatctgttctttcatatatatacgttaattgactaacacaactacataattttattttgcagatacaatgtataaatatttccaaatcgaacaggttataacttagaaacgattagaaatctatataactataattataaagaaaatgttatagctagggtactaaaaaaaaattaataattacactccattcttcttaataatataattaaaataattatttctaaatacataataatataatctaattgaacaactacaataaactgagggataagtttatgatccacttttatatgttccagaatctataacagaatttttatccaatttttttttttagttgtgtatatttgtagttaacgaaagattggcaaaagtgagaatattgttaggtctggtgttatgacttggtgagcttgtctcgttgattttgtttgatattgttaaggttttttttgtctggttttgacggtgatcgtgagggctggttgaggtgcggttctgatggcatcaaattttggtactgaggatcttgactggagtttgtcgatcatcccactcgaggaggaggaggagccagcggttcaatacgatcggcctttggttgatgatacagaggtcgatacgcggtggagtatagtaggttgatttcttacggacaacccgatcgacttcatggagatgcaaaacttgatggcggtgctttggaagccaggtatgggtatgtatgtgaaagatttgggtggaaatagatttatttttcaattctatcatgagatagatattcaaagggtcattgatcggagtccattgacgttcaaaaacgctccattaatctttgagaggttgaaaaccggggatgttccaagggctttgcggttgcatcatctcgaaatatggattcaattgcatgatattcgggcaggttttcagacggaaggggtggttttagatgctgtgaattatatcggaagctttgttaaaacc

SEQ ID NO: 237772 - DNA, 899 bp, Cannabis indica
aggaacaaaaatagtatttcgatctacaagatatggaggaatagaaggacacaaaaatctatacataatggaaaatgcagaatgtggtgagtttggaggaacaacaagaaggctaacaacagggaattggactgatacacattgcagttggtcaccaaataatgattggatagtgttctcttcatctagacacaagtcaccatatgcaccaaaaactgacaatggtcttgacccaggattttttgctgtgtttctagtaaatgcaaataatccttgtgttgtggtaagagtatttggaagtgggtataatcttcaaggccatgtaaatcatccattttttagtcctgatggtaggagcattgttgtgacttctgatcttgctgctgtctctgctgatccagtctctatgcctattcttccccactctgttagaccttatggagatatatttactgtggatattgacccatatgatattaacaataattggaatgtgccatatttcagacgtcttacacatagtaggtatgagaatactagtgctagttggacaaagttctcaaccaaagatccacatgcagtatggaatagtcaattggaatctaacaaagatcatcactatatgctcaaatgcccttatgcacatcctaaaacgggttgatagtactttctttagtacttaaattattacatttatagtacttacatttgtatttaacttattcttttagtggccaaagtacaaaagttattacaaatttaggtatttaaattactttttattttgcagcaaaaatactaagattattatgcttgtaaaacttaatgcccaaattaactttttggtatttaagtttgttgacgtaataattttaatatttttacggctaaaaaaataa

SEQ ID NO: 237773 - DNA, 1516 bp, Cannabis indica
ctgggtctaggttcgggtttggggcacaggttccccatctaggtctcgatcctaggtctcggtgtaggtccaagtttaggttcgggtttggatcccgagtttgggtctgagtctaggtcccagtacgggttcaggtttgagtttgggtccgggttgcggtctcagtccaggtccctattcgggtccggttcggggtcccgaaccgagtcccagtcaaggtctatgtctcgaaccaggttctggtctacgtttggatccgggttcaagtcatgagtctaggtctaggttcgggtctagattcaggtttgggtctgggtcctgggttccaatctcggtatgggtatgggtaaaggcccatgtccaggttagggttttcggtttatggttttgggtttagtatttagggtttagggcttagggtttagggttaagtgaacagagtttaggatttagggtttaaggtttagggtttatggtttaagggtcttcttctagttccagttcacatttttgggtcatagagtaagatttaaggttcaggtgtgggtctaggtccaagtcccggtttgagtctaggttcgtgttttggtttaggtccaagtcttggtcccaaatccagacaccaaccacatgtcgagtctagtttgagttctggtacgggttccagttctggtccgggtctaggtaagggtccaagtccaattcctagatttagacaccgactgtgggtcgggtccaagtccaattcctagatttagacaccgactgtgggtcaggtccaagcctcgggtcttggatcctgggtctcgggtctaaatcaagatcttagtccagttctagctcatgtcttgtgtcctggttcaggtctcaagtcaaggtttgggtctaggtttgggtcttgggtcctcaatcgttggtccatattcccgattcaggttagggtcctaggtcccggtctgggttaggttcccagtccgagtgcaggtccggtccatgttccgtactagtccttgtctcgggtcttgaccttgtcggggtataggtcacggtttggttctcaggtcctggtcctgatcctgatcccgggtcctagtccgagtacttgtcccagtttagattcaggactcggtgctagtctaggtctgcgtcccagtcctgatctgatccaggtccgagtcttgggtttgagtctcagatatgttacgagttcgcgtccaggtctgggtttgggttttggtcttggtctaggtttcagtctgtgtttgggtttgggtcttcgtcttgttctgggtatgggtctgggttctgatatgggtctaggttctggtaaaggtcctaaatcaccggtcctaggtcgcaggtcctagcgcaagtctgggttcaggttcgggtctgggtcttggaaatggttccaggttcgggtcttcgtacgattccaagatctagacaccgactacgagtttggttgaagcgttgggtcgtgggtcaatatccgaatcctgggtccctgcccatg

SEQ ID NO: 237774 - DNA, 1361 bp, Cannabis indica
aaaagttatcaattggacctactgttttgttaaatgaaaaaatagatcctatatttttaaaataggaaaaataggaccctgagcttaattttttaacaatttttttttttaattataatcaactttaagataatttactaacataaacagatacataaaatgtaactagttttgtcacaacatttataggtcatattattattaagttttattttgataaaaaatcagttcagagtcctatttgtataattttaaaaaatacagagtcaattttatcatttaacaaaatagagggtccaattaataacttttacaaaatacagggtccaaaatagtatttaccctataatttaatagaataattagtatttttttcccttaactttttacactactaagttgtgcctcctaaattatacagcttgttaataatttaatagaatattttacttggagtattatttgattattgggctcgtttaaaacgttgtattaggtcgtattgtattgtattatattgaattgaattatatatcatatatttttttttgaagtaatatatcatatttttatataatattatgttaaactttaatttatactaaaatattatatatttaggtacccataaaagttaaaccacatatagttttatataaaaatattgcataaaatacaattcaatacaatacggtgtaatactgcgtaccaaacaaactcataatatataattttaacccacctctattttttatttcttatatatgatttcttttccttctttattttttttattcttttatggtttttattttgttttttctctataattttcgttgtttctttttttttttcttggttttagtttctgattcgatttgttatttttgtttcatattgtatgcttaaattaattttggtttttgagcaaacaaataaaaaattaaccaaaatagagaataaagttaaaagtgtggttattaaatattgatataaaatttatatgttcaaaaatcgtgatagtataaggttgagagagagaacctaaactagagagaaaaatattttcttgtaatctctaatagtttgtgaagattcttgtaaccttgtaaacactaatatcaataaagatatgactattgttgtttcaatcgagatgtagagcattgtacatagttcgaacttgttaaacttggtgttattatttatttatttttactccttaattcattacttgaaatttgagatctcttgatttattattttttaattgtgttgcttgtttcttcaatatactgaatcataagtcattgattgtttccatttcgcacaatctacataccaaaaaaagaaaggataca

SEQ ID NO: 237775 - DNA, 627 bp, Cannabis indica
ttcaaacttggttctgtgagaatgctgctcttgtcaaactccacctccatttgtgtgctctcatttgtttcagtatggccatcttcttgttgagtttgcataattctaagtgtatctttgtagaccttgttctcttcaaatataacatctctactgataaaattcttttgatgatttcaaggttctatactctacattttgtatcctttgacatcttcaggatagccaataaagatacactttttagctctagtttctagcttgtcttgcctaacatgagcataagtcatgcacccaaaaactcttagatgatcatatctggcattcttccctgttctagcttctattggtgttttgaaaccaatagttgatggtggactccagtcgatgagataacatgcagtggtgacagcttctacccataaattcttgggtaaatcagagtgaatcaacatgcatctcaccctttccataatgatcatattcattctttcagctaggtcattttgttggggtgtccttggtattgttttgtgcctagcaacatcaacttgtttgcaatgttgattatacatatccacacaaaattgaagtctattatcagttctaagctttttgattttctta

SEQ ID NO: 237776 - DNA, 695 bp, Cannabis indica
ggctaatcgctccatattggccttcgtaatagatcgagtaggtagctgaaggactcgcccatttaaaggaaatttcgttagaaccgcattccaatcctgtgggattccaacaaatctttccacaattagaaggccattgttgaggaactaagggttcttggataaaattctgttcaaatcttgagaggatttgaaagagaataccaagaatatagaatctttggtggtaagtttgatttccactccccaatctttttcagagatgccccaaactcttcctaaaattgttttaagaagagggcgattcatggggcggttagagcagaggcgtcccatagcacacagtaaggccacatctgaacctccattgggattaatctcccacccatcctcgtctagcaccgtgagattcgaagtacgagcaaggagatcttccatggtagagtccggcatttctggcatagcttcaagaaggctcttctcgagagagagcatgaggatgttaatatttttattattattatatatgatgtgatttcagtgacatatataatatataaattgcaacatatatacatagaaaaaaaaatcaaaattatgaatttataataatagtgttataatttttcttttactttttttcatcacccgccacttgtatgtatactaatttataatgttttggaatattgtat

SEQ ID NO: 237777 - DNA, 672 bp, Cannabis indica
aagtctctctgtaatggtacctttaaggtacctgaatagtcgtttacatgcctcccaatgtgttgttgttggagcatggataaaacgacttaacttgtttacaataaatgctacatcaggcctagttaaagtcaaatactgtaaggctcctagtgtgctcctgtagagagtttgatccataaagggttctccttctgtaacagatagtttgtgtgtggaggatgtgggtttgggataaggcttagcaccctccatatgtaatcgaaccaatagatctaagatgtatttggtttgagatagatatattctagtgtcatttcgaacaatttcaaccctaagaaattagtgtagagaaccaaggtcattaaaagaaaagacttgattcaattcagaaatgagagtgttgataaccatcttgttgggccctgttactatgatgtcatccctaaccaaggatcctagctaaaattttgtcaagcatgcatattccacatagtttaaaagccgttagattctgtgaagcatgtaaaataggaaaaagtcacaaattgccttactctctgtccaattcaagagcatctcaaccgcttgagttgctccacacagacctttggggtccttcacaaatttgctccctcgaaggtcacaagtattacatcatctttatagatg

SEQ ID NO: 237778 - DNA, 2181 bp, Cannabis indica
catgcaaagtcaccttttgaagttgtcataggaagaaacccgattatagcttgctgaaaacctttggggcagcatgctttccatgcttgaggccatatcaaacgcacaagtttcagtttcactctctcaaatgtgtgaaccttgggtatagtgagtccttcaaaggctacaaatgtctaagttctacaggtagagtttatatatctagacatgtgttttcaatgaacaagagtttccatttaagcatggttttcttaacaactatgctcctgaaaactctgtcatcatacacaattcagcctggtctcagctccccaatatgcattttcctgttaacaatctgcctcaggtccctgtcattgaaagaacaacacaaagacaagaaatcccaacagcagcaccttcactgtcggccatgtctacaccagacaaaagtcaggtaaatcgctccactcactcatctttgaacactgaccactttcatgttgtaccagaaatacatacaccaggtgaacaaacagcctcctcacatacggctaacctccctgttactgaaaccaactctgctgccagctccaataaatccgattgtcaagctgaacctcagcctacacaccctatgataacccgttccaagagtggaattttcaagcctaaagtctatttcagtaaaactaagtgggatccagaaagagaagaacctagaagtgttgctgaagctctaagtcatcccggttggaatggagctatgaataatgaagttgttgctctcaaggctaagaaaacctacactctggttccttattccgatgagtacaatgttgtaggttgcaagtgggtgtacaaaataaaaagaaatgccgatggttccactcaaagattcaaagcacggcttgttgcaaaagggtatcaccaaagaccgggactcgattttagtgaaactttcagcccagttgtcaaagcctcaacgatccgaattgtcctcactattgctgtctcctataattgggaaattcgtcagttggacatcaacaacgccttcttgaatgggaacctcgaagaagatgtctacatgcatcaaccagagggattcgaggatcctacaaaaccaaatcatgtgtgcaagctacacaaatcactctacggtctaaaacaagcgcctagagcttggtttgataagttgaagaacacattagtggaatggaacttcaagaactccagggctgatacttcactatttcattacaagcatggtaaagtgactatcctagttctcatctacgttgatgatattgtggttacagggaatgacagctcaaaacttcaaggctttatccagcaacttacaagcttttgcactcaaagatttgggtcatcttcattattttctcggcattgaagtgattcgagatgcgacaggattatatcttgttcaaagaaaatacattgaggagctcttgaagaaaaataacatggaaaatctcaagccgtgccccacaccaattgcaacagggaaaaacatgtccattaatgatggggaaaaactcgaaaaccccacggtttatcgcagcttaattggaggcctacaatatttgtgcaacaccagacccgatatttgttttgctgtcaacaagttaagccaatatctcaaagcaccaacaacagttcactggggtgcagcaaaaagaatcttgagatatctcaagggtacgattgatcatggtcttcacatcagctgcagtgacaagttaaacattgctggtttttcagacgtcgactgggcgtgttgcgttgatgacagaaggtcagttggcggttattgtgtatatcttggagacacccttgtctcgtggtcgtctaagaagcaggctgttgtctcaagatccagtacggagtcggaatatagagctttagctcttgttacagccgagatcacttggatcgagtctctactaaatgaattgagctttccactgcctggaacttctataacctggtgtgacaacttgagtgcaagcgctcttgcttctaatccagtgtatcatgctcggaccaaacacatcgaacttgacattcattttgtccgagacaaaatcttgaagaaagaacttgaagtgaggtacattccatcctcggatcagatcgctgattgcctaaccaaggccctgttgggttttatgc

SEQ ID NO: 237779 - DNA, 1409 bp, Cannabis indica
tcatattttatcatcttcttctttaatttagcaaaggctttatagatttatgatttagggttttctatattaaagcacttttaggaatatgtttggatctgtgatttatatatttcttaagtgttttataaaccctaacaatatatacgctatatatatgtatatgatttagctataaatataaaatactggtcagctttttatattctaaaactaccatgtgtttgtgtttgtcgtagcgcagtaattaataacattattcctatatgtagttgagtaaatattattttgaactcttattttgtaaaagttattaatttaattttttattttgttaaatcatgacaaaatagacgatcctgtatattttaaaatagtacaaattcatgaaatgattttttgtcaaaataaaatttaataataatctaatctaaaagtattatgacaaaactgtttatattttttgtgttaggaattgtcttcaagttggttatattaaaaataattgtcaaaaattaagctcaaggtcctatttttaccattttgaataatatagggtctattttgtcatttaacaaaatagagggtctaatcggtaacttttacaaaacttagggtccaaaatagtcactacaaaaaatccttcttttagtcacaaaaaaatttgtgactaaatgtgaaaaaattgtgactaattatgaattgttattcctatgttgtgactatataaaagatctgtggctaaaggtattagtcacaaaaattacaatttgttgtgactaaatgtatttttagtcacaatatttgttgtgactaaaactaaattagtgagaacttgtaactaaatactatattttaattgcaagtaacattttattgtgactaaaagtcgcatttagtcacaaaaaaattatattgtcactaaaagtagcagttttttgtagtgagtatttaccttatataattttcatcaaatttattgtttagagggaaaataccattttggaccttgtgtttcgcaaatgttaaattagaccatctgttttgttaaatgacaaaataaaccctatattttccaaaatagtacaaataggaccgtgaattaattttttgtcaaaataaaatttaataataatccgatctaaaaatcttatgaaaaaactgtttatattttttgtatctgttcgtgttaggaattgtcttcaagttggttatatataaaagaaaaagttgtcaaaaattaagcttaaggtctttttttatcatttttgaaaatatagggtcaattttgtcatttaacaaaacagagggtccaatcggtaacttttacaaaacacaaagtccaaaatggtatttacccttgtttagatgcatatttcgatatgcattctatataaaatgtggttatg

SEQ ID NO: 237780 - DNA, 732 bp, Cannabis indica
tatatacatatctatatatatgatttattatattaatatgagaccttatattgaattagatgaataaggatttgttacatatttgtggcattagttacgtatgttgtcctttaatatttcttattttttttataattcaataaagggatcacgtagtatagatcatttctccacttcttcagtcattttgacaatctcagagattatgtatcagttataagagttttatacctcaatctatcttaattgaatcattattaatcaccttaaagatttccatgacacagataacaccaactacagcagctacccttcagagagttaagcctttttaatcccttcaacaaggcatgtggtagatttcgaacccttaacctaaacaagaaagatatcagtatagacaatccctactactaaaccacacacattgacatttctcattttatataatggagagtcaactttgcacggctagcacacttagtaagccttgatcgattatcaatcaatgcatttttttcatgttaaacattgtcaaatatgcatttttccatttattaagatatttccacataaaagatttttaaattcacatcaaacaactgttagttcgtttggtatgttgtattataccgtatagcattacatcaaattgtatttcatgcaatatatttatttaaaattatatgtgttattaacttttacaggtacctaaaaatataatattttagt

SEQ ID NO: 237781 - DNA, 850 bp, Cannabis indica
ctgtggcccaatcagaccatacacccgatgggggtccgatatgttgctagtccaatgcagttttgatgcaagtccgatgtaggtctgatgccattttgggatcaacttatatcttgtgtggcccaattaaaccctatatcagttcctcatcggaccctatcaagccatctataaaaggtttttaaaattaagtaatttggccataacaaactattgagctatatatggggcttacattggacgagtatcagaccattcaaaaatatttttgcaaaattgagcaaataggctgtcataccatatatcggaccccatcggccatctatcgggccatccataaaaggttttaccaaaattgagtaatttggccataataaattatcggatcatatatggggccaacatcgaatgagtatcgggctattcaatttttttaaaaaaaattgagtaatttgagtgattaatatatatattttttttaaatgaaagctaataatttacgatataatttgaatgtgatcccaaaaaataactgactgttattgataacatattgttcaacaaaaaaaccctaaagtaaagattctttaagaaatataattaaaaaaacatataaagttcatgataagttatggaagattaaacttacattacatctttatctaaaaagcggcatatggtcatcatcttctccaaaaaaatggtagatctaatatcttatgctctatatgctctatgacatatattttgcaatcgaaactgcatcaatagttaaacaaaacaatttagtaaatcatagagaacattaataaaaaatttaatttaattagaaaacacattttaaaaaaaa

SEQ ID NO: 237782 - DNA, 3742 bp, Cannabis indica
atgatgatgaaatgtttaataaggcattttgatcatttaggtgacatttggttgaagatattgaaatgaaatagaatggaaataaagtaatttttattttattattttatttggttggttttttttttttttttaaatttcaatagaataatttttttattattttgattgaatgacttttccatatattttttaaaatggaagaaaagactatttcaatgtaagacttaaattttttatcaatttcttttatgcattttaaatttatttattttttatttctatttctattcgcattctcatttccgcccatttctatgtctttattccttcgaactaaacgttagttgataaatgtaagtgtatttcctacaaattctcattgaattaatatgatagtttgtttctaatatttattttggttattgtatgctttctttaaaaaaaaaaagaaaaagaataataatttatgattgaattaaaaacaaaaaataaaatacaaggagtaaataataatagaattaataaacactcatatttacaccctataattatataagtacgtaccttttattaaaacatattaaattaaaataattttaaatttactcttaatttttttgtatgaattttaagcattttattttttataatttttttaaaaaataataaataattatttttccttgcaaattttacatattttttttgtgaactatacttttttttaaaaaaattaatagaaattagggtaagtataagttttaaacaaaaatatattttatattaatttttaaataaattattaaaattgagtgccttaatcacattttgggtgcaagtataataccccttaataaattaacttataagcaataaatatattgttagtttgtattaagaacttgataaaaaatttataaaaaaaaaaaaacatcttgataaaaacgttgtcttgtattgatattgtttaaatgggatagcttgtgacgttacattctaatctgtctgatcaaatactctttcgtgctttcaaaacaaaaaagctgttttggtataataataagcatttaaaccgtgtcttaattcatccctattattcaacaacaacttattataaaatacatcatcaaggttattaatgtaggaagaaaatgtgaccatattttatattttccagaaagaaaagcttcatacccctaaatatttgccactagctccctaaaaaagaaaataaataaaaactggcccatttcaattgagatgaaacttgtcctttaaacaatgaagcaaagcaactccttcctgtgaatatccacgtcgaccgaattgatcataaccacatatttttcaatattttcgggattaaattaaaaaatttgtacaaagttatgaggaatttataataacgaaaaactttggaccctcactttaaaaaagaaaagaaaactttggaccccctcgcatacgtgtaataataataataactaattagacttccggcttaggatttaaatgttaaaatttagaatgtagggacttatatgtaaaatgtgtttgatgaggatgttgctgcaaactacccaatgtgtatatatatagctaaagacgcccacaatgtcttcttaccttgatcaagcaaaccaaaacctttgttcttcctttgctcatttccgatctctttcggctctccaggtggagagagagagaagagagagaaacacatagagttggagaaaacctcgggagcagccaccctttacctcaaatactctatatctttctcatctctttgttctcttctctctccttgttctttcaagctctctctgtcattttaagcacaagcaatctacatctctgtcaccatgatgtctctcagcagaaccagttttttggtaatgtataccaaacccatttctcagatcatcatttcaaggaaaaaaaaaagcattcttttcttttgtatatttactctttggggtcaatttctttctctcattttccactttgtaaccatcgaaattccccaaaagtcgaaaactttggttaaaattcgaagtgggtgaacgagatttccatctgcagatcttctcttccacaatctctcaattttctttatttattgatttatttttttttttttttggtgttaagcagaacaacttaggggtttcggagctgtacaacccggtttcctcaaagcagaaaagatatgcagcttctctgaaagtggttgcctcgaccagccgaacgggtgatcgaaacggcaccgttgtgatggaaagcgtagtgaaggaaacgagggaagccttgactgcagttgaggaggagcctaaatcagccgtcggcggtggggtccaagacgtgtacggtgaagattccgccaccgaggatcaatttgtcactccatggaacgtctccgttgctaggtgtgaccaactgtcatagatgctattcttttcttactattattttttcatcaataaacaaattagtatcggtgttcttacattttcccttctactactgctaaagattaatttccattattaaattcacctccttttgcccctttctaaaaagccttccatttataatttagataaaatagttcaatcatcatatgatatataattggtaaagcgtagtgggttaattcttttgattttcattataatagaaacgttattaaatataatataataactaaaattacataaaattgaaagttacactttgaagagagtgaccttttgtttttgttttatatcggttctttcaatttgtctcattaaatttgcatgatattttttgttttctcttatatgttttacctaaatacttcgtgattgtggccgagaagtgtttggttcttcatgatgtttacacttttcaattcgattctatctatggtgcatatatccttggatatcaaaagttgatgtttttgttgtttttagatggagtatgaatatgatattctatagcaatacaacccagaattttgtttgtttgtcaagttttggttttttcttattaaattaattttttttttcttccattttggtttgcagtggatatactttgctgcgggatccacatcacaacaaagggcttgccttcaatgataaagagagagatgctcactacttacgtggtcttctccctccagcagttgtttcacaggatcttcaggttttttttttgttttactcatattttttattattattttttttattatatatgcatagaatattatgtaagcttaagcatactctactcaccaggtgaagaaaatgatgcacaacattcgtcaatatcaattgccactccacaagtacatggccatgatggatcttcaggtagctagctgtctgcgtattctgctttatttgagctcaaaattttgtttgtcactaatgttttttggccaaatggattttcttttcttaatacattttaggagaggaatcaaaagttgttttacaaactcttaattgcaaacgttgaggagttgctcccagttgtatatacgccaactgttggtgaagcttgtcagaaatacggaagcatttatatgcgtcctcagggtctttacattagtttgaacgaaaagtatgttcctccacagcctctttatagttcagtatcactgattaattgcaataaccttgttctgatagtatttctcgtttgtatggtgattaaggggaaggattcttgaggtattgagaaa

SEQ ID NO: 237783 - DNA, 991 bp, Cannabis indica
atattgtcttaataagtgtacaattttcattttccaaacaataacaagctaacccaaacccaacttctaagtgcaactccaatcagactttaaatttaaagttacagtagaactattaggccaacatagcattattttattattacatatataattttagttaagtgtcactgcatatgtacagtaatattgtaacaactgcatttttttttattgattttttatagttaatttgttgtatatattatattttattaatataataataaaatatatttttttgatataaattttattattgcggttgaaatagaaaaaattattgacattaaatttagtgatagtataaaacatgtataagttggagatgctgtaagtggactaaaagatgggctagacctgcatgacttacataggataggtagacctatatttgaatttcttgtaatagaattgtaataagtccttcacacagtactagtgtgaaactagacagctttgtctatgatatatatggtgggactgggttgggatcggtccacatatgcttatctctaattttgaaataacttcatatatatcttaggtaacccccacgtgtctagtacttctttttcttttatattacgtatatgtgcacgtgcacatttagtgtacctttctacatgtccacttgtacatataattgacacttgaaagtttatcacacaaagctcaaataatatcattaattgtatacacattaaaagcgacagaagtctaatattatctaagtctcaacttccatacttaataatatggccatcaaatcatccttagagcatctccaagcagctcatcaaatatagtgtcacactatcaccaaatttgatgttaaaaactatcttcactccaaccataataccaaaaattacactaaaaaaatattccttattattatattaattttttaataaaaaaaaaaagactaaaaagacacattgtaatttaa

SEQ ID NO: 237784 - DNA, 898 bp, Cannabis indica
ggacgctaccttatggcataaaaacttagcaaatattgtaaattgcttgatccacgtgtccttatctgattggtccacgtatattgggcaaaatcaggggcaatatatatatttaattttataaatgcacacaaattgctatctatcaaattaatgaatatatacatgtaaaatgtattcattcattcttgtaataagttatatgcagtgtaaacattactaataaaatctataaacattaaaaagtagtagggcagcccttgagattgggtggaccttagaaaaaaagaaaaataattgagcactttattaaaaaactatatgatatttttgaaaattagtaaaaaatgtagggtaaatatcattttagatcttgtattttgcaaaacttactaattgcactatctattttgttaaatgataaaatagaccctgtattttgtaagatagtaaaaataggaccctgagctcaatttttaacaattttattttttaataaaaccaatttgaagataatttataacacaaacagatacagaaaatataatcaattttaccaaaatatccaaaatatctctaagttggagtataattagattttattttaacaaaaaattaaaaaaaaaaaaaactaaagagtgtagtaatttttccttttcccatattttgtaagagagtaaattcctgaatatactctgggtcaagttgaaatgatgtgtttaaactttaaataacatagcaaaacctcagcctgtcttgtgtgatcatccaccctaaaattttggaccaaataagctgatttatctattaacaatacaataaaagtcagtattattataccaacttcctcccaaaagtactgccgagtacataaaacctggtaaatgaagatcttagg

SEQ ID NO: 237785 - DNA, 1118 bp, Cannabis indica
aaggctttgtaagattcggttaaccttgaataagacatatatttattaagagtatggggagaagagcttttgtcctgtatgtaagagtaacattcaaaatcgcgtaaataagtaggcggttttgttgttctgctggatctcctgggccctgcattttcattttctgcagcaggttgtgagctgatttctgtgctttgagaggcattggcaggtccttcaataacctgttcagcttcttagttaggagggctgtgatttcgatcacctgctgtactaggagggtagtcactaacgggagaattagtaacagatgatgagggaagaactaactcagaaaaaggatcaacattagtaatactttcattaattttgtgaaaaggaaaatattttcatggaaaactacatttcttgatatgaaaatttgtttagtgttaatatcataaagcataccctttaacgccttgaggataacctatgaaaacacaaggtctagcccgaggatcaaacttggttctgtgcacgggtagagtggaagcaaaaaccaggcagcctaatattctcatatgagtgtaatctggttcccttttgtatagcagttcatagggagttttgttctttaaatttggtgtaggagtacgatttattaggtaggctgcagtcatgacacactcggtccaaaatttgataggtaagtgagcttgaaaacacaagcacgggccacattaagtagatgttgatgttttctttcggctactgcattttgttcaggagtatctacacaagtaaaatcatgtaaaatgccatgtttggtaaataaatctttaaaaacaagttcgggagcattgtcggatctaaaacacttcatcatacatccaaattgagtttgaacatatgtgatgaattgaggtatgacagttaatgcatccgatttttgttttagaaggtatatccaagtaaaccttgaatggtcatcaacaagagtgagaaaatatctaaaaccagagtgagaaacaacatggtaaggtccccatatatcacaatgtatcaaatcaaagtattacaagaaaaattattgttgttaggaaaggtaatttcctttgcttagctaaaggacatat

SEQ ID NO: 237786 - DNA, 1103 bp, Cannabis indica
gtaaataaggcacaaaatttacttaataaagcatgtcgtttatctttcttaagacaccgagtttaccaaataaagtgtgtcatttacctttcttaatatacgaaatattcctaataagacatgtcgtttatcttatttaaagtagttgttgacctttctaataataaattatattttggtaaataatgaacaaaatttacctaataaagcgtgttactttggcacagagtttaccaagtaaggcgtgtcgttaacttttcataaggtatcaagtttatctaataagacgtgtcgtttactttatttagggtagttgtttaccttttgaataataaattaaattttagtaaataaggcacagaattaacctaataaagagcatccttcaccttatttagtgtaattgtttacctttataataataaattatatttaggtaaataagacagaatttacctaataaaatgtgtcgcttatcttttttaaggcacaaaatttaccaaataaggcatattatttatctttcttaagacacaaagtttaccaaataaagtgtgggaagtgttccaagatcttatataaagaaatgatcttgtttttccgtaaataatagctgaaagtgtaccactagctagagttgatcaaggaactgagctattacataagtaggtacctataaaatataaccacactctatagtattatagtttaatctttgtctctattcttttcataaagtgcacattgattaacaccatataagtttaatcttatacggagttaagatgtaatctcatttgaataaagtttggtctggtctggtcttgaattgttttgtttttttatcaaatttaaatattaaaggcagagagaaatacagagcttttgattacaataagacattgacttgtggaataaaaatgggtagttaaattgtgtagaattgcattaattaagataagattagttgaaaactctatttttgttgatgtaacaagcattcctcttaatctcctcttatcttgcatctcaagaatctacttaaagtcaaaactgtactggtcaatataactagatattatttctctttgctttttgctatg

SEQ ID NO: 237787 - DNA, 824 bp, Cannabis indica
gggtttcggttcgggtcccggtctgggtccaggtcccggtctttgtttaggtcccaagtcataggtctcgatctgggttcaattcccagtatgggttctagtttgagtttgggttttggtttggatcctgttactgtcccaggtctggtccgattcagattttgggtcccgtcctagattcaaacactgacaacgggtcaagtccaagcctcaggtcaagattcagatatcggtgtaggatctcgttcttgttccagttcggctctcgagtcttgggccgcgtcctaagtttggatttaggtccgagtttggggttgtttcccagtagtcaggtcctaggttcgaggtatagggtcgggtctcgtgtctcgagactgttgtcgagttttagctctcggtcccagttccagggctcagtttcgggtccaactccctcatctagctctggatcgtttgtacaagtctgggtccaggttcaagtctgaggcccaggtcccccatctaggttcggatccttggtctcgctctaggtccaaattcaaattcgggtttggatctcgagttttggtgcaagtctaggtccttgtacgagttcgggtttgagtctgggtccgggtgttggtcgaagtctaggtccctgttcgggtccgggtcggggtcccgatccggttcctagtcaaggtctaggtccaagaccaggttctggtctgggattgggtccgggttcaggtcctgagtttgggtctaggttcgggtctctattcgggtctgggtctggcttctcggttctgatctcggtatggttagggtttagggatttgggt

SEQ ID NO: 237788 - DNA, 994 bp, Cannabis indica
atttggggaaagatttttaatgaggattgtgttgttttggatggtgatctagataagaagactctggttgataatgatgatgcagtgagtgacttggacgagttgtgcatagttggagagaagggtccggtaacatttaatgtttaacttgattttcattaagggatttttattgagtgtcaacttattgaaattgttatttttgtttgaggataattttgggataatgaagacctgaatttgtttgaataaaaattgaacaattctactatggccaagccatgaattagtttatagactaggtttttatatgagatggttcaatttggatgaatttttatttgaaaagttaaattgtcccatggtgggattctgttaacttgattttcagtaagagatttttgttggggtgaacttattgaagttgttattttgggataattaagacccgtaattgtttgggaaactttgaatgaaaattgaataattctactatggccaagtcattgattcatttacagtctaagtttttatatatttatttatatattgtcatatgttattcttcggtttcgttgatgatattcaatgctattattacaagttttatctgaaaaattactttggattgtggggtaggattcaggtcttgattttgattttgatttggcccttgtattgtattctttcaaaatgatttggctttagaattgtgtgatattgacaagtaacattccttgggacagtagtggcattgatattgacaagtaaataaactatggatctgatcttgaacactgcttataaacaaaatgaacaaattagtgaataaatcccattaataaataaaagatgtctgttgtagttgctacacaagaaacttaatatgaatgctttaatacttagaattatatattatacagttcaaatagtgttttgaactgatttggtagtacttggacatggtatttcagtgacccaaattacatgatcc

SEQ ID NO: 237789 - DNA, 1193 bp, Cannabis indica
gcacccaagaagtgttgtttctttcttgaaagtacctatttccttatttattatgaagacaaagaagattcaaaagtcaaatcgttgatctgatacttggaaggtgggtagattgacaaattgtcaacctaggcactgggtgtctaggcaccgggtgctccaggtgctcaaaaataaacttgctctgaatttgattctgatacctcaaacatatttgtggtatgtctagttgatgtctcaatgtaaagtttggcccatttttactaagacggtccgaaaaactaaaccctagttgggaatgtcaacctgggtgctaggtgaaaccctgggtgcccaagtttgctttcggggtacaagttcgtgcaatttcagctcacagggcttggattaggtggctccatgtattcatggtacataatactaaaagatagtgaattagattcaagttattgaagtcttaacttctatcccagagctcttaaagttaacctaggcgcagggctaggtcctcctcccaggtcgactgctatgactcgggtctactcaactccatgatgtcatccttcgtgccacatgtcaaatattgatgtccactacatcactagaaaaaaaaaacttggattaacacaggtaatttatcttggacagagatttgtaagactaaagctcacgaggcctttccttcaaagatgttgcattgtggaataagtgtgcaattggtaagtttgtttgtgccactgctgctaaggaggataatttttggtgaaatgggctcatagtgtttacttaaaggataatgattggtggagctatattggtccaaccataagtaattggtattggactcaaatagttttgttcaaagatgagttatagaatggtattggtactacttagttctagaagcacaattatacaattgcaggtatttatactaaaatgaaagagaatgttgataactggcattactctattatctgggatcgcttaggtgttcctaagcacaagttcctttctcggttggctttgaaaaataaattaacaacaagagattgatcttcattttctctgtgttcaacataataaatttgctgagcacttattttttcaatgctcttttattagtttgaggtgtttaaagcaggtacttttttggctcaagattgagacttattgttgtaccttaataagta

SEQ ID NO: 237790 - DNA, 1239 bp, Cannabis indica
gtaacaaaattaattagttgttttatttaaatttaggtaaaattataaaactaatgcaagaaaaaaatgggcgaaagtacatatttttctgccattaaaaaatctgtatttttttctttttttcttacattcctgacggtttaaaaccgtcgcctataccctgtcataggcgacgattttaaaccgtcaggaaacccacagcgacggttttgaaccgtcacctactctcccaattttacgacggtcgtattggcgacagttatagaaacccacgggaagacttcaaacgactgtttcaaaaatgtcgggaaaacctatttttttagtagtgttcatttcgaagccaactgataagtgtctagcatttttcaatgtattgtgaggcaacaaaaattattgaatggacagaagatagagaggaggcctttaagagcataaaaaggcatttgtaaacccctccagtttaggcaaaaccagtaactagagacacattactgctctaattggttgtcacagaaaatgcgattagtgctgcaatagtgcgagaagagggacagcaccagcaacctgtttactatgttagtaagaggttagtgggggcaaaatcatggtatccccctcttgaaaacatgccttaagcctaatccacgcatctcgcaagttatggccttacatccaggaacatatgattaaggtgttcactaataaccctagacaagtttatcaaaccatatgcttctggaagattgataaaatggtcaattgaactgggacagtttgacataacttatcacccaagccttggtggatttcctaagagaaggaataactccagaggaaaatttgcttgttcagtgtgacgcggatacttggaaattatacttggatggtgcacccaatgagcatgactcaggtgcagaggtgatattaattttgccagaaggttttaagtttcataatgccttgagatttcaattcgactcgtcaaacaacgaggctgagtatgaagccttgatcgctggtttgaggatagctgaagtgttgaatgttaaaaatctcatatgtcatagtgattcacagctgatagtaaatcaagttctcggggaatacaaggctaagggcttaaaaatggccaagtacctagaaaagttcagaagaactttgaaaagctcaattatttcaaaattgagcaaataccaagagaataaaactctaatgtcaatgccttagcaaaactgg

SEQ ID NO: 237791 - DNA, 1433 bp, Cannabis indica
aatagaaacttgttaagctccgagaatcaaagcaatgcaaaactcgatctccctatcaggtggtaaccctggtaaatcctctagaaacacatccggaaaaccactaaccactaatatccaagggaactggtctaaatccctagactcatcctcgatcgcaaacagattcccataacactctaagtttctctttccacctaagcatgcccttaagataggattttgtctcactgcgctcatgttggctcggtaaataatgaaatcaccactaggggttaaaagagtcactcttttgtatgaacaatccataatagcttggtattagacaaccaatccataccaagaatcacatcaaattgccccataggcaacactaataagtttccaaacaacttttgtccctcaaacacaatacaatctgacctacatatggtggatacctcaccgtgtcctcccataggtacactcaaatgcaacgtagggctaaaggtttcccaactcaaacccaacatactagcaagaattaaagatataaaggaatgtgatgcactagtatcaaacaacacatgagcccaagagtgtgagataagaaccataccatcaacaactccttggtctgcaccgccatgtatatcatcaaccccaagagcataggcttgagcggacgactttgcttttgcttttccctttccctgactaggatggcttgtactagcaccagaccctccaccttgattataccctatttgactcccactaggagcagaagtttggaaaccttgtgagtaccccatgttgaaccctgaaacttctagcctaaacggatgttgatactgagattgttggcccgattggggtgtaaaaacgtaagatgaagactaagactagtttgtaccctgggttgcccatgagaaggagtagactctacaaacttcatataaaattcattcacagtcatatccccttgtcttaaactatcaaatactccaatcaaagccctcctgtgagattgactaaaaatattgctccctgaaaacatcctcaaaatctcgtcaagtcatccaattagtttccattgtcctggacaaggtctcccaccaatctgctgcaccaccctctaacttggtcacagcaaaagtaacttgatattcctcaggcactcctattctattgaaatttttcttcatcagcctcaaccgcctttcagctactatggtatcttgtccaccctcaaactcaggcacttggatccgatgaaagatctgaaaatgatgactctgttgagcagcatgatccatctgttgagcgtgaactgctcttaaggcttcgagaagggcgttcatagggaattcggcttgtgtaggttggaaaatagcttgaggaacgtcttctccaatcgttctccttatcttccttccttttggaggcatttt

SEQ ID NO: 237792 - DNA, 1151 bp, Cannabis indica
aagtttcgaaaaatatcaggatggtgtcattgtcccacgcgcgtgcatgaggagcttccctcggatagcacgcgcacggacatgaatccgtgtctgaaatcaagcttccgtgagcggaaatcatgctgaacacctccagcgccgagcttgctcagccgtgcattccccttgcgcgcacggacagtatgcacaacatactgtccgtacaacttcttcagatgaaagtcgtacaacttcttcttaagtaacacatctgagcaacacatggagaaccctcatctgtacataattccctcaactatgatataccgtgcaaccttccttctcatctttcccaagtgttgaggtaggctgctattggcgtcatccagtttggggaagtgtcaatcattttgatctattctatgccattgatgctaggctcttcgaggaattggataagaaccaagtttgctttatcttttacattactacttgccaaccgagctaacgcgtctacagtcgtgttttcttcccttggaatttttctgagaccgtagcttttgaattgtgcgagcaagtcatgtattttgctcagatatgctatcatcttttctcctcgcgcctcgtattcttcaaatacatgatttaccaccagctctgaatcactacagattttgatatgttcggttttcatctctcgggctagttttaggccagcgatcaaagctttatatttgacttcgtcattggatgctttaaatccaaacttaactgcagcgtgcaggtgttgccccaaggtgtgacaagcgcgattcctgcactggatagttgatctgtagctgacccgtccacgtgtaatctcctggttggattatcttcactgttacttggctgaagtagttgtactggctcggggttgttttccgatatgctttcttctttgcctatgcattctactacaaagtctggtaaggcctggcctttcattgctattcggggttggaaagtaatctcatactgacccagctccactacccacttgagcaatcgtccaaaagcatccgacttttgcaatatttggcgtaacggttggttagtgtacacacgaataggatgtgcttgaaaatagggccttaactttcttgttgctagaatcaggcagtaagtga

SEQ ID NO: 237793 - DNA, 1455 bp, Cannabis indica
tttagatataaaataaagttttgtttaaaaaaaaaaaaaatcgggccggatcagatccgatccgtataaggcgggtcggatcagatccgatctgagtatctgatccaagcggggaggggcggggcagatccgtacatgatctggatcaggtcggatcagagtcggatcagatccgacccgcccattgacattcctagtgaaaactatagaacataaattggatgatcttatgaatagagaggatcattattggaaacagagatcgaggtcggagtggatgactgtaagtgatagaaacacaaaatactttcataatagagcatcgttgaggaagaagaaaaatgctattactgagattatgatagaagctagccaaaatttgtgtcttgagcaagagatttttggtgaagtggagcggtattttatcgatatttttcaaacaaccaacccgacaaatgagcaaatctagtgtggtatagatggtattaattcatgtattttggtggctgataatgagcgtcttatggcaccattcactcaagaggatatttacaaggctattaaggccattggcaccactaaagctctgggactaaacgaatatcatgctttatttttttttagagattttgggatgttgtgggcgaaagggtcaaccaagtatgccttgcaatcttaaatgacggtgctttggtgcaatagtttaataagtcaaacatggtggtgataccaaaactacaaaagccatgattggttaaagagtatcaacttattgctttgtgtaatgtaatgtatataattattgcaaaagctttatcactgaggatgaaaagtattcttggccccctcatctaatcattctagagtgtatttgtcctaggacactcaatacatgacaacattatggttagtattaagctacttcattaattgtttaaaataaataacgatagaagaggattaatggcactcaagcttgaaatgagtatagcatgtgactgggtggaattgaggttcttggccagtatgatgtagcaatttggtcttgctaagggttgaattagggttatcatggattgtgtgacaacactggagtatacttttttaaccaatggtcatcctaaaggtcaagtgatttcgacaagagggtcacggaaggaatgtcctttatctctttatttattactcttctatgtagaatcattgtccttgttgttctctcgtgtagaagccagatctaaattgataaggtttaggtgttctaggtcgggaccacgggttactcacttatttttgtagacaatagccttatgtttggtagagataatggaggtgatgctgaaactataaagcatatccttctaacttatgaagctggatctggtcagaggataaactctgagatgtttgctatcacttttagttggaatgcgcaacaggtggaacgagatgggg

SEQ ID NO: 237794 - DNA, 525 bp, Cannabis indica
aaatagcagatttaacttagaataattactctcatacatacttgtaaattaataactaaatattataaatagtatacgcgtggcagttaaaatatacacaaaatattacacaatatgatactatttttctaaattagtggtcccatttgaaataaatgtaatttgttagaaatatattgcgacgttattgacagtgtataatattttagtgagtatttttaaaacagaaagataataataaataataataataataataataatgataatatgtggtactcttaaattctaaaaagttttaactttattaatatccaaaaacaataaaaatcaaaccaccattaatttgtaaagtctaaagtttaaataaaataatttaaacattaaacataatttatataatatatattatatatattaaaagttataaattagtttatttgagttatattggaggttgaaataatatcaaaaaatttacataaagtactatttttttacatttttatagagttttataaaaac

SEQ ID NO: 237795 - DNA, 705 bp, Cannabis indica
aacaaatataattttccccccaaactttatggactctttgagttgtgggagcttacagtcctcttctaactctcaaaaataagtttacaacacatggacggatatattccgggagctgtcattaattaaagaaccaaaaaatgaaggtacaatgggtgtggcacacatgcgacacctttaatgctttcgttgataacaggcacatgtaggagcacgtagttttaatgatggcaggtcaattgaaatgatccttatttaatacatgcggtactcgaggtgggcaatgatgaaaaataaacactctaagcatgttttaaatgccatattttcaacttcccatcagtcagatcacatcaatttttttggagagagaatccggaccattgatttcaaatttcaaggattcagtcgaagtataaatacacttatcaaacccattttctctttttttaccacctcagactttttgaatactttgtcttcaaactcaaagccagagctcttgttctacagaaaacctttaatcttgctaccatttcaaatggtgaatgcaagaagttttcgattacctgattccatatttcttaaaagttcatttagtttgatttctagatgcaaagttagtaaaccccaaaatactccaccccagctggacgaggactttgacgttcaagttgattttgatcgcgtgattgactgggtaca

SEQ ID NO: 237796 - DNA, 1115 bp, Cannabis indica
ctcatcgacccacctgcctttggcagcgtctaatttcttcttgatagtatcctttagggttttattaacagctttcacttgtccattcgcctgaggcttggatactgacgagaagctcttgataattttgttcctattgggttccattatcggatactatcttcattggaattccaaacctacagacaatgttcttgaaaacaaagttgagggctttcttgtaggttatggaaacgagaggttcagcctttgtccattttgtgaagaaatcgaccgatactatcgcatacttagctcctcctcgcccagtgggtaatgctccaattaagtcaatttcccatatagcaaatgggtagggcgaggtcatcattcttagctttattggcgtcacgcgaggtatatgtgaaaacctctgacacttatcacatttcctgacaaactcatgggtgtccttattgatcgttggccagtaatatccttgtctaatgacctttttgggtagactttgccaacctgcatgatccccccaaaagccttcatgaaattctctgatgattttgttcacttctgtagggagaacacatcgaagtagaggcatcgaataccctcttctatatagtttgccttcaattattgtgtagcgaggcactgagtacaatagttttcgcatctcgtttttatcatttggaagttgtccgtcgagtaagtaattgataataggagacatccatgtaggagagttgtctatcatctctacctcttccgtttcacatatacttggcttgctaagcatctccaccgagacgaagttcaattcatccaagtcattctgcgaggccagttttgctaaggcatcggtgttagagttttgttctctcagaatttgctcaattttaaagtaatcgaatctttccaagttcttctgaaccttccctaagtacttcgccatttttaagcctttggcctggtattccccgaggacctagttcacaatcaatggtgaatcactatggcagatgaggtttttgactttcaacgcttcggcaatctttaagccagcaatcaaggcttcatactcaacctcgttatttgatgcgtcaaattgaaatctcaaa

SEQ ID NO: 237797 - DNA, 1021 bp, Cannabis indica
atatggaaaggtaagagcatttcggcttcagaagtaattttgtctactagagtcaaccttaatcaatggaaaaatgctccattaaaaaagaagggtcctttgtttttggcttcgggtgagaatgaaggaagagagcattggtctaaatcggttaataatatgattaaggtcaatgtagacggagctattttcgactctgagggctggtatgggactggtttggtggctcgtaattgtcatggccatcttgtcgaagctctttcttgtagcaaaccgggttgtttagaggctgttgtggtagaggcgataggcatcaaggaggctcttagttggatcaaagacaagcagttgaatgatttacaactggaaactgattgtcttgtggctgtccaaggatcgcattcttcggctatactgcattctccctttggcgtggtgattcaagagtgtaaggagttgcttgcttctttaaaatttgttcagattcaatttgttaaacgttctgctaacaaggctgcccattatatggctcgtagttcttgttttcattcagttcgtatgttcaccgagagcaatgctccagaggatcttttaaacattgtattggttgatgcaatttgctaataaaaatgtcaccattttacctcaaaaaaaaaaaaactttactttattttttttttagttttgattgctttataaatgtcaatttaataaataatttggtggaattattctatcaaaatctgaaaggaaatgttattttgatgcatgtatagccgagtcttattatttgtaggctttgcgccaataatagaacattttcacagtcaacttttaagtttttttttttttgtataatttagttatcaaaatattatttaatttattataaatatctaatgtgaattaaatattcttttcttgtgtgtgatttcgattttgtagctctaaaattttcataaaagagaaaaaattatttttatagaaagtttgattaaatgagttatttttttagaaaaat

SEQ ID NO: 237798 - DNA, 719 bp, Cannabis indica
cgcctctttcatctcacctcaggaccggctctaataaaacacgatatgaagatatgaatttacgggccatatcaggttacttttaagatattagcacgatacaatctatattattgtagattttttaacatatggtccgagctaacctcgacgctcacacgtatttacaactattttatcaactaacaacaaaacagtaattaatagagcatacacaattcaaaaataaaagaaaaaaacatgaaaattgtagttgaatcgaatgtgaaaacttatgaaaatgctaaaattttaaaacactaattaaatgtttttgcttttgcaaaatgggaaaattaaacttataaagtgaagacactaatacagattttctttctatacatatagagtggcacagtatgataataacatctcatctaagaaacaagcactccccttttaaaacttgtcttatctcatcttgtatttaatccatttactagtatcaatgtgtactgtctactattcgattaggaatcctacgaggcctcactccactacccatcaatcactataaaattaaggctcatcactaaaccttatttcaaatgagatttacacaaccataataacataacagagattttgtgtgtaaattcttgagtgaaaatgtttagctcaacaaagcttaaattaaacattcactcgcgaccttgaaatttagtgggttataaaaaaaa

SEQ ID NO: 237799 - DNA, 1230 bp, Cannabis indica
atttctctctgttctctctgttttacttttctcttgttcaagctcaatcgagctgttatactatgagtcaaatccatccttcattgaaagctgcaaataaagtacaatctgcggagtaacaaatgttatctgaagttgaggctcgaataaaacgtgtgctgaataagatcgatcatacttaatcgtaatttccttgtaattcaaataaaaaatagttaattgtgtttctttccacctatattaaaggaaaataaaacgtgaggattgttcacgattcatgaattattgtaaagataagattaagtaactgctatttttaagcctataaatatgggaaaaagataatgaaaaaagggatggctattttttcccttcaaaagaaaagactaccaatcttgtatactgttcctagaatttctttaatattcgcagaaataaggcagactagtgtagtatgtagatttaaaccacgttaaaatttaactatcttacatttcttacttatattaattattgaattcaaagtattaattgcttgagcctcatttaatgttaacaaatttctgagttaacagtttggtgctttcattgagagctttcgataattaaactctgaacaaaaaaacacatctcccatatttaaatattcatcataccatggaaaatactactctagctgatcacgttgaacaaaccgttactgtgcatcgccatggaaaggagccttaagggactcaccccacaaatggtcaaaacacaggaaggggtttaaacatgtgggatttggagagaaatgataatgaagaagatattccagaaagaagaaagtaggggacgtatgatcccagcagatacttcgtgattgtagaattggaaaatcgtcaactttggcaaaggcttcctaagtcaaatcgaagaaatgcagagttggaagcgaggttgctacagaaaaagcatcccagaatgttgcatctccaacataggcgtccatgaggaaggcctctcggatcaagaataaaaaggacacaaaatgtttctgtcgaagagaacaatacagataacccatcacgtctcaggaaccacaactagggaggactagggaagttcatgttgacagggaaaatccacaaaatccaaacagtgcaaatgcaaggcaaaggcgacccgatgccttagagccttctcatataaatgcgagacctccaccagagcaacctactattagaccct

SEQ ID NO: 237800 - DNA, 1158 bp, Cannabis indica
tggcttccctgtccacacctcttaaggtgtcttaaaattttttggcattgagaggcatctgtttatcaaatagcatgcagtcttaagggcttctgcccaaaatggtctttccaaaccagtacctacaagcatgcatctgaccctctctaacaatgtcctattcattatttttgcaatgccattttgttatggtgtgttcaccactgttttgtgcttgaaaataccttcttgagcacaaaacaccttgaattctcctgagcaatactccaagccattatatgtcctcagtactttgagcttgttaacaatttggttctctagaagctttctccactatatgaaggtatctaaggcttgattcttattcttcaacaagtatacccataccttcctgctgaaatcatctgtaatgctcatgaaatagtgtgctcctcccatggttggaattcttgatggtccccaagagtatgagtgtacatacgctagtttctctatggttgtgttctcctttactgaattttaccctgcaggccttcccaagcacacattcatcacaaaattctagcctttcttgtaatttctccttgaacataacccttgtttgttcaattcttccagtcccctttggcttacatgtccaagtctaagatgccaaagtctactttggcttgttacagggttatgtacagcaagtgctgcacttccaatgactattttaccatctagaaaataaaggccattgtttagttgacctttgataagatcttgagatccctgacccattatcatcactccacgttcaatcttgactgagtaactagacttgttaaacattccaatagacattatgtttcttttgtgttcagggacaaacctgacttgttgcagggtttgaagttttccatcatgatttttaatcatgactgtgccaatttcctgaattgcgcatgccttgttattgcttaaaagcattgttccattgtgttcttctaaaaaaatagctgagtagttccctgtttgttgtcatgtgaaatgagtaccctgagtcatgcacccattctccaccagagtcagaactttatgccaccagaacatcagctgtctcacatccatctgcaagatcaacttctccatgattcttggttcttgattgttgat

SEQ ID NO: 237801 - DNA, 964 bp, Cannabis indica
aaaatcacttaagaaggttgttctgggctacctttaattagatctatcatgtttttttaatagaatgatttctcattaaagacacaaagcgaaagataaggcactatacttttgccatatctaaggataaggcaagtgtaacaaaattgtgagctaaacagttcgcataacgataaaagagaaatttaaaaacattgacatgattataattagataaatgtctttaaaaatcaggtcaaactcagttaaaaccaagcctctcttctgtaaaatatagataacacgttgaaagggatcccaaagctggaatagctgcaaaagccaaacaattacccactgatcatgcaacacagccccataccccacatgccgatttgcacctcaaagtctcgtatcaacatttagtttcaactgtaacgtcctaatctaaagggacaccatgtgtgtggttttataaaatagtttagtaataatagattaattaatttgtaaaatctgtgaacataataaaaactttaccaatgtaaaatcctagtaatgaacaatataacaacactaaaactttgttctggagatccctgcaataaaagttttacaaaaagactatatacagtaataagtcaaaatacacaacagatacaatccacaatccaaaacaatttttggcaactcggtacacaaaccggaaggatcaatatgtacattcattggagaagaccatcgcctcatggttgctctaacttttccttgcccttacctgtatcacagaacactcgtgaatcacaatgactcaacaagaaaagtaataaaaggaatacatatagcaattaattatctattttaccatcataaaataataaataataatatttcaaagcttttataatataatcaaccatatgtgtaagaatgagaagtaaccatctttattacatctaacattgcttaatcaggcaagtcgatg

SEQ ID NO: 237802 - DNA, 656 bp, Cannabis indica
tttttgtgtttacaaagacatgcatggataaagtcagtagttcaaccctaaaaataaatgcataaataccattctcagatttacaaatttcattaatatgtaacctaaagtaacaatttcaataaatatccgtactaatcaggcagattccagtttcagcaataatactctgtaacaaaaaaaaagttttataaataccaacatataaaaatttcaaaataattaattccatgttttataaaagtactacggactaataaaatataaaatgttgttaaaaagataaaaggaaatgttcatttgtgagggttgtagctgggatgagtcgaagaagacgaagaagaaaaagaaaagaaatagttttatgatattttaaaataattttttttgtttttttttttctatattattattattctataaaatttatgatttaaatcaaaaaaaaaaatttgacaggtggcatgttattagtatttaacagattagttagaaatagagactaacggatcgacctcaggtattttttttagtatttaataaaaatttactaggaaaaaactgcaataatatgggaagacgctcaatttattcttttcttttttatttttatatatgtgctcaatttgtcttatcaagacattttgaagaaaaaa

SEQ ID NO: 237803 - DNA, 1888 bp, Cannabis indica
aaggctcgccttgtagccaaagggttaaatcaaaaacaaggcatagattatgatcaaacttatgctcctgtagctaagtttaacacactcaaaaattttcttgcacttgctacaatgtacaattgggatatccaccaagttgacatcaacaatgcatttctccatggtgacctccatgaagaagtgtatatgaaaatcccacctgtttatatagcccctcccaacagtgtgtgtaaactcaacaagagtatatacggtctcaaacaagcctctagacaatggtacgaaaaagttgagtaccactttaaaatctgaaggcttccaacaatctctttctgacaattccttattcataaaaagaactccaactttccaaattgccattctcgtatatgtggatgacatcatcatcgctagcaacaacaaggctgccatcactcaattcaaatccttcttggacaaaaatttttccctcaaggacattggaccacttcggttctttcttggtttggagatagcaagaaccaataaaggaatctcaatatctcaaaggcccttcaccttgcaactcctaactgacacaggttacctaggagcaaagcccgcttcaactcccatggaacctaatctcaagcttagcaaggacaagggaaacctcttacccgatcctaccacttataggagcctaattggcaaactcatctacttaacaatcacacggccagacatatcttatcctgtcaatcatttaagtcaatttcttacatctccaagggtacctcacctccaagcaacccatcgtgtgctccaataccttaaacgtacccccggtcaaggactctttttcccttctaacacaagtccaaacatttcagcctttgctgaaacaagcttatcaccttcgaatgttcaactctctttttttgcagatgcggattggggagcttgccaagacacacgtcgatccatatccggatattgtgtctttcttggccaaacccttgtctcttggaaatcaaaaaaaaaacaagtcgtctctcggtcctcagctgaagccgagtatcatgccatggcaaatgcaacctccgaagtaacttggatcattgctctcctcaaggattttggaatctccctcaaccggcctgcttctctctattgtgacaacacaacagtcatacacattagtgaaaaaccagtctatcatgaacgcactaaacatgtcgagatcgactgtcacttcattcgggaaaaaatccagcaaagcactctcaagttacttcacgtttcatctcaacaaaatgtagctgacatcttcaccaagaccttacttccctcacactttaacaacattgtatccaagatgtgtgtgtttaatatttacactccatcttgacggggactattaggattaggtggttagttatgttaattaagagattaatttgattgttaccattgtaactaattcttaattagttagacttactgttttacctttcttgctgagtatataaacccagcttttacttatattgaaacaaaacattacatttctcaaataacagagttttctttctctatttctgcaaaacctctcaaaagtttttcaatcctcataagttaatttgggtgaaaagaaaagaaacaatgtatagttttatccatagttagatccttattattattaatattattgacgaaatgtggagcattattgtggaatggtgttgtcactttaattgaaacaatattattcttacggagctttaattgttaaatattagttgaataaagaatagttccagttttttttcaatgtctctttagtctcatggactgaattgatgtgtgtgtgtattggaatcatttttgtcgtgaagggaactaa

SEQ ID NO: 237804 - DNA, 1350 bp, Cannabis indica
tagcactaccaatcatcctccccgatgatagatcctgaaattgacacgaattggacacaaatttagcaagacatctattatcagaagttaatttgtgagcaaagattagattgcattttaatgatggaacataaagtactaatttaagagttaaatcaacagataatttaacggtaccaactccaacaataggtgaataagaaccatctgcaatcttgacactagatgtagtagaacatggacaataagaatcaaacaaatgaggtaaacctgtcatgtgatcagttgctccagaatctatgacccatggtgtttggcaagcagaaaagaaattaccagagtgtgcaactgaggcactatgagactcggaaccagatttggatgtcatagaagattgactgaggagtgtgtataaatgttcaagttgttccttactgaatgaaggggcattagtactgctttcagtctgagtgtggtagacttttttgtcatgttggcgacgaggagtccagtttggtggtttaccatgaatttcccaacaagtggatcgagtatgtccgtgacgctggcaatgatcacaccaaggtcgatcacccttacgattaggccgcggatcagggttcgatttgccagatggtagtggtccagactttgagacaagagcagaactttcaatgggtgacacatcaggagttgtgagcataacacgacgacgtgcttcttcacgtctaacctcagagaatgcttcttcagtgtcgggaaatggagaacgaccaaccaaacgacctcttacttcatcaagattgttgtttaacccagtaagaaactcaaagacccgctctttttccaattgttgtcgctgaatggtggtacatttcgcacacagtggtgtagtatccagatacaaatccagctcctgccacagatcttgtaagtccgacaagccacgaaagaacaatagagtttttagcttaccataccttgtgtgtggtgtctgttggagatggtgcagggagatcaccaatgatgtaccaaagtttcccacgtatacaaatgacaagtttgactgattgtgcccattgcaaataattttttccatcaagtttatgggctatgatatgaagagagttgttgtcatagtttatggactgagttgtagtttctgtggtggtctgagaattaatttcctcactggttgacattttttcagagaaaaaaaaaaagggcagagatagatttgagctttgactaattgtttgtttgtttttttagagagggaaactagagaagaaacaacaaattattcaaagcaaaaaaaaaaaaaaaactgagaaaggaaaatatacgatt

SEQ ID NO: 237805 - DNA, 802 bp, Cannabis indica
atattaaataaaactaacactacgtgccttggcacgtaacaataacctagtatatatagatgtgtgtatgttcttacatatgtttggctcatatcgaaataccattcaacaacaatattcaacaacaatgaaaaaataaataaatcttttacaatgaaagagaaacctaattaaaatgtaaattccatgaaaatataataaattggtaattttaaaattaaaaaaaatagtaatttgaataagttggtaattttaaaatattaaaaattaaattggtaattttaactaataggaaactttataatgaaaaaaaaattattaatttcaataattggaaacttaaaatgataaataacattgttaatttaaactaattagaaactttacaatcaaaataataattgcttacattaagaaattaaaattttaaaatataaaaataattgttaatttaaataataagttgaaaatattaaaccgaagatagcataaaatattgtaagatagcataaaacattgtaagatatcataaaataaaattctgataaaataattttgtttgtattattacctagtgataaattttttttccacacgcacgatttttttagtacccgtttggagaggctgagtcagtaaagatttttaaatacgcttctctaaattatccagaactttttttgttccacatggatagtttgggcttgttgtatacctatagtgagatctattgctcatttgattgtttctttgttaaaaattttgatacatcatctcctcgcacgttattgtaagttggcag

SEQ ID NO: 237806 - DNA, 1295 bp, Cannabis indica
gaaaagtaacataataacaaatttggggagatattagaaattatgggaaatttacaaaaatattagaattttagttgacttttacaaaaatactgtcacacggaaaagttttaaaaaaatattgtgtttttacaaaacacctgtagaatacaaaactattcaactcaaaacaacagtagaacaactaaaaaacaccagtagaacaccagtgaaaatttaacacagtatactgtagtatgaaacttaaaaaaaatacaggttaaaagtcaaaaataccgcctagcagtatttttgtaaaagaatgataaaagttaatataccatgtaaatttctcaaaatatatctacattgctaataattttttatgaataagtctctttttcgaaaataaaactaacacaatgtcacaaactagtgaagtcacaaaaagggcaacttcccttaaaaaaccaagagacttaatctttacaattctcacccaactagccaataaatctacaaaacgattttcagaccgcgcacaaaaatcacaacaatatcttcaaaaaaacttacaaatgctcaaacaagacgaaaaacagagaaaatgtgccccaaccataaggcaacaacccactctgaagtttgaagtccaaagtagctactttcgagtttgtttcaatccaaagctttgaaaccaataagtcttgagccacctgcaaagccaaagcaatggcacaaagctcaccttcaagcacatccgttacagaatagaacccaacaacaacccacgcctcctcaagctttcaggtgtttttttttaaaaaaaaaacgtgtttgaaaacaacaataccagcatctaaacccactacagatgcatcaatttgatagcaccaaactctttcgaagactgaggaaccaactcaagagtgcagctaacaacacaaacttccttctcaacccaaatccgattatgcaaaaatcacagaacttaaagtgacaatccttaaacaccatttccacatcacagttcacacctaccttataaattagagcccagattgagtgataagacttaaaaacaccttatgaaatgtgattagaattctcaatctaacgcatttaagaacatttgggtgtacatatgtacaccaatctattgacaagttagaacctagatccatgagcagggctagtcctaggctagattaatgtgagttaagatcgtatttagggccactcaagctgagatcccaaataaagataaattatagtatcttaaaaaattattttttttaagacccaatacaactcat

SEQ ID NO: 237807 - DNA, 2562 bp, Cannabis indica
gtcgtgttcgggttttatttttttgacacgattgttaaacgggccgtgttcgggtcgagcatgtacctgttatacatgggtctcgacacgacacgaacacgacccgcgaacacgaattgccacccctaagtgtaggtccttcacaaaacaacttacaaaataacaaaaataaaactcaattactacacaatataaagaaaaaaggtaatgtgaaagaacggtgataaaccaatccatcttaaatataaggacttaaaaaattttgaaatacttatctgttataagtcaaaagtcgttgaagtagaaataatgagcacaaaatggatcacttctcttgcctattgaccatagcacaaaactaccctaaacaaataagaacaagccataataaatggcacaaacgccataaaaggcacataaaccgtaaaaggtattaaaaccatcaaaaaataatgtaaaaacttgtggtctcacatatactttaaacatataataatacaatcatatatacttcaaaaactattgtaaaatttaattattaattatcttaaaactattattttaatactgttaacacagattcattaaataaatatacaagtcttttacgtaataaatatactacagaaattaaaataataataaatgaacacaagatatttatgtagttttgtagttaaaatctacatactccacgagtccttattagaaatatttctttagatacagaatacaattctctcaataaatgtaaaaagtagttttttctctcaactttgtcgtcctcttttttcctgatttgtgcccctatttataggtgtataggatgtcagttatttttattgggatctattcatttacaaccattcatgaaacgtgaacattacttacgttttatttttatgaacatgggataatacttaataactacccaaccactctttgtctttatccttaaacggttgtgcagactaagaaggttgtttctcgctaaatatgagttgtccttcttcgccgtctttataggaaaaaatgctaagtatgaatatacttctcctcacagtgttcttcatattataatgatattaacgaggtagttacttcgttgcgtaaagggcgagatggatgaatgtagttattttcttcatgtaccaatatgtgaatcaataagttgcaagctcttattcccaagtacgtgagatgcctccaaggcttcaccctctctcattagagatttgcttactgattcatactgtgtaaccttaaagagagatatatcaaatcccacctatagtgatctgaataagattatctctcagtatcaatacaactaaaaggggagtaggtcattaccagataactaagggggtcgaacctctataaaattctcgtgttctttactcttgaattttaattgtgtaacacatggcaaacattgaattaatatgaccctgctgtcggctggctaatttttgaggtcaacagtttggtgctttcattgagagcgagttaatataatacctgatcaaacgccatggttaacatgagaagaactccggttgcaccatctgcatctttgagccttccttaagacccatagtctgcagatcttgatgttcatgttctagccacgactggaatttccattaacactatagatgtggtcaatcctgttaccatgacaggtactctaaatctggccactacagctggctagagtgacacaaacatcctggtggatttgaacagcaggcccttacagacatgtacaatcattgttagaaatatgcttgactcactgctcagtaaacctttacttgtttagtaagttatgtgattaaaaagcatgctcggaagcatgatagccatatgttatttatttaaatgcatttccttaaaattcataagtgcagtacttaaaacatatatgatcgttgtttgacatacctgacttatagatttgcagactaagtcctataacatggatgcccaacaaaacacaagaagtcatggtaacatggtcgagatcgggggcagtcgaggaggtcaaaatcctccaaatatgtaataccctaaagtttagtaaccagtttagcaaccctaactaagttaattaagtataaatgagaaattatattgttatatgatttaatatgtggaattattgtgatttattgcattttaataccccatttgtgtgctgggggtattttcgtaattttgactcgagaagggtaaaaatcaaaattttacggtatattgtgtttatagattattttattatatagtatgttcattctgtctttttacaggtaatttttgacaagtcgacatggtatagtcataatcgagtattttaggccgaaccgggttcgaggtccaaaatacatttttaggatttagttatgacttttatgtaggggtgagctaaaaatcatccaatccaattacaaccgactgatccaatcccaactgatccaatagaatcaaatatccaatcataattggatcgaattggatgtaaattttgaaaatctaatgagatcagatcggttgttggat

SEQ ID NO: 237808 - DNA, 1138 bp, Cannabis indica
atattcttaattatatatgatatattattttttttttctacgaattatttatttttatttatttattattatatattttaattttaatttattattatatatttttatttaattttaagttttttttttctaaaaaggaaataaataaaatagtccagtccattcttaaaccaaacacaagattactttcggcataatccaatcttgtccagtccagtccaatccttttcagtccaatccagtccaatcctgcgaaccaaacgggccctaaagaataaacttatcccaattgggaatatctatttttacttcataatcattcactagaacacatgatgaccaagtgtgaatcattcaacatgtagtggattgctaaagattattaggaaaaaaatgataaggaaactaaaaaaatatggagagtgtcacgttccaaacacttagagctagacctcctaaattaagggcaatgaacaactttggagtaagaaggtcaaccttgctatctttataaggctcaaaaattgaggaattaaaacaaaaaataacaagaattactttagtgtcgtgaggatagaaaagtgtcgcctaaatataagtaactacaaatcataaaatgtaatacatcaaagcaacaaagtaattgtgaatgaaattacaaatataagaagctatctcatctaaatgaatttatttgcactttgaaagtgtagattattaccctctaattttatataaagttaccttttaactaatatttctagttatattattacacattataacacatagaaaaggaaaactagcacaaaaaaattaattctgtaaggcgctaatgcctaatgggctgccaaagagcagagaaattaattctaatgctaaacaaatgcactgtacttccagccattgagacatcatgtcccatcatcatcaattttttcaagggagcctatgcgacctcccaagctttatattgaaacaaaaaattataccacaagttaaattaacatgttcttgatccaattaatcaaaactcttcaatattaaagggaaaattcactacaaaataaacaagaatagaaaaatcaaacaccaagttagctgatccaatgcaccccaacaactcaatagtttggat

SEQ ID NO: 237809 - DNA, 767 bp, Cannabis indica
agaacaaataatctaaaatttgggtcttatatgtgtcctgttttagacaataacagagtttgtactgatgaaactggaagaaaattacaattttataaacattgggtacttatgccactaaaaaaaatcattgggtttatgccgcttacaaacctaaaactttgggtacttatggcactatttaccctatttaatattggggtagtattggctaccaggatgtcttttgtttgatcatggggtagtaataagtagaaaacgtgttgaagtattattttcttttcctttcttagggtttcttttctccctataaatgaaagtgatatctcttatatcctaataaaatcatacgacttcttcacaccctcaaacccggtcattgtaaactaaatttatttttcaagattgttcactagagatgtctactaatggttcaaaccagccaactatgaaggctgaagataagaaggggttgtgcttgaactgcccaaagaaggaacatgaactacaaaaactacacgaaatagctgaagactcttccacgatgataaagaaaacttcagaacatataagagctaatgaagagatattggaagcatacaaaaagctaaaggaatattctgactttatctttcatcaagcaaatgaagtgaaaggggtcaaaactatttacacattggaggagataatgatgggatctgagtgaaccagcgtcgaaacttttcttcaaaatatatgttcatattttatttgaaaattagtatgta

SEQ ID NO: 237810 - DNA, 814 bp, Cannabis indica
ttttttttttgggtttttttattaataaataaaaagggtagaaatttatgaattgaaaggacagactttacatgtttttaaagatttttttaaaggttttctctaaggaattgaattaactaccgccagtgtgttgggtagtataactatatactgaatttaattatagctaattacttagagaattgtaaatataaatttcaaacatgtaaacatcaaactttttttttttttttggttttatagaaagaagagataataagagatattactacatgctttgaaggcttttataaatgttttggttaaggaataggtaaaatattgaggaagtgagccaggcttttcacagactagataaatatgatttcgtatgagtttttgatgaagatcatggagtggaagaacgaattagaaatatgcagaagaaaagtgaatcataaacaaaagatgtaaagaaatgaagatgaagacgaagaaagtataataataattgaagcaaggtagaacagaacgagtgtgatgaaaagagaggcaacggaagctattcttatagagtgtaggcttatagcagtatatcagtatatgatacttttcttcaccaaaatattatcaataataattgttcaaaaaaaaaattatataataataagaaagtctttttataccataactctccccactttactttgactaaattacacaactcagcaataattttactatgtaactagaatttctaaaagctatcaaaatttagacaaacagacatgattttttttttaaaaaaaaaaaaacttaaacaagcacagat

SEQ ID NO: 237811 - DNA, 1781 bp, Cannabis indica
gtgtgataatatgggagttagtgcccctgcttcgaatctagtctaccatgccagaaccaagcatattgaactggatgttcactatgttcggaataaggttctagaaaaaaaaaacattggaaatccgatatgtgccatcaagtgaccaaattgtcgactgccttacaaagagcctttctaatgcaagatttcattttctaatagacaaacttagggtgactcgatcatcgctaagtttgagaggaggtgttagaaaatgaccctgtccaagtcagctcttatgtccaactcaacatccctccaatagccaaattaacctcaatgttagtgtctacatcaacaatccgtgtagctgcttatttttccttttaatccttttgggaattattttcttttttgtaattctctaacaagtttgtaattgaggtgacaagtttgttattgaggtgtatgatttttagatttttctgtaaccattttatcctctaaataaaggagcccctacacttacatgtccatttacaagaaaaaaaaaactcaccaacatgtgtcatttgaaaaggctatgctttaatgttaaaatagatatcaacaaccattcaaatcaatttctatatcaatgcagttcgtaatactatatataatataaagcccctacactcgtaacgtttttttttttttttggcaagtacgtatattcaattaaaaatcaaactatatattaacttaataggataaggatcaccacctgtccaaatcatttcattgtctaagtaaatttgaccaaatcatgaaccattggcctctctcaactcatccatgtccattaaaacatgacctaacttatttaagaaaaaaaaaaataaataaataatagtttgatcataagtaaagtaactcccatgtacgtaaatccaaccgtaacaatttgtttcatctattactttattttattttttaaaaaaaagaacataaaattatatatgaagggataaaaaagaaaattgaagtaaaatttatagtgggcggcgtacgtgtccgtggtttgaaagttcagtaatatatgatgatccccaaatcgagcaaatgcgcatgtaattatatatttatgcaagttgatcaatatatatatgttatagaagcaatcactatcattattatacctcatcatcacccaattttataataaaattgttcatgtatatctgtttatatgtatatggtttggtgtaaaattcactgtataatcaatattgttaaaaataaaagctcgtgatcgtaagttgtttattaaaagaaggaaaacaatgaaaactgtggacttgtttgatgtttaaaatataaatgattcatcaacaattgtctacatatgcatgattttgtattaaactgtaaagtcaatgtcaatttgtcaacatcaaagtgggacttgtttaaaagttgaaacttataaccaatgcttgctttgtgtgatttgtcttattagcatactttatacttttctcttttgtgtgtgaattttgtttttttcatggcaattaggtattttattaatttattaataccaactgctccaaaagtattgatatttcggaatatttacaaatagtatctgttttgacagggctaccgtagttttactttattaatattgtattttaaagggagattgatgtaatacactattttttttttatttatattttgatgaattttttttatataaattttcattttttttttaagaaaaacaatttcacgttattatttttttagcaaaa

SEQ ID NO: 237812 - DNA, 933 bp, Cannabis indica
gaaaccacttattcaatttcttttttctggtaaagtcattcaccagttcttggagatgttactgtttcgcgaaatcgagagactcgaaactacccaatttgcgactaagtcattgtttaccgagtttttcaaaaactaagtatttaaatgtaagagccaataattatgactcaaagataaattgataagaatactgaaggtttttttacgtggttgagacgtcaattagtcttagtctactagtcaatattattaagataggctaggaaagtcttagggattacagaaagtatgaacactctatatttacttgagtaaatgagccaagaattccaaaaattttgcatgtaggtttgatgcggtatttatagaagtatatagattatactagttacaatttttctctctgatggagagttacaaatataaaattaaatttaggcttatctcctgaagcccagtccatggggcgccttgtgtataccaatgtacattccccaacacgatgctagttgtcaaaatcatgtcctatatttgtgggcaattgttgacacattaattgcttcattatcaattacctttattccttatttagtgagatatgatcttccatccaagattgtaggaaggcaatcccttatcttgtccgatctattaataaataggtaactatattgggcttctggatgcatactgaaggcttcttccagctatgttgttacatgttttccagattttgaccatactggatggaaccatgcctggtagagttaatcattatttacccgaaaggatcaatgatttatggattcagcctagtgacattgttttggcccattgttgggccttggatatatgagctatatttattatttggatttcatgtgtcccttgccaaaaatacgggtactatttacgcacaagcttttgaaa

SEQ ID NO: 237813 - DNA, 759 bp, Cannabis indica
aaaaaattaaaaacaaaaacaattttctagaacatatatttagaaaatatttttatttttctaattaaaaataaaaattaattaaaaagtattctcaaatgtactctaaatttataaattttatttacaagtgtttaaattaatttttttttgttgaataatacagtatgtgtaaattattatcaaactatatataaaagtaaatgaaattataaaatagtcaaaaaagatttatattttatagtacttagtttatatacaaaaaaaaaaaaaatagttactttatatatagcaatttttctcttttaatgacaagtttactacacattatttaaaattggaacaaagtaatgaagaaatataacggaataaataaagaataatcggaatcaatatttgtaatatgttttccttcaaaaaaaaaatatttgtaatatgttgtttactaaaattgtttagaaatggaatgatagtgatttatcttgtttactttatcagcaaacgtaatcagaatgtttaaattgactaaattacccttttgagttaaactataatatatggtagttattttgtaagacatataaaattgtcattataaatttaatattaaaaataaaataaaaataaataaatttcattacccttaatgacattccttacaaaattgatggaaaagttctccttttttttttcttatttaattaatttctctatttcttaaatttaataaattaattaaacaaatgtaaatgaaaaatt

SEQ ID NO: 237814 - DNA, 654 bp, Cannabis indica
agagtatatggtgaattcttggaggctcctagcacatataatccatctctaactggtcctttcagaagaactgtcccagtggacttgtccttgacaaaacaacaactcttgtgaaattcaagaaagatatcattatcattagtgagtttagaaacactaactaaattctttttgatttgagggactttaaggacagaatttaaatgaaggactatagaggtgcaagaaggtaaagatgtagagccaacatgagtaattagaagctgcttaccatcacctatagcaacagcttcagtcccattgtaagtcgtggtagagttaagaggttcagacccagttgacacatgagccgtggcccctgtatcagcaaaccaaacatggtcatcaccaaaatcgggtaatatggtagaggaatatacctgaggttcattatccatgtccacttcagtaagatatgcacgcggattagcagctcctggtttgggtggaacccaagttttatcaaaacggtagtgccaaaccggtgcagagtggccaaatttcatacaaatttgacatattaatcgatcatgaggtggtatgtaggcacgacatttcctttggctgggattcttgaggagaactcagggtgatttcctcgaacagttggcgggt

SEQ ID NO: 237815 - DNA, 753 bp, Cannabis indica
aaattaaaataaaatacaaaagagctaacccagcatgcggatattagacagattttttcttttgttcacatcatcccaatagacttaaaattgtgtcatcttttcatttttgttatatttaattaaacttttaatatttaaacaccaatttaattaaataaatatatactaataattattttaaaaaaaattaaatattcatttttaatttctgacaatagaatgcctaattaataattaaactttttgttatcccaaactctgcacagagtgaagagacatctagcatggggatacgtgtagaacattatgaagcctagatggataattttaactccatggcccgaccagagaactttctacttaaaattttcaaggttagatctttagcagggataattcgggcagaacttgtgcatgattgcctgtgcagacttatattatcaaggaatgtcgagtctttcgagcagagtaattcgacataagaagacactacaacatttatggttattaggggcggaggattccgccggtaataatctccaagtccgctggtaaaagttaatagcggcggggcccgccggtaataatccgccggtaatgcctggtcgctaaaaataggtattagcagcggactgacacccccaccgctaataatagtgtcagacacataaactgacattattagtagcggcggactaatccgcctctaatacttttttttttatttttttattacatgttaatattaat

SEQ ID NO: 237816 - DNA, 905 bp, Cannabis indica
attagcttcgaagttttactttcacgtgtacactagtgtagttagcatttaacagtgatatttaattgacgcctcaaattaataaaaaaaaaaaaattaggggattttactaaaaaaaaaaggttaagtgtataaaaattaaaatatttaagaattttaccgccaactactctaaaaattaagggtgattattggatcacatccaatatttttaggcttatcgagatccgatccaattatatatcaaatgataaattttaccatccgatacgatcaaattgatttcagtcatccaatcgatccaacatccaatggatgttggattggattggttctattcattggatgtatctcatgtaaatctattaatttaattaatttgagtttatctaatattttaaaactaatatttattggatcttatcggatccatctaatattttagatccaatatctattggattgaattggacctatccaatccaaaaaaaaaaaaaattatagttaatttccatatatacatatattttttttttatgtataacaacatataatctaattactcattcaaagtaaataaaaatattcattaatttaattagatgttagatgtattggatttttgaactccccatccaacatccgatctgaatggatattcaaaaataacattcaatccaatccgatcacaatcgaatatctaatatttgacagtcgattataattagatcggtcagttgttattaaattagataaatttatgtacactcctactaaaaattataattaccagcaaatttcgacataagtccattcatacttatttggattgaatattcaaaccttagtcattaatacatgtagttagtcatagtctgtacaaactttggaaacagtctcattac

SEQ ID NO: 237817 - DNA, 539 bp, Cannabis indica
tattagtgtctagttactttttttagtgtcatagtgtaattagtataattaaatatcgaagtttcaaaataaaaaaaaaaaatttaaaacatattactaactacacttaataaaaaaaatatacctattacgaatgttcattaaactatggtccatgcctttcttgtggctttaatatttaatttaaggcatcatgctttatttttttgtaagacaaggacaaaagttaatttttttaaaaagaaaaaatcttttgtgggatttaaatattaatctctatcatttactaatttagattattcattatacttaaattattatgatatctataaatatcatagttgtagctaaaatgtatgtatatattttttgttgacccctcgttatcaagtttttaagttccattgttatatctatggacttaaaagtaatacttgaaaacggccttttaacattgtacagcagagatgtcttttccaaaagtaaattaatactaaagtatgtaactagtctgtatttttggtagatgactgagtcaa

SEQ ID NO: 237818 - DNA, 716 bp, Cannabis indica
acaacaaaaaacttccaaatcaacccaagttttaataaaaccaacaaaagttaaatgtaagcccaaaataaaaaagtctaaacagttaaataccacatatcgttttacataaaaattttacttaaaatataattcaatataatacaatataatacgacctaatacgacgttctaaacgagccctctataaaacttaaattataaataaaatcaataggtattgtagtttgaactggaaggagttgaagtgtatcctagtcgcgtgctaaagatgatggtcttgctaatgggaagtttgaattttgtgagtaggttcgtctattgtgatttgtacctccacatagggtgcactgcctacttgcacacatatttttctagtctatcaaacataaaaatagtcatcaagttttcaaaggtaactcatagtttttaaagttttgtgaagataaatatgtcttcttcaaaattattaatggacactaatttatcttttgcttgatttttattattactttttaaaaaactaattttttatgcccactaatatttatgttcgttgtcaagttaagagtgtggtaatctttgaaatgattttaaagcacaattagttcgtctagtctttttgaagtggcagacaaacaatagagtttgactttatattttactatttcataaaaaaagaaaaagaaaattctacactattctttatttgtttt

SEQ ID NO: 237819 - DNA, 1118 bp, Cannabis indica
tacaattttttcggatcccacacagggattcaactcatcttcttttgccaatcctggctcgatatcttcacggaccatcaataccggtaagtgggccgcgacattataacattgcctggcctcaccctgatttcccctcacggttcctattccagcctcctgggtggggaatttcagacacaagtgacggatggacgtaactgcgccaaagtctatcaggactggccggccaaggattgcgttataagcagttgggtagtccaccaccacaaacgtgcagtacttaaaagtactctggggtgagtcctgccacagggtgactggcaactgcacatttctcattgggataagtgtggttctgttgaatcccgtgagttgggaaccgcttggtgatagatctcggtccgtgaggcctatcgctgtgaaggcttcctgaaacaacaaattcacagaactcccattgtcaatcagtattctagccacgatcttgttggcaatgggagtctctataaccagagggtcatggtgaggaaaacgcaccatccttgcatcttcttccgtgaaagtaatggactgatccatgagtcggggcttttgagctggaagctgattgacttcccacacctcgttgtgtttaatggccccggcataacgctttaattctattcgagttgtccctccaatatggggcccaccaaagatcatagccactcttctgttgagtcttggtggcaggccaggggtctgctgagggattggtccttctgagggtacggttggtgcaaatgctccgagcgcacttcctggagtcccttggggccatggaccccctgccggaaccaggttgagatggctcagccggtttttgatccactcatagaggtgacccaatcgaatcaagttttcgatctcatcttcaagatttttgcactcattggtactgtgtccaatgtcattgtggtattcgcatcttttgttgggatcccttcaggaactatctctgtacagaggaggcggcctcctatagtgtgtatttttcctcatggcgaaaaacacacattcttgggtgtctgtcatcttcgtgtactgggtatattgggcagtataccctctttttt

SEQ ID NO: 237820 - DNA, 863 bp, Cannabis indica
gtaccgcggtgcctggagcttttcgaaaagtcattttccccgtgtaaagtcatgtcgtgatgccttggaggcacaattagcgtcgtagtgctagtaatggtcgtcacagcacctgacactctaaccaggtatttttttgcttcaatctctcttagtaaaatttgcataactttcacatacaaactccaaatgagttgtttcaggattcatcggaaagtagaaaaagagatcaaaaacttatatgctttgactttttccaaaatataatcagtttatagttaaatttaggcttaaagtttcagttttattttcttataaattttttctctattttatagatcaccatatttctgatatttgaccaatttatatattccaaatgtcgaaacctgaaactaaagaaaacaagtatagtattgttccaaaaactagcatttaagaagaaattagaaggtaaaaatattttgaacaataggttaaaaataacctaactaactctcccaaactaactccttacttgccctcgagtaagacaacactaaacacaaactaaaactaacacacaaacaattaagcctccatttttattcaaaaactgctctcaccatctgtagaattttaataaatttttcaaatagaatttcaactcaattactctaacaattattcttgcaaattctgttttgagagcttaataacatgaatggttgggaacatgttatacaataagatgaatccaagctttctaaaaagactgcatattagctctcctatagtgttaattctgggtgtgactacagttatatccaaatctataattagaattatatattaactactcacattgaattaatggaacttaa

SEQ ID NO: 237821 - DNA, 988 bp, Cannabis indica
gaatttttggaatgcaaaatttctgtagtagttcattgtaacatttagcttgaagtaattcagagttgttcttagtgtatttctttagttataattataaataactgaaccaatttcagaaatgatggagtttggtgaacttgcttaatttggtctatttgcagttttgtatttagtgaaaccaataattatcaattccaggttcttgtgatactttggatatttgttgatttggaaaattccaaacttgattttttggtaaatttgtcaaaaacatgtacaaaattggaggaaaaagtaattaacatctactaatttggagccctcaattcctttccaacatctattggaaatttgaatttgatgatgtttatttgggacctgtggtaattttttcttcaaaggaccacgatgagttttgttgttggttcaataaattttttattagagtcgttatcttcaactatagtcagtttttttattccctttattcaacaacgatttaacactcactggtgcaggtttagaatttttgtaaatgagcttcttcggtcacaactatttacataaaatttggaagaagaaaaaaagcagaaggagaaatcattgggtggagcttcaatgaaagttggagaacgtgggggcaattttttggagagaaaattgattttaatcatggagaaataattcaaaatgaaattgaaatgaaaaattaaaatgaaatttgaaaataaaatggaggacatgcatataaaatattggaaaatagttggagagttgtgtatgcaagaggtattttagtaaataaaataaaaagaagtataaaagttatataataaaaattacttttttgatttttcatgtaaatttttattattcattccttattgattttgcattttaccctctatgggggaaactaaccccttacataaatataaataaccatgtatgaatattgataatgagagacaaaaaaaaaaaaaaa

SEQ ID NO: 237822 - DNA, 2205 bp, Cannabis indica
tttatctccatgtggacttaagtgtgtagaggtggctacaaactctaaaaacttgagtgtttgaattgtcattggtgtatttgttgaatttgtgtatgtggggtgttactacttacgagattatttgcttggaaagtataaatagctattaagaaagtacttttaatgtaaatcgactatttatttttcttacgggagtatttttgctttgtttccctcgtgctactaaaaagttttagtttgtctatctcttgtttgtctatagatccaacaacagtttgaaagtacatgtaagaccacatattttcaaaaaattgtattgtagtttctttaatagatttgagtgttatatgagtaaattgagtctcaccagttcagtttgaataagagattataagagcactcttcagttaaaggactaaggttgttcacctttaaagaacttaagaaatacaattgtttttcagttgcgaatgacaatattggattctgaggatatggagaaggttaattgtttctttggttattagtgtatgttaggtaagaggaagaagtaagttaataaatattagaatgggttgggatgaggtgattgttttagtataaaatcttttataagacgaaagtgcttagataattaatttcaagacattattatgaaaccaattgcattagataaaattatattgtattcatggaattgtgagaagaaaatattagttatattattatttggatgaaaatatggataaattaacttattcaatcacacttactctttgacacgaaactatacatcttactgcttattttcatttttctaataattactaccaattgtataggagcactctgaacatgaagccacaaaacaaattatatgtttaattcaaacatggaacaggtagcagtacacactataatgatgatgatgatatctatattctatgaatattcactccacatatatgtctgtattctgaaaccgtttttcagtttgtagtaatcctataatatgaatcgagtaatatcactaacctaagacaaacaaagaacaagttgttgaactcaaaaattatacacacaaaaatcgagtaacatcactaacctaagtataaaatggtgcaagaagcagagctcaaaacaacaatggtatggctgttgtttttgcagctgggtttttgcatactgatttacacattttttttgtgttcttttatttttcttcgctctccatatatagatggctctctcttcttaatgattagatataatgaactttagtgtagcttttggaaatgaaatcatagtggagttggttgtacatgaagtctaccttatttgcttcatcaaatggtgataccataatagaagttcatgctcatacagttaaagtcataataaatggcaaaatatattgtattatgatgactcaattgcaactaatggaaccaaaaaatttcttattggataattttttattttaatttctcaataacgtaatttaatatatttataatttttagtttactttcttatgactttgagtagtcagtgtatagtttgaatgaagttaacatgtctaccaaaaagaaaattaaagattaaagtctattgtctttgcttaaatttaattgtctggactatgttatttttagtaacatgaattctttcataatttttagcaacatgagtggatcatcgtcaaacataagaaaacgtaattggtatgcaaatatttcaaaggagcaacgagaggcaatacgaaaagaaaaaaaaacgtgatgcttatacttccaagaaactttgtacggttagtttatttttctcttgtttagtgctcctttcctattaattttatatcaatttcttttaggttccaatttcagttttgtgtcatcaaatttaacttcaaatatcatttctccttctgtagaaacattaaaagatattgttactgttgataaatttgtggcatcaagtttaccttcaaaaattatatctccttctgtagtagcattaaaagatattattactactgttgacatattaccatcagcacctaactgttatttctgtcacgcaaaaaggtttcatcgtgaaccaaaaggtttttgttgtagcaatggagaagtttccttaactcctaatggttcatgtcaaaaactatacactttattcacatcttcatctgtagaggcaaaa

SEQ ID NO: 237823 - DNA, 1348 bp, Cannabis indica
tcaccttgtcgctaatgttttatccggacttgatgctgaatatctctctattgttgtgcagattgatgctagatctaacacaacctggcaggaactctaagaccttttgctaagcttcgacagtaagattgaaaggctccaaattcttaccctcaacaacaacaagactacaagttctttgccacaagctaatatggcttaagaccaacaacaatggtcggggtcgaggatttcagtcacaaaatgctggaactagcagtggtggccgtttttccaacagtcgaggaacatctggcagatttagaggaagaggacgtggccctggttctggttctggttcgagacctacttgccaagtctgtggcaagtatggtcacacagccgctatttgttacaatcggttcgacgaaagctacatgggatctgacccaaacaactctcacagccagaacaaagcagggcaaaccaacaacaatcacagtgcattcattgccacccctgaaattctcgaatcagatgcttggtttgccgatagcgaagcgagcaaccacataacatctgacccttcaaacctaactcagaaataagattacaatggttaggagtctgttgttgttggcaatggcagtaagcttcaaatctcacacattggtaatggtaaattgaacactaattctggcaactatttactgctcaaagacatgttacttgttcctaaaattgccaaaaaccttattagtgtatctaaacttgccactgataacaatgtgttgattgaattttactcaaatttttgtttggtgaaggacaaggtaacaaagaaggtgctgcttcacggagtgcttaaggacggattgtatcaattggattcaccctacaccaaatcaaatctttcacactagaagtccaaccttatttcagcctttaccattccagtcaattcaaatgtaactcagcctcaggctgatagctttttaatttccccaatagatgtgtcgcataggagattaggtcgcccctcaatcaaggttttaaaccatgttctagagtctgttgatgtaagtgtgtcaaaaaatgaaatgaaaaccttttgcgatgcttgtcaatatggtaaagcacatgctcttcctttccgttcatctaatactcgtgttaaatctgtgttggatcttatccataccgagttatggggccctgcacccattgcttctaacataaatcaccactattacatccactctgtggatgattatagtcgttatacctggctgtatcctctcaaactaaagtctgatgcccttcctgcattcatacaatttaaggctttagttgagaccaatttgacaag

SEQ ID NO: 237824 - DNA, 896 bp, Cannabis indica
gatgcaactcatgttcctcttcctatttagaaatccaagatgtcatcaataaacacgatcacacatctatccaggtagtccttgaatacccaattcataagatcaatgaatgtttttggggcattggtgtaataccttaagattatgaaaatggattagcaaatcctaactagttaatagtgtattattgtggaattatattattatataatttattatatgtggattaatgagatatgacatgttaagaccccgttggtgagccaggggcattttaataattttgaccgagaagggtaaaactgtgaatttaatttatttatgtgattatgaactatattattaaatagtatgcctattatgtcctttttcaggtgtgttctgacaagttggcgtagtatagtcacaaccaggtatttcgggcgaactgggtttgaggccaaaatacaattctgggttaaattatttgcattttatttatatgtgagaaatctgaaaattaattgaatatgtggtgtgtgatcaaagtgaccattttgtccttgaatgtttttacgtgtgagatatggccctaagagcaatttggtaaattagtatattttgtttatttgtaacaaaaggataattttaattgaagaaaaataatttttttctgtttctaacaccccaagaccgacgcctctctctctgcttagactcatcttcccaagtttgattttgttgagaaatagcttggattcaagcttggatcttggtggtgcttaggtttaatctttgattgaagcttgaggtagctcttacaactttaattcttgattttaaaagctaaaattgaagttgaatgttgtgattttgagcttttgaagttcttgaaatgcatgtatgatgatattggt

SEQ ID NO: 237825 - DNA, 1381 bp, Cannabis indica
agaaactcatttttctcggcggggtcgcgaggtgacacccgccgttggttcatcatcagagagagaggggacaactgcgtcttcgctgggggctgcacgagctcgcttgagcatgcttctaacagagtccccaacctgagtggactgtcgagtgaaatgcttcctggttccaacagaggaagtgggagaagactaagtggaagagtcattaatgaccagaccaggaggcctagtgcgaggaggactggaagtaggcagagcaattccttttcctttggcagtgtgggtgatggtggaggtagtcatgatcgagggtggaatggtggagggcaaagtctgggaaggaagggaagttgggatggtagtatgggatgaggtgatgatagtagtaccgggtggagaatgcacacatagaaattgattcacagcatgctgcagcctgtggtcaggcgaagagtgtcgaggaaagaattcctcaaaaggagtagcattggatattttaaaggggttctttttgaagtgagattgagccgaagctcgaagagtgtcacgatattctaaaatgggaggggagggaaagttgtcacaacgaagaagatacctggaacatcgattataggtatgatccatgaggccacagaagtagcaaaagtttgggagactctcgtacttaaagcttatccattttggttcatggatagaccgaaatcggattgtcattcccctacgcaaaggcttagtgatatcaagtaagacccgaatcctaagaaaaggaccagagttctcgagcagcgaaagaggatatatttcaataagatcacccaattcatccgctatgaattgagccagctggggacttctacgaccaaatggaataaggtgggcttgaatccagaagagggtatatcggatatttcaggggtgggggtaggggagacatcagggtgagtgaaaacgataaggaacttatcaaagtgctaaggctgttcctctaagacacggcggcgatccccatcacattggaaagttgccaaaaagatgccagaatggtattcagtgatttgggcagtgaaatgtggtcgaaatcgtggatgaggctttcttcttcagagagagcagtgagaatgttagggttggtggaagaggaagccattgaaggaggggggtgggttagggtgaaaagaatggacaaaggaggagaggatggcgatcgaaccagacacagagattaaatagacagaggatagagaagaagatgtagaaaatacctggagagagaaggtcgcctcgagggatgagggaagctttgaatcatcgcttcgattcctggaaaggctctctacagaggaggaggaggaatgattacccaggagttaatgtt

SEQ ID NO: 237826 - DNA, 790 bp, Cannabis indica
tgacacatttagtgacatgcacttttgtgtgcgtcactaaagagttaagagtgatttttagtgacgcgcacaactagactctaaacttacaatattaatctcttgtaatgtgtgtcactaaaaatataaagtgtcactaaagagtaatacccattattttctatttttttatttaaaatgttgacctatagagtcacgccaagcatgttgggatatgtgtattcagtcacgccatgcgtgtcactatatgttaagaaatttaaattattttaaataaatttaaatttatgatacagtgacacgcaaggcatattgggacatgtgtatgcagtcaccccaagcgtgtcactatatgttaaaaaaaagggctgaccagattttttttttattaaattaaatttatttatttaggtttggtatacaaaaggaaaaggatgaaaccctaaaacccaaatcacttttcatcttctaagtcacgagagctctctctgctctcttttccctcaccggcggtagccttctccagccgttctccaaccgtccatgcccaagaaaaacctcaagcttgctttctctttctcgtccctctcccctaatttatctctctctctcgctcgctccgctcgactccaccacaatgagacacttttgacgacttggccatctccacccctgcgatcctcctccatttctgcagttctgtctcgacagttcaaggtggcgccaaagttatttaatatgtataaatataaggtggcgatgagacaacatgaaaaagcttgaagaggca

SEQ ID NO: 237827 - DNA, 1565 bp, Cannabis indica
tcctttttgataaaacttttataacatggttccacgaaacaaagttttagtgttcttataatgtcttttactagggttttattttggtaaagtttttaataattaattaatctattattactaaactagtctattaaatcacatacgtgtcgtccctaaaaattagggcattacaacttggtatcaaagcaaccatggtttaaaaggtgctgaaaacttgtcgaatatgtacatttgttgtgaagatatgtcaactcatggtatagtaagtatttatattatttgctattgtgttacctgtctggactattataaagtatgttgggaatagtgacatagtgatgattgtgataaaaatgtgtttgtgacatagacatattgataatgatatttgttgaattctgaatggttggaagttctagattgtaggcgtgttaagatcatgtagcgatgatctagccgtgtgaactgcgagctagggctcgaggtagatggtgaggaagagcatcctcctctgcctcaaaactatgaacaaatgtttgctgccatgcaagagacatttaggcagcaaggagagcaaaatttgagacccaagagagtaaataggctcgtcctgcacatatacatgcatctcatgtagtcaaattgaatataggggatcgtatggaatcaatttatcagcagtttaggaaatgggttggagattgtatctgaaggtcataatttttaacaccatgacttgtaactcattcaggggcaatattgtatgagaagtattataatgatttcatttgtgtcacccaagcaaaagagtttacacggttagtttaggttagcatgactgtgactgaatatgctaccaagtttgacatattggccaattttgcttctaatgaagtgaccactgaaaaggcacaaaaagcaaattttattagaggcttggaagagtacattgccagagatgttattatggtagccaaaaaactagaggttgtgaagacctatcctcaaattatggatttagccctcactactgagggggctaaatacttgactcgtaaaagagtaatcagaggaaggatgcttggaagacactgtccaatgctggcatgagcaagagctccaatcccaatgatcaaaaaaggagaccaattgagtcatcggttatgggttcaaatagaaggtttcagggtaaccagggtttccgtcgaggtagaaacgaagccttgcagtcttaccccgaatgtccaagtgtaagagacgccatttgggtgtatgtcagtccaaagcctgcttctaatgtggagtagtaggccattggagaaacaaatgctcgtagttatagaagcctgagaccaagaaataaagtcttatggttcctactcaagtatttgctttgaccgaaatagatgtagagaatggtccttcaacagttataggtgagattttgttagtggtattatgtttaccatattgatttattcgggtgccacacattcatatatccctagtagaattattgaaaaattaagtagaccatgggatatcatgtctagtgggtttgg

SEQ ID NO: 237828 - DNA, 808 bp, Cannabis indica
ttgttatttaacaaaacagaaggtctaaagtctaatcgataatttttactaaaacacagggtccaaaaagtatttacccataaataattatgtatttatcaattataaataaattaaaataataataaaatttaaatataacagtgaatattataattttataattaaaattatttaaaaaaataaaattaaaactatacattactttatttataaagtatgacataaaaatttaagtatttatgagtaaatatttaaattataataattttaatagttatttgatataattatttgtaaaatattattaaaaaattatataaatataattgaagttatgagaaatatatagagtattgttatcagataccaatggtgtctaataccttttataagtgacaccattggttagcaatattttcctaaaagttattttcttaagttatatgagatctgctacttaattaaaccaataacgatatgacactaaagaaagtgatagacactaataatgacttttagcaattctcttttaataattggttcattaattataaaatagatgtgaaaaagtaaagtacgaattcaaacttgaatacaaaaagagaaaaaaatgggccaacaaaagtaaaatacgacacaaatccaaatacaacataaacatatgagtctacattgacacgacacgacccatatttttttaatagcacaacacaacatatttatattttttttataacacagacataactcatattttaaaagggaaatttcattatttgcccttaataatataacctatatcaaa

SEQ ID NO: 237829 - DNA, 532 bp, Cannabis indica
aaaaacggcgagaagcagaagagagaagatccactgataggaagttggagagaagatcttgattttatcttaatatattgtgtttctccaatatttaatgataaacagagataatacacatccaatttttgaaatctaaagaggggataaaaggataatgtatattgttagaatgaaaatttacttcttcaccttgtcataactcggttatcattgtctcccatgaaaaatttgtcaaactaaccatttgaaatactaaaatttgcaaaataactttatttaatttactctatgcaatcatgatgatcgtatagtgtaaattcatagtcgttttgcgactataatggtcatttatagtcgcacagtgtaattttgcgaccataagttattttgctaataaaaattttcataaagattatttttacaaaacacacggctcccattctattgcttgttttttttttttaacaaaatttctggaacaaaattctattgcttcattccaaaaggcacaacactaaaatgaactaga

SEQ ID NO: 237830 - DNA, 4353 bp, Cannabis indica
ttgaaggctgggggttggtgttgatcgccggtaaaacgtagactggcagcgtcgaaggaataagagcaggaaatcaatggtgcttaaagtttcttttctctctagaaactctgaggaaatttggttaaatgctaaaagtatccaaatgaagtaggaaggcaggattttataggccagaacaggcgtgagacagctgtgatcaaccaccatcgaacggttaggatggcaatcgattcgaattctacagatccaactgttggattaaaccctcatcaaggcggtagaaaacgtttgagtacccgtctgacacccatttaatgcgtcgtatcaatatatggacaagaaacgaatcgatgcttgcaaaaagtaaataactgcagtaatgatgatcattaatatatcaccacgcgcccaaagcacgtgccaggaagctgataaggcaaccggaggcatctaagcaagccttgttcactccatcaccaaacaaggcttggggggtaaatgttgcccctaattttgcccaaaatacgtggaccaaccggatgatgacacgtagatagaaagggtttagcatttaaataaatcagctaagtctctttaaccaaagggatcagctttagacatgcctcccggagaaggcatgtaagtctcacatgctcctggagagcaaggctacaacaaagcttctccgggaggtgtcagatcctatttgaacagtcatctcgcatttaatgccgcatgggaggaggcgtattgaaactgccatatgtcttaaagtctgacggcacaacccccactctgcagctactatgctatgattaatgagcctagtgacgactactttatgaggactcacatcagtcaaaaaggataaaggactacatccataaaacccctacaaagcctagggattagaccatgcatttcctatgatatattcattgggaatgtgtggctttactgataattacagaaagacatgtacctcaattctagggatcaccccacaaaaacactataaataccccccaaactcattaaagcaggggtcgagaattctgggtttcataagaactagaagaggaaaaatccaccaagaacattctctgtaataaatactatcataaatacacagactcgtggactaaggctcattaatgccccaaccacgtaaaaatctctctcttaattccttatagctctcttaattattattattatattggttgccgaaaacctcggtcaacatacataataagcaacaaaataaaacatattatagttattttatatctccaacaacacattaaaataaataaaatagcaaataataaattcaaatgaagaaaaaaattgtatgtatataaaaatgtttaattttattttaaattgtatgtgctaaaaaagttatatataaaaatagaatatacatttgatctattaagttttgaaatataatagtattatatgtactagacttttaaatgactatttccttaacactaaaatattgtttgtatataatttttaaaattttttctaaataaaagatggattggattggatacgggaacggttacttctacatgtcaatcaacatccaatctgcacaagtacagattttgaattttttaatccaatctaatccgcacaagtgcatatatgtgcacttagcatatttgattagattggattggatcgtgcggattggattagatcggttattttatgaacactcctaaatagatagatagtaacatatatgtacattgtaacaaaataagtttacgaaaagaatttctaaaagctcactatgttataaagatattttctatacaatattattttatgaattttgtttattgtaagtcaataacaaaatacaaatttaatgtgagtaagatgtaatgtattattaaattgtaacaaaagaaaatatatttattgtattttcaaaaatattaaattattgaaatttaaatttataaaaattaagtcataacccacaagattcaatataaatattaaattatttaaaaatatttaaatttaaaatattatttgtttaaagagaagagtcactcaaataaaaaatgaaaaatcacgaaaagacaaaatattttaaccaaaataaaaataaaatacaaaacaaaatataaaccaaaaaaattgcataacaaagtataaaataaatgtgggaaaaattaatatattgtatattttaaagtgtaataaaataaaatttaattattattttatttatttattttaaacaaaaaaactacacttttttttaaaaaaaaaagaagaagaatattgttggtgggattttaacttttggtgattgacatttagcttaataattaaactaaaaagtattttgttattaattatttactttaatttaaaaatatatcttgcaattaattaaaatacatgtctatattttttaaaattttttgagagaatcgattgcttactctaatttttataaggattcgcccgtgcgtagcacagatttttaacctagtattccaaataaagatagttgcggtgaacttatatatccgacttgtggaaaaaatttattcaaatgcagtattaattgaaattattttctgcttatattccacatatcaatgtggcgtgatatgattagttagcagtttcttatattattttattatattaaattgtgtgagattcaatagtgatttgtatcaataacaatgtaacttcttgtggtgcttagaactataaggtatacaataatttatcctaatcctaagttttattacccgaactaacaccaaaaccccaatgacttggaaaatacattaaagaatcatagactacacattgagacaaaaaaaaaaaaaaaattaaaaatgtagaaagttacctaaatttagcataagtacacagttttcagtattgtatttgaaattgtgtagcgctaaatgcaacatcacatgcattgagtgtcttccaatgcattgctaaaaaattcatgtacttcactatctacacttgttaatatacaatcttcaaatgaaaagatatgaccctaaagtaatctcttcaggggttccaaataattatagttttgcttgaaggttttggtctcttcaaaagatgtttaagcctcatatttgttgcagctgaattggatatctcaataaagttataaatagttggtttggttttagcatgcgtctgtactaagtccttagaccaaagatactaggtacataaaagtatttatattacctggtcattaaccgaattgttgtcaacaaatcccaaatcactaaataaatttttgcaaattagcaagatccattccatagcttgaagcaggccaatcaaaaaagctttactaacttcatttcaagaactaggcaaactcgactgcagttgaaactaagtgcatcttttatctttaaataacatcttaaaaggacaataagatctaagaatttgatgcccattctaataaactgaaccataacaaagatgataagtaacatagattactcctacgtgttgaaaattttgacgtcttgcaaaagtcacgcagctatggagccatatcttctaacttcccagtcactaagttctgcatttggggttcttttcacttcttcagcatcctcatcaacttactctgccacttgctccacctaaatatctcatccgtggattgatttgtttcaactttatcagttgtttaatcaattcccttaaaagttctttgatttgtttcaacttcgtcttctgcttcatcaaaccccttagaagtgatatcatttgtttcgacttcatctgttatccgatcaatttccttaagatttttttctgaggtacctgcttgaggttttgatcccataatgaagagttgaatactaggatgttggtaagtgtcatccatctgcatgaaatgaagtaattagtgcatagtttgaagagttatgatcaagccaaatggcaagctatctttttctctgctaaagcaagatcataagaccaagaagcacattagacctaaaaataagttggccccaaaactattgaagctggaacaaaaactgtaacatttaaaagaaagctcgcacattcactaatgcagtggtaggatttggacaagcactagtaagatataagttgaggttattcatcatttattcaagaaaaaaaaattataagacctaccttagaatttggaactattttcacctcaaaattctctttccacatgctaagcatttgttcatggacactagtagaacggatttcgtagcccaccttggataaaaataaaagaaaagtattagtcactctgacaaaaaaaaa

SEQ ID NO: 237831 - DNA, 731 bp, Cannabis indica
tcgtgagctcattgggcaaagctttaggaatttttaagaatttcagcttttgccctcttggtaaagtagtctacaacgactacaatgaactgcacccctccttttccctttagaagttgaccaattaggtctatcccccgcactgtgaaaagccaaggagactgcatcatcgtgagctcattgggcaaagctcgaggaatttttaagaatatctagcacttgtcacattttttgacatagtccatcgagtcttcaatcatttttggtcaaaagtacccctgttagagtatctttttggataggctttggcccccagcatggtttctgtataagccctcatgcattcgctcggcctcagccttggcgacacaccttaagagtggcattgagaagctccatctgtacataactccatctaggattagatacctagcagcctttcttcttatgttttttgtctcattcttgctttcaagcaaggctccagtttgaaggtaagctacaataaatgtcatccatgttagactgtcatctaacatgtcaacttcttcagggatggtaatgcttggttccttaaagaactgtattggcactaggtttgccttgtcaaaaattgtgctgcttgccaaacgggaaagtgcatctgctgtacattctgttctctagcaatctacctgattgtgtagcctttgagctgacttgaaagtcttagatcttgctcaagtaggcca

SEQ ID NO: 237832 - DNA, 2681 bp, Cannabis indica
actaaattagtaacaacttgtatgtaaatattatgttttagttacaagtaatctttgtaatgactaaaagttacatttagttacaaaaaatttatattatgactaaaaaattatcgctaaataaataattggcctattttttatatataacgcaaggattttaccttatagcatcttatgatatataaagaagaagaaaaaaatgacccaatataatagatattttgctattgtttttttctatctatataaaaatatatatagttgtatttaattatagataagagatttaaatgaatagatttggattgatgtatagactgtggtgtgcctcatgatctcattcaaactatataagccaaccaatttggttgaattgaataaattcaatcatttactaaaacttagagatatgttcaattatatttggagtggatatatatatataaaataataaagtatataagtgtaattgattgtttgaaattaaatcatgtgttcgacatagtgtactattaataaaaaaaatccaaaaattattgaacatttgctatatataagagcttaccaaattatttataataaatagaaaaagaaaccaaacagcaataaaagtttaataaattaataaaaataatttttgttcagtgcaatagtaaactgcactcacaaaaatgatatattttttatagtctgtatataaaatataaagtatgttataggtttctaaaccagatatatcacaatataaagtatatgatttttgtgactaatatttttaattataaatttattagtcgcaacatagaaacgataatatataattaattaaaaaaatatttttaaatcaaaaattttattgtaactaatagtaaaattcaatatagtgagatttgattattggatgtaaaagtttcaattgaatgagattttagaccattaatctcatatctatatattgacattattattaaaaattcatcacaaaaaatggtaaataatatatcactataacttatcatgatataagtagccattaattaattaattaagcctaactaactctaaccataaaaactgcaaaatattattatttaatatatggcgacattattaattggtatatacatacataatattaattattattattattattattattatttatttatttaattttatcaagtagggaattgatatatttgagaacatgaggaagagtttaccaaagggaaaaaagaacgtgatcactaaaagattagatgcttatcaacccattacgtcacacatccaaataaatttaattaatttaattaagaaaaaaccaaagtgaaaattatatatatataaattaatgttgtggaaacacatgagaccacatggatttatattgacccatatctaattaatcataattatttcccaatattaattaatcatcattatcagaccgttaacaacataatagtcaaaattatgggatcatgttcttaattaattaattaattaaaatgattttatttcaattacgaaactaaatatatatatttaacatgtgaaactgatatttttaagtaaacacaaaaaccatatcaattacaatcttttgaatttattttatttatgatattaatgttcctatttatactaagtaggattttatgtctttataactcataattaattatataatatattattatgtattacttaccctttaaattgatgcctttgactgtgagaccaagatgcattttgactctacaaatttttgtcctcttatagttttgtttttctcttaggaaatcaaaatagaataattagctacattaattatatatttatgtatataatatttgggatatagtgtgttttgtaatttgtgatcactcaacattaaatattagtatttttttatttgaattaattacatttcaatactttgtaattttcacattgcatatatgttcaaattacaaattcaatttttgactataattaatagagtttatactattttcaaaccattaggggtttctttatttatacatatattactttctaaaatttaattaaaatatttttcaatgtaatctcatcaaaattaatacctgtcaaaattttcactcataaaatttaatatcaataatattaatttgaccgaaaatcacaattttcaatttttacatgcatataaacttcataacataactttttacacatatattatttaatatacgatatcaataaatgaatttataaataatttttctataaattctcgcacttcacttcaatttttacagattaatttttttattatcaatgaataccttagaactactaaagtttagaccatatattttgtatacattgttgctttttaactgtattttttttctattttttgttctttcattcaatgtattattattatatatatgattaacattaacatctccaaactcctaattaatctaccaaacatgattgttttttgtttttagttttttattttttattttttatttttattttttaatttctagtgttttttaggttccacgttgtacctaaattttagtaggtaatacttgttgatttaatttctatttcctaaccaccattgattcttctataagaacttctttaaaatccaacacatacatgatccaaca

SEQ ID NO: 237833 - DNA, 829 bp, Cannabis indica
tctctctctctctctctcatctcgatctccctctctctcgtctctcttgcctccacccacccacccatcgtctccctctctctctcatctcgcttcatctctccctctctctcttgccgttcaccgcctcttcctccactggttaccgtaggtggtgtctccaaaaatatatattaataataatttatatatttatatttttattacgtatatataccgtatatataatattaatttttatatatttaatatatattgaatatatataattacaagatatatatttatacctatttatttaattaatagatagttagatgaattaattaattatttttaaattgggtattaaaaaatatttcatttagattaattatttagtttttgatttagatatttggaaaaatatttagtttagattatttgttgttacgtaatataaaaaatgatttgaattatttgttgttaggtaataaaaaatattttttttagattatattaattgtttaattattaaaaaaataagtttttattaattatttatctattattttaattttcttttaagttttattaaattgtgaaggaaacttttttgtttcaattatttatttttatttaaattgttattgacactatttttatgtacatatatattattgattgtgctagtcattgttaaacttcgttgagcttctcttccttttttggcaaactttcaagagtggctccttattattattattagtaatatatatttatttttaattagtacatacatatttatatataaatattgatattagttgtaaaatttagaattcaatca

SEQ ID NO: 237834 - DNA, 635 bp, Cannabis indica
ccagtggaatgcactcatttaatataaaaagaaataaaataaagtgattgttaaagaggtcaagacatagctatatatttaggtcacaatttttggcatgacacgaaactagtacgagttcgagtaccatgaataaaacatggtataagaaaatagagatttggctctctagcacaatcaatacaaaaatatgaatacattagtgttaacgcagattttttttagctaaaatattagcctttatgtaataaatatataatttattatatagcaattaattattaaataaagaatatataacaaggagattttaacgtggttttaaagtttaactcttcatagtttacgagtcttattacggataaatatctttgaatacaaaatataatggtgtaatttagcaatagtatctttcttttctctctaaaattggccatcatttttaccctgaattttgtccttatttatagatgtatgggatgacagttattcccttgggatctactcattagtaatcgttcataaaacgtggacattctgcacgttttatcattgtgcacataagataatattaaataaccgtttaaccattctttctctatatctgttaacaattatgttgattttattagatt

SEQ ID NO: 237835 - DNA, 608 bp, Cannabis indica
gtagtgaggttgggacttatgttttagcaaaaaatttagagttgttggtggctgatgtgttacctaaatttaacactatgatgttgagaattggcattgtagtacaaatgcccttttgtgacgagtttggtgatggtctagaccctgaaggttattttagtggtaacgatgatgtaagcgacaactaagatatagaggtccctattgtagctttaaaccttcctctattatcatacaaaatacataagaaacaacacgtagaagaagaccccatagtgagaattatcaaacacttgatactagtagtaattgctggttttatggtatgcagcaattatcattgtacctgattatcattgtacctatagaggcatgttggaattttctcatttttgtatcaagcaaagttattcttgcacaaactggtaagcctttcctcctgtgatgggttaaggtgagtctgataccccaaaatagatgtgagttagaccttggtctatccattattgtggaaactcaaaaggggtttggagagtgactaattgttcttgctctatagcacgaaggttaattggtcaaatttggtagatttgacatattctttgaca

SEQ ID NO: 237836 - DNA, 1015 bp, Cannabis indica
ttatcagcatcataagtaactaaaaggttacttttaaaaacccacgataataataaacatgcactacaaaaaattttacttttagtcacaacaaaatttgtgacttaaaagtaaaaaagttgtgactaattataatttatcattcgttgtgattaaaagaatttaggatttaaattaaggaaagggggaatgtatactttattttctacataatataatatgttaacacaaatcgatacaaatttgtaattttcatagtattaaatatatttaaaataactctaagaaaattatatatttaaaataaaataatagcaataataactagtttggttaatagttaatacaagtaggattcaaattctaaagctttttttaagtaatatttatatatgtaagttagctagccatattaaagtaaaataaaatatcatttctaattacaaatatatattaaaataactcggtaaaaaatggatatacttttttagataaatattattttggaaccttgtgttttacaaaagttactaattggccttctgttttgttaaataatgacaaaatgaaccctgtatttttcaaaatggtacaaatagaaccctaaactgatttttcgtcaaaataaaatttaataataatctaatctaaatgtgttatgacaaaaaaatttatattttctgtatttattcgtgttaggaattatcttcaagttggttaaattaaaaagaaaagttgtaaaaaattaacctcaggatcctatttttactattttggaaaatatagagtccattttgtcatttaacaaaacaaattctaatgtaacttttaaaaaaataaagagtccaaaattgtattgaacttacttttttcaagggcaatgtgaccgactttatatgagttctcccatggtagtactaatgcttaattattaatgagttaatggtaattataaatttggaaataatgaaaactttcatttgtgaggtgggaaaaaaatatccaattataaatt

SEQ ID NO: 237837 - DNA, 3883 bp, Cannabis indica
ttaaatagagattctactgtataaccattataaagagaatttaattgtgaattgttttaattaatatatagtcgtctctaagttccaccccacatgcaaacgcagaatgacagctcgttcaaatggtacgtactcgatccaatcatgaaaatcacttttaataactattgtttctcctctctatttgtccttttaatgcaaaccacaaaaaacagtcccaccatcggtccacctcccttcattctaaaacatataaatatataaatatttatatgatgacttctttccaatcttactatatgctttaatggactgttgctatatatgatttttacacgatatatagacttggacttttttatgaaaattataggtaccaaaacaaataagacttttgaaacttagtaattaatgtacaacgtttttctagacaaatttatcgaatgtacgtatataaaattcacattttatggatttctttttataaatatatacaacaattttttttttactagatttttcactagtattttttcaaaaaataacgttattagtattatcacgttgattttctatattgacgtaaaaataacattattttgagaataacaaaaaaaaaaaactgttcatatttttataaaataaaaaataaaaaatgtaaaaatatattattatagtgtaaatttttcgcttaaaaatttaagagtagactcctataaaattaatacgtggatttaataggtcaaagaccccaatacaaaataggtaaattcaagagtagactcctataaaattaattaagttatttttcatttagactaatgaggatttaggctaatatagtaaatttgtacatttttttgaaataggtcaaagacctcactacgaaattggcaaatattggccgaatgggcccaaatagaggtaaactgaagtttttgtttagctctaatatcgtattagaatttgtaagatattgaaaaagcaattagcgatagagtagttcataaatcttctatatatagtattcattttccacgtatgtgaattgaaatcttgagtacattaaataggttatatattaaatttgcataataaatatatttaattacttcttaaacaagtggatacatgatatgaacattagatatattaatatagtagttgtttgtggcatactaatcaatagatcgcatattaattaatataaatatatctatatagatacactcattttgcatattacagcaactgacacagctgtgtgctatccattaagttatgaaagtgaggcgttaattattaatttaatgttattcatggaggtagaagagtagcattccttagtaatataagagaacattaatggcaatcaatataaataataaatatatcatatgatatgcctaacttcactcaaaaataaaaaattaatgaaaacactagcaactaaaaatatatacatgcatcaatttcatcaaattcaactatttttataccgagaaaaataattagaaaatcttgcatgaagataagatataaaatgtatatcatcataagccatggataaatatatagacagttcattattttcttagtatatataatacaatatatcccacaaacacagtaataaatagcaagattttattttctgctatgttattattattgttatatatataaatcatagctattagccaacacatgggcccacacaaaaaataacaaaaagagatgtattattatttattgggtacagagttgatatatgccaatcttcattatcatttatcaatattattacaaataaactatttatatatataaataaaaaaaattattttgtacatgttaccacaccttcatttccagccaaaatcaagtatttatctctcctagtcagcatggtgcattcaaatcccaaggtcttgcctaactcactctgcacctgattagccacatcatacctcgatttacttacatctcgacacgtggacagtccggatatcttgtcgagtaattggatggtgtagatgggtgtcgggttcatgagaagaagattgggtccaaatacttgagccctcccgcagtcgtaccgtggaacatgctgacgtgggtggtcactgccacggggacgatctcgtcagcaatctccgagaaaagcggactaaatctaagaaggtatggttctctacatgtagttccctcgggacacaccacaaggtcccctttacttaacagcttttccattttctttgaatcttggtcacggtttctagttaatcggacggttttgattggtgctatgatctcggagaatctacttagactgtaggtgactgcagtgaggtcatttttcaaagtgaaagctatgtaaagtgggtctaccaacgttctgtggttgcacacgtagacaattcctttgtgcttagagctgggattgagtgggccctcagtattgggcttattagttgtcaagcgaagcccactaaaggcgaggataggggatgagatgtcgtagggtagtaacatggcaacgaagattctagcaacagcaagggtaaatccaattgggccccacattagggcttgtagggtagcaagtgggctgggccttagagccaatctaccgtcgtggaagataagagcctttgggtatctctctcttggtaagatttgccagttctttttgtccgtttcactcacgaagtaaacttcctgtaattattttaagcaaaaaaaaaatgctgaaattaaaacccaaaaggctcaaaaaacaagtaaataaataaacaaaaagacagagaaccaactcaaaataaataaatgttttgtacatgagacacgaaatttaatgagttctgattaccatatggtacagtatacatacagggacgggacatataataaaggaagagttgaagagaatttaaatctattaatgtacgtaatgacagtacaactatatttctatttttttttccttgataactaactatatttctcctataatattttattcataatattgtgtcatatgaatttatgacacatgtaaatacactaaataattaatactgaaaagtttatttttagcacggtaaaaatttcaatgattacttaaaaggtgcgtagcttaataattattatacacgtgtatatatagagaaatgttaaaaggggttagtaatgcctattaacctcttatgtgttaatattgttattgtctaattaagtatcgggtctcatataatttaatataatagtttttagggagtatcgctaaccaatcacaacgcgacatgtcgagaaattgatgattgatataagtgaagatttgagaatatagttactggtaaatattaatttaatttaaaataattataaatttaaatatgtgaaagtgtacttaattatcaattaataaacataccttacaacttgaaagaagttgttggttagaaaaagtagtattgaagtcggtgatgcctatcatatcatgatgatcagaatcgacggttgcgatcaaattctcctccaagatattggaaggaacatatttggtatcatcttccatgagtcccaaaaagtagccatggaagaccttgagctctcgacctacaacacaatcaacacccaaatagtctctcaagaagctctcaaccatgacaacagggaaattggtcaacgcaacagtccttgaccctttttgaagcaactcaaacatctcaaaccctacatcctctaaataaaacttaggcaacacagccgtacctgccctaaaactctctttcttgatcccaaagaatgagatcatgaccatccatttcaacctcatctcttgacttacaagcagataaaaggatgaaagtaaaagaac

SEQ ID NO: 237838 - DNA, 1767 bp, Cannabis indica
tttttttttttgaagaaaatcaaattacaagtttttttcttttcttaaaaaaaaaattaaattaggagttattcatgtaataatccgctacagtcagatttattatttagagaatatttttggtttattcatattcggttatttacactttgcaaaatgggattgggtgagtgtagttgtaataatgaatagtttattgaaaacgtaagggtcacgacgtaaataagtggaaaatctggggttgatttcgtaaccgtaatatttatgtaaaacgctaattgtagagaggaggagtgagagtgcctcatagttagcataaagccataaaagcgaccccattgtccaacctgagcgagaaaaagaatatttaccaaaaacaaaaagaaaaaaaaagaaaaagaaaataataaaaaaaaaagaaaaaaaggaaactggctagggtttgactgaaattttttgcgaatcgcgtgcgaaaacccctctaacagagagtgagtggaatcgccaattccatcaactcggcttgtcagctcgccaaggatccatccatgcccactccgaaaatcccgcttgttagagagagaatgttcgtggaacgtagagggagagagaaaaaaataaaagatttttgagcttgtgggtttttgaacgttgcgatcggagggcccagacagggtttttgtcgaaattggagggatttttgattttccttgggttttgggctttttggtttattctacttttccctcattttctattgctggtgggtttttgtattcttctgggtgaattgggcttcttggtaggtttgaatccggtgtaattggcatgcaatctggtggtggagctgctggaggaggtcccagccggaatccgggaggtccggctggtcgggcaccatcgacatcttcggctgcatcgccttcttcttcgtcttctgccgtgtcgactccgcacttgggtttcgatgcaattcagcagcatcagcaacatcaacatcaacatcagcagataggttctaggcaggtaatggtttctgttaatcatttctatgaggatttggttaattggcatgtgagttgaggagtttggaggtctttgggtgatgggtaagagcgaattatttcactgatgactaaatttaagtgttcttgcaaatgtgcaagtggatttggttaattaatacaactttgtctgtagttaattagttagttgctaccttattttctttaacagtaaatttaggtaacctagtattcaaagtaggcatgtcttaatgctaacaagcattgaaagacttgcttacgtataataaaggtcatgacttgttgcacgcccaattcgtatcaagagagtttagcttcaatagtctggagtctgctgatggattctatctttaccgtattaattctgtatctacagctgagtttgacatttaatttttggcgatcccctacttctcttttctgtgttcaattgctgtaaattatgaaatattgataggttaaaagtactatttggaagctgttgaaaagcaatgtgattattcaggcctgactattgtttatgcttgttgtttacccagtttgttttggtctttgtatatctttactatagaaatgtttgatagcttaaacagagcaaaatgagttggttgttcaggtgtcattggggaaataagataaaagttgctctttgagaaaattattctcaacttggtccaatgcacttgtggtttctaatatagtagagttctctctctctctc

SEQ ID NO: 237839 - DNA, 1182 bp, Cannabis indica
cttgatattaattaattaattataatgggtaaatattattttgagtgttgtgttttatatttttttaaatggtaacaaaaagttcgatctttatgcatgttcaattttaatgtgagttgctatgtagattttagttgcgatttaggttgttccggttggttgttatgtgagttgctatatggatttaccgtaaaataaaaaaataaaaaataaaaaaaaactttaaagtaaatataaaaaaattccttgattatattaattaaaaaaaattaagcttaaattattaatttgtactattttaaaaaaatatatatataaaatctgtctaatgtcaaaatagatagtccaattattaatttttataaaatactatctaaaataatatttaactactaattaattatatttctcaaatatatacttttagtacaaaaatcacatgtaaatttaattagaggtaaaacatatttgattatttagtcacaatatattatcttttttgcaaaacggacaaattttatagttacaattctagctaactgttgagaataataaaagtatatctaattattgatatggatcatcatttaggatggtacaaattacaatataccttattatataaatatatatatatatatatatactaggtagcagagtatttgatcattgatcattgatatgaatcgtacctttgatatacaattaatcattaattcctacaaataataatcttaattagttaataattataagtaagattattaatcgcgttggatcccactgtgtactgcgtcagaaaacccccaaccaaggcccattcttgggtatataggatttcattatttctttgggatcgtatatagttaataattatatttatatatatattaagctacatatatatcacaaagaaattaaaatccactaattatatatagtcttgcaaaacaaacaaaacaaaaaaatggaaaatctatattgtgttacacgtacgtacaaacattggcatcatctattgtcgatgactaacagtttttcacaaactatagtataaatatattaagagcattgatattaggcacattagtgtggtgtctagcattttctcgacatgtcacgttgtaattggttaacgatactttctaaaagagattatgttaaactatgtgggactcgata

SEQ ID NO: 237840 - DNA, 935 bp, Cannabis indica
ctgttaccaccattgattttccaacaatcttcatggatttcccgaccaccaccacaatatctaaaccctacatcatacacaaaaaatgcaatgaaagctaaaaggcatatattaaagtgatgtatacttcaatgcaagctaaaagataacgtcaaaatccttaaaattgtcgccattagccaaccactgttctccaaaaactctaaacaactgtcagcttaaactctcacatacactctcatatcttatattaaattaatttttatagtgtatatgtgacatgagagataaaactagaagatttaaaagaaagatgggtgaaaattattatgtatagagaaaatatagccttaagagagatggtggcggtattttttcattgagagaaaagatggagaagaaagaagaaataggagtctcatatttgaaattaagatttcatagacctatgtcttcggttattttaaaataatctaagacataggcctccacgtgtatctgatatggggctagggtagtggagacttatgttttcggttaatttcaaaattaccgaagacatagaccttaggggtagcggagacctatgtttttggttatttcaaaataatagaagataaaggtattcataattatgttttcacttattttaaaataattgaagatataggtctgtgattttttgttctttttctccttacttttgtattcggatattatatttgtatcatataaaattgaagatagataccatatttttagtagtgtttctttggtagtgtcaatagattctatttttgtcgttgctcctttatgaacatatttaaatagactaggttaatgttacgtgcaatacacgtataattagtttttttttaattaagggattgataaggaaagtgggttagagaaaattttaaaagataatataagaa

SEQ ID NO: 237841 - DNA, 2035 bp, Cannabis indica
tacaattctttcttttttctcataattaattaatgaattttatttggtatatttcttcaataataaaattttaaatttattcatgtataaaagtaagtagataatttattttttgatttgttttgtatacacaaaaatatgttacgattgatagttaactacaagtttgatatgactatatataacaacacattttaatgttatatgttgactagaagtgagatacagtgatgagaatggttttaaaattacataataagttttttttataaatttatctattcgtatgacaactcacccataaaatttaaattataatttaataagattaaaatttaaaataatttattagttaattatcattaaataaaatttataatttattttataatataatttaaaaatatttaaatatcggagcctgttgtttactagttattattaaggtgtatttataatttggtgggttaatagtgagacagagaattaaactaagaaagaaaggcactcattctctgaccacagcgaggagagaacagcgaaccaaagtaaacccaaattgggtcgacaaagcgattaaactcaaattagttaagaaaggcaacacaccaaatttccatctctcagaaccctaatcgcccaaattcagatactccaacatggtaagctcgctcacatatcgcttttatatcttccccgattcgcctttttcttttgtgcaattaaattttagggttacagtattatttagttatgttacttttcttctctgtgaaattatgatatgaaattttctgattggtgcacttggttgttttttctaatttctgatgcaagagttttcagttttgattttccaacatcttcagtatcgattttgacattctatcattgatttttcgatcagtttagtttgatatgatcaattgaattttgtgaaatgtagtgtctccttatggcttggttggcgtcctttgctattggcaagtttataaataaggaacataatggtttttgcttatatatctgtttgtatattttatcgcgttagttctaagattttgaggtgaaccattgattaaagggttacacttcatactcagatcaatcttaaattttgtattgggatttagggagatgaatttgattacctgtctccttagttgggctattaaacttgtcaattcgaaattgtacccaatttcttagtttccatgtgccacgtgcatgcataaccaagaggataaataggcttattttagtcagatagcgcagatttctaaatttaagaagctgcttgttattttgcaacatcagattggctcttggcgttattgttgccactctaaattctgttaaatcttatgttggtctgatacttttttcctacctgtggcaagaaatcatgtatcccagtatacagtttttcctagagcctggatggagatgtgtgaaatccttcaataaggaaaattaaaccaatgtgcatttgcactacattgtatatttgccattaagatgtgaactctgcctcatgactttactagcacaagtttaaagacatgattaagtttatgaacaagcttagggaaccaaatcttttaaattctttatgtataaatttatgaagaaacatatggaagggtgtagtactgtagttataacagtctcacctagtttggcttggaatcagtcctattcttgtagctgggacctaaaacagtaagtatgaaagttttattgaatgagagggaacattgaatagcaagtataaactataatatgcatatacatgtgtatgtccgtgtatcaagtttggttacgcatatgcacaagagctctcatatcatcgagttctcatagcagactttctttttttttactagtaatttgttcattaacaagtttgttgtgttggttcataagtttcttcgtttatgcatgaagtgagcatagttcttctggtatgatgttattaaatcatgctatccatctctgtttttgtgcatggtgttatgggattctctctctctct

SEQ ID NO: 237842 - DNA, 757 bp, Cannabis indica
ataagaaatcataatattatccgatattaaacaaccttgaagaaacgcactttgagtgtccgatataattgaaggcataaaaactttgagttgattagcaatgacctttgaaacaatcttatagagaatgttacaaagagaaataggtcttaagtctcccatgtccattggttgtttcttcttaggaattaacactaaattagtgttatttaaacctctaggaagctgccccatttgaaagaaatcccgaaccaaagtaattacatcactactcaaaaccgagcagcatttttgaaaaaatgttggtgttattctgtcaggtcccggagccttgttagggtgcatctgacacaaagccttgcaaacctcttcatccttgaccggttgtaccaagttgacattttggtcagctgaaactcgattatccacaacactcgtaacttccagccaagaattagttgaagaagaaaaaagtgcaaaaaaataatcaaccataacatgaggcaaacctgaactccaatcaacccaattaccattattatctttatgtttagcaataaagtcattatgacgttgattagtagcataagcatgaaaatatttactattattatcaccttcttggagccacaattgcttcgatctttgacgccaaaaaacttctcattgtacataagcttcaaccaactccttcttagcttgtttatacttggtaaccgaagcctcatcgcgccccaatttccactgttgctcttca

SEQ ID NO: 237843 - DNA, 706 bp, Cannabis indica
taagtacgattgactatacactatactctagtatgcgtgattttaattttgattacatatgtggacaaacacgtagtaaatgtgctgtgtataatttgattatacatgactgaactaatatgtaagaacatctatcactaatatgtcatttaccatgaaagaattattcatatcataacaatgatcattggtagatctatttgaatcctgagtattcatgaactcctagttgtgttcattagattctttgattcactcgttaaagtttctcaaaaaagataattcttataatttttgttttaggaatctaataacatgagtaattggaaacatgatatgcaataatagaattcaaaatttcctaacaactcaaatattagtttccttatagtgttaattctaagagtgataacagttggatccaaatatgtaatgagttatagattaactattcacattaaattaatattacataaggaattcaagagataattagaagggtgaaataatatttttgaccaactctaattataagctaataattagaggacaatctacttgtaatgattatatcaatggactactagtaagaattctataaatataattctatattatttcaatttcatatttatagtagagtaataattgaattaatacaccagattattttattgatgaggctcgtaatcaagtattaatttat

SEQ ID NO: 237844 - DNA, 1276 bp, Cannabis indica
ttatgtcccaggtcacaggtctcgatccaggtccaggtccaagtcctagtattgattttggtttgagtttgggtcctgttacagtcccaggtctgcgttcctatcccagtgctggttagattctgtgttcggaatcaggtctggatctcgattttggtccgggtctgggttcgggtcctagattcaaacactaactacgggtatggtcgaagcctcaagtcctgattaggatctcggtcttggatccctatcttgttccaattcgggtaccgggtcccgggccccgggccgagtcctaagtttgggtttgggttcgggtttggggttgggtcccggtagttaggtcctaggttctgggtccaagggcaggttctatgtcatgagtctgaggtcaagtttctggtctcggtcccgattctggggcctagtttcgtgtccaagtcccccatctaagtcaagatccctggtttaggtctgggtctaagtttgggtttggggcccaagtccccccatctaggtcacggttcggttctcaagtcccaggtccgagtcttgggtcccaggtctcgggtcccaatcccaattctagttctagtcccaatccaggtttagggctcagtcctagtctcggtctgggtccaatcttgatctcggtctgcgtccgattcccaggtttgagtccgctgatttctggtacgagtccggctctaggtctgagtttgagtccgggtctaggtctgggttggggtttcggtccgggtctgggtctaggtccgagtcttggtttgggtctagttttgggtctaggtttgggtctgggttctggtacgggtctaggttttggtccaggtcctgagtcacgagtcctgggttccaggttttaggtcacaggtcctggcgcaagtctgggtccaggttcgggtttgggttcgtgtatcgacgatccctagtctaggtttgggtccatgtttggttctgcgtctagatcttgttctgggttgaggtccaattcctgttccaaggtcctgatttcgggtctcgggtccgagtttggttttggatcctggtctagaaatggttccaggttggggtcttggtacgatttgaagatccagacactgactacgggttaggtccaagccgtgggtcgtgggtcaagatctggatcccaatcttgggtcccagtatcgttctgattcagatcttgggtcgcagtctgggtctatgtttgtgtttgtgttcgtgtctgggtttgggaccgagcactactacaaat

SEQ ID NO: 237845 - DNA, 955 bp, Cannabis indica
cttggggattttaacgacatactctctaaagatgaaagaataggagacaaggcaagaattagcacctctacggccttcttagagtgtgttaatgactgtcaaatctcagacattaagagcagcggctgtttttttacttggagtaataagcaacaagcaagtgatagaatctactccaagattgatcgagtgctagctaatcaagcttggttagattttttcacaagagctgaagctctctttcttaatgagggaacttttgaccatactccagttgtgttgaatatatacccggctgccccgggtggaaagaagccatttaaatactttcgtatgtggtcctctcatcccagctatcatacggaagtcaagaaaatatgggaagggaagataagtggttcaaaaatgttccaagtggtctcaaagttgaaaatcttgaagaacttcttcagggatctcaatagagagcactactcggatatacaagcagctgagaggaaggctaagcaggatctagaggacatccaagggcttcttcaccaaaatgtgcttgatgttgaacaagaaaaataaataagggagcgttatgtgaaaatccgaaaagattactgctcttttctacagcagaaatctcgaataagttggctaaaggaaggggatgaaaattcagctctttttcattcaagcatcagggaaagaaggaattgtaataacattctgtcaatttgtgatggtacaggccgaagactggaggaacctgaagagatcgccaaagccttcctgatgttttatcaaaaactgctgggaagcaaagtagtagctagaagatctgtgaataccatgataattacacagggaccgtgtgtgactgatatgcactcccagattttgttggctccctactccatggaagatgtcaaaaaagctgtgttcagtattcctgcatcaaaagctc

SEQ ID NO: 237846 - DNA, 668 bp, Cannabis indica
tatttttgtaaatttcccaatataaatttaggcataacacggaatcagtaaggcaagccttatgcctagggcccacctacctaactcaggagcccaaaaataatttgtccccttttaaacttatacattttcttttactgattttgaaatatactatatttttctctaaataatagtccaaattataataatcataattatttttctatatgattgtacgtaattattattgaaaaaaaatatataaaaactataaaatacacatatttttattttaatttttacttttcttttattactctttaatttatactcagatttataagtcatattctcattatgtgcgttacagactctaattttgataagttatgtgaaattatatttggtattttgattataaaaaagagtatttatcaattaaaattattttacagttatattttattattgtgtaataaaaaatgatagttcttaacttatcctttttaggttttcaggttcgggttttagaatcttgggaccgaacccgcccatatgtagactgggttttttgagttttgggttcgggtgggtgaggtttcaagtgggttggggttgggtttcgggttgggctggttttttttcttgaaaaatatgactttttaacatttttgcataaaagtaca

SEQ ID NO: 237847 - DNA, 861 bp, Cannabis indica
aatggaaactaacacgtattatattcgattccttttatatccatacatcaacccctttgcgtagtactgttccacgctgctttgctttgctgcctacaaaaagtttcaaatttgttttttcgtagcactttttaaacactttttaccttttttgagtagaaattttcatattttgaagtatgctgaatgttcattatagttattgaatttgatttagattcagcttaagcgaattgggtattggttgattcgctccaaaggtacgtctatgttcattttgatgcttacaaattaaaattaccagtttatagtttatagtttttttttttgggaaatggataccagttatagtttaatgggcatgtttcgattctgtagctcgtttctggaaatgatttgttttgagttgaatattgaggtgtcaacttagatgtgaggttggaatccgggcacttgggtatatataactaataatacaagaagaggtttgataaggtaggagtcatgtgattcaaatcaaagttagtattggaggattcaggtgattttcattgttctatctagacaattatattatttggccactcattttcatgtcatttattttaaactgcagagtgcagttgtgtgtcaaccttagctgtagctgttttagaaacaagaaaataaacgtatgatttttattcccagaaataaagaataagaagcagatttgcatgggtaattaggctcgattgtggccttatggttaaggaagtagggataggtgagtatatggtataaggtacattggatttcatcataggtgagtgtatggtataaggtgcatggagttccatctcaaaactaattggtaatgag

SEQ ID NO: 237848 - DNA, 956 bp, Cannabis indica
aactaaataacaatgatcaacaaccaaaataagaacgcattgaaaaaattagaaagaacaaacaccaaaacaccaaacataacctaaaaacccaaccgatcattccaaaaaaaacaataaacacaaaaaacccagccgatcatggaaaatcatcaagaaaacaaaaaaaaaaaatcaacaaacatcacaataccgaactataatcactaaaactaaagacattacaaaaaaaagaaataatgaacaactgaaaacttacctcacttaaacaagtaactgagctccaaaatgaccacaaccaaataacccacccacgacagcaccgatcgaagcttgaaaaaatagcaacaatggcagcactgtcgaagcttgaagacgaagaacaagaaaaatatgaaggaaaagaataaaccctaagctgaaactaaggggaagcgaagagaagctgagagagagtaaaagtgagagaaaacctcttgctcagaatatgaaatgacaatgggattgattgaactgtaagaaacaatgagtacaaagctaagctattccatgcaaatgctatattagctgtagcttaatttttttttttaaaaaaaagaataaaatatgggaattgggccaaatataacaaatatatggctttcataaaacccataaaaaggaacacaaaacaaaaagcccatatgacaaaggctttatttaaaaatgccataaaaaaataaacagtaaaataaagggttaatttcacaaatgcacaaaaacaacaaaaatacggtttcacggaattttaaatatttttacgatttttttgattttatttacataaaatacggtctttttatgttgaaattttgttcatttgttgttaattttttgttatatgtatgttattttttgttgtttttttattgttattttgatgttattttcatgttacttttatgttgttttcttgt

SEQ ID NO: 237849 - DNA, 571 bp, Cannabis indica
tcctttaaaaatgcatacatttgttgttgaatctgttattgaattgaaagttgtgattttgtatgttatttgggataaattgtgcaataaaactctgggaagaatatgggtttcaagccatagatgttttctggttttgtatgtattgtgcgatattgtgcgattttatgtgcgatataatacgagtctgtatagggtttgtgtgttttagattttttagtgatatttgtgcgattttcgagcgatattatatgagtaagtaaagttttttgggttttgggtttttttatgtgaaatttgtgcgatttttgagcgatattatgtgagtcagttaagttttttgggttttgggttttttatgcgatattgagcgatattgtgtgaccttttatgcgattttagtgctgtaagcattgttagaattagaaatgatatttttggcgacttctatgcgagtactatgcgattattgtacaatgtttactaggcagtttgcaattgaagcctataaatttattgttgtggttaagcgattttaagtgatgtttgtgcgacatatgttggatttttg

SEQ ID NO: 237850 - DNA, 3021 bp, Cannabis indica
tcttcttcgtctgtcttcttcattttcttcatttccactgtaaaaccgattcacccccaacctgctcccatattgtcaaccaaccaccaaaactcaccacccaccctcttgatctctcagccgcaccatctcaatcttaaacatccatctccttctccgaaaaccactccgagccaccagttgcacctcaaccatgcccaagcgtccaagcccataaattctctctccgcctacgtctcatccctctcccctccggcctacaacaaaaattatgtcgtctttccccttcggcctaaaccctaaatcccagatttcactctctcctcttccattgaccacaaccgagatgccaccaccacccaaatttcttgagagagagaagtgaggttgttgtatattgaagaaaagaattagggttaattagagtttggtgttgtgtagggttaattagggtttgtatattgaagaaaagaatttgggttttgggttgacattttggggtggcattttgggttgatcgtggtcgacgctttgggttagacggtggtcgaagggggtcttagggagagagagagtggttatggtggtggtggtgctggtttggggttgggggttggtggtgggtttctggcagtgagaagaagaagaagacgaagaagacgaagaagaaaagaaagaaaaattaaaaaaaaaatcatttttaaataacttatttatttatttatttattttttatttttaaattaaaataataatttggaccaataatattttgacacatgataatttaaaaaaagaaaactgctcaattaaaattaggactaacggacaaataaaaaatgtgacattgaggactattaccgctatttttggtttttggaggttggagactaatctgcatcaaagagacctttttagggacttttgccgcaaatttctattttttatataatgttttttattttactctattttctagtcgtcttccttatatatatttaattgatgctacatctgattatgtataaatattgttcacgggtgtgcttaaaagaatatttattatataataatatatatactattcatgttgtgcctatacagtagacatgttcacgggccccttaatattatgtgtatagctataattcagaagaaaaaattagtgataattaattaatagtttctgcaccatcaatatcagttatatatatactctaaaaattcctcaaattaaacattcatgaactcaactaaaccattactaaaaagttacttgttagagcaacttattttcatgaaatgaatatatattaataaagatgaaaactctctaactaattaaccttagttatcgccatgcagtacaatagagtagcaaagtacgtagataataacattagaaaccatttttttaattacaacaaaatcatgaacttattactgattaagaagttaattataaattcacaaattccacaaacacatcgataatgtggatcaaccccaatacagaaaactccaaaactcttcaattaatctttcattagtctagcttatctcttcgattcaagttagttggattgccaggttggtgccgggtatatgaacatacatttcaatatatatacatatatcgatcctacatggtcacatgctaatcaataataatcatatattccatgaatagccaatttataattaataattaattactttaattaatttccaaatccatataattataaccagcatatctataaaaaggacaccccaaattcaacattctccatcgagtgatcataataactctatactacttctcttcatctctctctctctaatatgggttttactcaagtttcgactgccctcctcctattgctaaacttggtgttcttcaccatggttagctctacctatgtcccttgcccaccatcaggtcagaataaacactatccaaagagcccagcaacaacaacaccggctgtccctagctacaagaccaagtgtcctttggacacacttaagctaggagtgtgtgcaaacttgttgaatgatttggttcaccttgttgttgggacaccacccaagaccccttgctgcccactcatcaatggcctggtcgatctagaagctgctgtatgtctttgcactgctcttaaagctaatgtgttgggcatcaaacttaatgttcctatttcattgagcttgcttcttaattactgcggcaaaggtgttccttccggcttccagtgtcctaattaatcaagcttcttgttttggggaaggctttgtgtgttttattatattctttttttttttaaatcctatttgttttctgttttgggctgatatatatgatcatcctgtatggcttcatcatcaatatgtatgacatatcatacaatatttattaataaattccttttaaataatatagttcatattgttgtttttttccattacacgtattgtggtactctacacaatacacatatatgtgtacatataagagaacatattcatcatacgagaattcacattataccactctccaagtataggaatgaatggcaaaatgttcaaactttaaagctcaccaagtattgatactaagtggacaaatctaataaaccgttccttgtattcttatttttaggggttttccacttaatactgaaattttcaattttcttattttttttactagtaaagtgattaaaaaaaaataactatatatatatatattgtgttaaatttttactgttattctgcggttataattttttagttgttccattgttattttaattgttctgttttattgttttacgattgttctataaaagacaatatttcataaaaaatttcgtatgacagtaaaattataaatttttacctaaaatttaatattttttataaaaacacctatttttaactcaaatcacaaattgtgtaagtagtcctaattttaccaaccataatttattttagcggaattttcaaaaatattttttt

SEQ ID NO: 237851 - DNA, 881 bp, Cannabis indica
aatatgtgtatggtatttgcatactgatattgatatccgtttgagttctaaatggttagaagacgtgagctaaatgtgtgataagttatgcagtaagggcaatcgaatagtctgattagcgagctaactgggtcgaggcaaacagtaaggaagagaattctttattgccataatgttgggaacatgtaaattctgctatgcatgatatcattagacaacaaaggataaacagattcgagatctgaaagaataataggctcatcttgtgtatgttcttatactaccgacactttctattgtaccactagatgtggtcgaatatatgaagccaacttactagtagattaggaagcaaaaattaaatgaaccaccaattatgacacagaacaaaaaggttctaaggtagtcaggatagcggtcaaggtgaaaataaaaaatggtgaccttatcctgagtgttcaagatgcaaaaaggcgccatttgggttaatgtagagccatatcttgttattttggggtagtgggtcatctgaaaagaacctgcccacagttaagaaagactgatgttaaagaagaaaaatatatgggtcctgcccaagtgctggttatgactcaaggggactcaggtatcggtacttcggccgactcaagttggaatttttaggcaatattataattactatttcaatttacattggtattaaacattgtactctgaatggggggggacattaaaagatctaaatgaactgtgttgtatgttatttagtggcaacccatttgaccgggtggacaaattagagaaatgacaaaatgagttaaattgttgacttaggattgtatgttttagtattttcacttgtcattcctacttgctatgtg

SEQ ID NO: 237852 - DNA, 1396 bp, Cannabis indica
taaacaccgaaaataaaaaacgaggtctccatcttctacacccacagacagaaccaccacagtaacaccagaacaaccgaaaaacaaccattaaatccggtgagatgaagcagaaacattaaaaccattaatattggggctgtcatggtttttctaatgttgtttttgggttgttccactattgtttcgtatgtttaacaaatgttggttttaaattacacatgttaaaccaacaactaactatttatttgaggtaaccagaataaaagaatcatggacagtaatagacttaccttccattaaagtggtgaaatctagaagcaaaaaaaaaaaaaaggatggaagctggctgggaaaaaaacaacataacaaatgcagcaaatgtggaaagttggggcacaacaagagaacatacaggaggagacatcaaaaatgaaaagaaggagaacaactaaaaaacaacagtggaacaacaaaagaaaactgaacatatattaaagtatatgatactaaagaaaataacttacatacaaattttattatttccctattgctattaaaaatagagcagtacaataatattttaaaaaatgagataaaaaaaatgaaagaaaacaacagtaaaacaacattaaaataataataaaacaataacaaaataaactataagagccatcaaacgatacaaaccactcacaaaaccagagctaactataaccccaaaaaagaaacaaaaacataattagtaaaaataacaaaaacccagtaaattgtttatgtcgttctagaaaaataaataaagaaaaaagagatttttttcttacttagaaagtttgagttgtctgctattcttcttctttctttgtattattcttcttgaagatattctcacaggataagctctctgtctactggtctctctctttctctctcatcaaacacatcttgagggctaaagtctaaagaactatatggatttgaaaaaaaataaaaatatagaagaacatgaaaatgggagatagatgaattgtttaagatggtgaaaaaaaaaaatataaaatgatgaaatgtgtagtaacgtgtgattataaaacaaatataatatattaagtttttttttattttatttgttatttttttttaaaaaaaatgtgaactgccatgatttgatcatgaacatcacattaacaatttttttaaaaaaattaattaatagagcatgcaaaatgacaagtgacagtataaacggtataactgtacagtacttttgtaatttctattatgtaatagtataaaagtaataaaatgacaaaatacaatataatatgtaaaaaattctaaaaaaaaaaattaaattgaatcagatgcccaccccatataattgtacggtggtttt

SEQ ID NO: 237853 - DNA, 648 bp, Cannabis indica
aaaaaatgaacaattattgtaaataataaaacttagaacaactacgaacagaaaccatggttcgaaccaaaccaatccgtttttgagtggttcagtttttggtttggtttggtttaatcatttcattggtctgatttggttttgaatttttaaaaagtcaaatagtgatttggcttgaaaaaattaaaaatttagaccaaaccaatcggtgaacaccctgtaggattgggattgaaaaacctaagcatgtgaaacagtgaaagtggataagttgcaattttttttttcctttgggtgagtgcatgtataatgtagacatgcatcgacatatattgaatttgccaacagaaaacataaaattaagaaattggatggctaattatggtgttgactattgagtgttgacgagggtactcttgttgaaaaattcaagcctaagagtataatagtgcaatgtaatgtacctatcaatttataaattgtagtagtatagccatagcatctataagttattgtggttcctctttgacaatctatgttttttaagaatatcattttctcttattttgttatgtacacttatatttattattgctactaccgtaagagagcttctttaattccacttggttcaatgtagtccaaaag

SEQ ID NO: 237854 - DNA, 596 bp, Cannabis indica
ttctcgattggtcggtggctgtacgtaatgcatgtacaatgtagaattattttgacagaaattgccgtgaaagatataatttatataaatatatatatacatcgtcatcacaccttaattattgtgatacaagtttcacaaatagttaatataaatacatagattatatcaatgaataaaatgaataagaattaggggtatttttattggagtttggcactgactattagagtacgtccgatactttggatcaacccttcaacttgtgattttatttttgcttttgtaaaatatagatcattgctattaatatgcacatatatgatgttgagtcgtgactttgggaaaggttttaaaactatagctatatggttcatatatctcagctgcaatatgtatagacagttaaatcccacacgtaccctcaatgaattctagatagtgggaggccttgtttttaggtacaagaatatatataatagttatggaagttcatggaaacgtgtcaatctccattgtctttttttttttatctttggaggatcaaaaccaattcctttaatttaatgataaaaaagcctcctgtatattgagga

SEQ ID NO: 237855 - DNA, 875 bp, Cannabis indica
tatcgcttcgggtcttcaagatagcttcctctccaccttcatccactatttaggtctatttctgcttaggttgactttctgagtcgtattccttatatagggatgagaggtgtgcctccaattgagagaaaaatcaaaattacgtcaaaaccacgatgtcggtacctagtcgcgactagcctttaagctggtcgcgactacaggcaaacctcgaaaatcagaggttttgccaaaatctcgaagtcgcgactagagtcgcgaccacataaaagggtaaaatcgctccaaaagacaccaatagacaagaaaatgcttactttacggacccaaaacatgggctaaaaataacctaacaagagactaatctaccaaatcagactcgaaagggaagtaagatccttttgctgttttaaattttagaaaaaagaacttgacagcttgtggccacaatttcgattaggaaatgaactgcttggctccattgcaatgctctaagaggagcctctgcttctggatagataggaggaagttttcagttttctgaggataagaaacatgcagttattttgttttgtgaatcttggattatggctccatatccatgcttgcaaacttggttcttaaccgcaacatcaacactcaatttatacttccctggagaaggagacagaggatctgtgccccattgatcagagttggtatcttgaatagtgctatttggtgatgatataactttatcttgagcttccttgtactactgcaaataagaacctctatatctgtaaagaccgcttagttttaatttggaaattagtagataattaggatttaattatgaaacctgcatgatatttatgatttatcattttatggag

SEQ ID NO: 237856 - DNA, 1276 bp, Cannabis indica
ttttatgtgtttatttagtgttacgtagttatttagttattttatcttggtaaaaatagaaattatttcgtgaactatcatgctatgttaatagagagaaactttgcttttatagaataataattagttgattttatctactataaattattcaaatggttaggttggtttcttaagaaatttattttagaagaattagaactaaatattaagatttagtgttgcttagacgatcaagttgtctcaatagaaacaatcaaaatggaggagcttcaatacctacaagaagtttaagaaggagacgaactacgaggctaagttagtcgtggtggaggacaaggataacgagttgcactattatggaagtggcacccacgtaagtacataacaatgcataggttgacttgagaggacgttcgtaattgtgagtagttggtgaaagagaatgccaagcttgaggaacgattttaagctcaagatgaaaagttgcgttgcaataagcaagtaaagcacgagaaatttagcttaatagccaacacaaacgctttgagctactatatgaaagaaaaaaaaaaataaaaaaccaccgacattgaaggaggctctaacccatcggaggtgaaaacaactgaggattgtagcacccatattgggatatatggaactcaataatagacaactagacgaatgacttgatcatgacgctgcactcaatatggattggactatccattcatcaattattgaaagtatttggtcgcttttggcaacaaaggctggaaactaatttacttttaaaggagttgagctagccttgtgaacttctttaatctcatccttaaagactagccagctaaggaatgtatgatgtcaagcgttgttagctaatgtagtgcaccaagcagtggagacataactaacaattaaaaaaaaacatccacatagtctgtgaattttaagaggtctttctagaagatctaccgggactacctccagacagaaaggtggagttcatcatcgaattagccccagggactactccaatttcaaaggctccatatagaatgacgcctaatgagttaaaagagcttaaaatacaactacaacaactcttagacaaagggttcattaaaccaagttactcaccttggggtgcgccggtactcttcgtcaagaagaaagatggaagtatgaggatatgcgtagactaccgtgagctcaacaaggtgaccatcaagaataagtaccctttgccaaggattgacgatctctttga

SEQ ID NO: 237857 - DNA, 803 bp, Cannabis indica
cgtgtataagagtcatcattccgtgtgtgtaagggcccattgaaggcttaagtcagggacattacaaaaatattaatagtgaagtgcttactcttaagctcgagcattgtctccttaaaattttgaaggtctatccaaagaatccaaggttgattccaaaaaaaaatagattctcctccaactttaatagaaaccgagcctttggctatagtatccttcacttccagaatacacttccattgataggagttattgctcttttgctctgttctccaaaagttgtcatgataacaatactttctctattaataagtgacccaagacttctcttgtctaattgctagactccatgctagcttagccagtaaggctatatctatatcctcaaatcttcttattcccaagccccctgaagccttgggttgacaaatgtgatcccaagctctaaggaccatgaatctgtccatttcaacattacccaaccaccagtattttctcagaattgcatccatttcatgacaggttgatagagtgatcttgttggtcgacatagcataaactggcacagaagatgctactgacttaatcaaagtttgtcttcctgcataagagagaagtttcatcttccaaccttccaatctattcaacatgcttgtctttaacctgatgtaatcttcccttttctttctcttaaagataaaagggtttccaaggtgtctctcctcgcctctaacttgagcaaaattcagcattatttggattgaatttttcttcccactactcaaatttttagagaaaaggac

SEQ ID NO: 237858 - DNA, 1436 bp, Cannabis indica
aaaaaaattaaggatttacctttttatgatatttttttaatttattaaggttatggagttttagcaatctttgcatttttatgggttagtctatcctatattttataaaaaagatttgaaataccgtattttgtaatttcttatttttgaaccaccgacctatctctctcgctctctttccctctcctgaaacccaaactaaccacgagccaattttctgcctcaaccactttcgctcctaactccagtcggcaactattaagaacttttcagtttcccaatcattaaatcggtatcctctctctcacaactcaccatcttcaatggttgggtcattggtttgggttcaaattcagaacacaacatgtatataaaggtaccttttataaatctagagatttatcaataatttattgtgtaattcagatgatgcatctttctaggggaagatataggtactgctttttattgtcatagtgaaattggggatgaaggagggtatgagtattgacaccactactagtaccagtaccaccaaaacatgtggatttactggatttactattgtttgcatttgaacgaccagctcggcctcatgatcagttgctttctgccttagggcaagtaactcggtataggtaccatcatcataatcatcatacccttctgggtttctttatattcttcgtcgtttgattcgtcttgttcctcagaacccacatttactcatgaggctgcttcttcgtcctccgggttccaaggatcctagggcggacaaggttggcgtgtgtggtttcgagtttccaccattgtagctgagatcttttgttgtcatttttcagacaatgcttcccacaactttcaatgaaagcaccaaaatattgactgagattttcgacaactaattaaaagataataatgagagcttagggataattaatgcaggagatttttacgtggttcaggcattaatgagtcgtagtccacgagtctatgttattaatgagagtatttcttatagagaatggtttttgtgatccttactcttctcaattgtttattaggggtatttatagagattcgtgggtagaagaaaaggagaaacttgtctttaaaagccaactatgggcaagcacaagttcccaaaaggtacaaaatagggcatgcattaactacgtagtaggcagcgtagatgctaggtgagattggccttcatgccatcttgatcgatgtgattcttcatgatggagtcgtcactagctcctttgattatcgtgtaatcgctctaaatcaggtttatgaagtctaacacgtcatctatgggcgttccaaaactgcattaaatgcaaagtgactattcaactcaagcctttctggcccggagacgcctatctatatcttgactccccagaggagaaggtaggtcgttttgttcg

SEQ ID NO: 237859 - DNA, 719 bp, Cannabis indica
aagtagtgatggcctcaaaagaaaagatgatgcaaacactttccttctgtcaaatttgagccaccttccctatacctatttttgaaactctctctctctttatctcttcaaaaccgaaccctagagtgattagagtaagtgcccacacacatcaagtgatactcgatcatagtgtgtaaggctgtgaagaatgtaaattcaagagaaggagaatcgggcttagatcttggtgatactctgctaccgaaaggatacaagggttagagatctgagcagaaggagccatttaattcccctacaaccactttaaggtttctcataccttttatgtgtttatttcatatcgttttagaagttcatgtttaggatgttaaaaacatacttgttagtaaatctagatcctggaaaaatatattccaacacatacgtcaacatggccgcttgtaaagtccctcagagccaccctgggcacccaagtttagggtaaagtccccaaaatatgtttcgttgatgtccattctttcttttggtgaaaagtgcacacacaatttgaatttcgtttgattctcatctgtgttacttgacagagtgtagtcggtgcccatgttctagtgttaagctaggcgcccatagtttgggaagtgcacctcgagatgtcgttgccaaaaactcaagtcttggcgttgctccttgttagatttggcgcctccaggtagggc

SEQ ID NO: 237860 - DNA, 1001 bp, Cannabis indica
tgtaaaacactgtttaaagggctacaaaaaaattaccaggagtgctatccaaactgcttttattgctgacaatcttaaggataatgattatcttgcagtcaagttggttgtgttatattttgttcagtattacttgttgggtggttcctctgggaaagttgtttcaattgagaaaatagatgttgttgatagtggtcgttacaatgaatatggttggggtaaggagtgtttgatatgacaattcaatctttgaagggtaagattgattctggtcttaggaaggttatgcagaaagaagaagagtgtgggtactataggttattaggttttccattggcgttgcaattatagttttttaagtgttgtccatacgttattgggaaactgtcattgtattcaaatattggcattccaaggcttctgatttggcctaaattgccaaaaccaaaggctcctcagatgaagatggataacatgaacaatctcgtatttaatcggtcattgaaagagatacttgtttggttttttaaactttttttattgttgttttacagttgttttttctatatttgtattttattatttgttttcatttttatttcaattcactttctgatgtttgtctataattttttgtttcttttttgttgcaattgaaacttagaaatatctctccaacatctgatgagagagtaagtttgaatcttgatgactacttctccggtgacactactccagactttagtaaatttaaagttaaatgtgtctccaagtcttttggtcaagctgattttatgggtgcatgtaatatccgctaactccgaaagggtatttttgtaattttatttagctgagagtattttttttttattattttattttacatatttatggatttaaatatgtatgagattatttttatgatgatataatatttaattttattggcatgtgcataatgcctaatagatacatatgtctggatattattatatgggtat

SEQ ID NO: 237861 - DNA, 1118 bp, Cannabis indica
aaatataattaaaaaaatatacaaaagaagaatgttatgggatttaaccatgaccttggacattatgtcagtaacctcaaccaattaaactaggaatatttgttgtcttataatacacttaaattttatttataaaaaaaaaagcaaaaaaaagttttttattttttttatttttgggtccccttgaaagtgtgggtcctaagcacgggcctagctcgcctattcctaaggccgaatctggttatatgtagtattttggtaaacctacacaacttgctacagaataataatacaaatattattactcacactagtgatatccaacataatctataattagtgttacatgattagttagctagcaatatttattaaaagttattttcttaaattataagaaactcgatacttaataacactaatagtagtataatactgagaagagtgttagacactaatactactttttaacaattctctaataatatacacacacaaacgtccacaaatctttataacaagaagttaaacgaatcaaatttatttgagatgtattcatttgttaaagtgagtgttgtgtgtaattcatatgagactctttatttattatgatgaagccaaacacaccctaaaccttcataatttcgagtgtgtgtatttattggatgtgttacacgtgtagaaaattgtgtacgtgtgacaacatagtcttttgttccaaaattaattattagcttgttttattttgttttttttatataaatatttaaatatttgagtggtccaacagctgaaaccatcaaacagcatcctaatttttatttattttattttcaaaataaaattgctcaaaaaaaaataaatatacagtgattttacagaactgattctctataccttacctgtatccaatttagggtttttttaaaggaaaaaaagaagaaagatttgatttttctgcaatttgtggaaccaaaatgggggggcgcccaaattgttgtcacatatccttagctttcgtctcaaattcctcaattttcttcaagctttcgtcggtatctccatatactctactcctatggatggtcgatcaatggtacaatcacatcccctataaa

SEQ ID NO: 237862 - DNA, 706 bp, Cannabis indica
tatattcgatatcaatacgacgttcgtttttgaacttcctttgaatttggttttttttctagaaaaattaaaaacggaaaaaattgtcatttcatcacaaaattattgtcgtttttatcttcttgatgtcgtttataatcatttgtctcttcttccaaattactatcgttttctcacattaatgtcgttttattagaaacatcgttggttctccaaattattgtcgtttttcaatctctctctcttttatgtcgtttggtaactttgcatggtttttgctccacaaacaaactattggagagatatatacaaatacaagcaaattattggctgtttttgtttggttagtacaaaaaaatactatttgtgtttgttgaaagttgtggaaattcaattgttggtttgaggcaaaattgcgcaattttaattttgggaggtgtttgtgtaagttgggtgttaacgcaaactactaatttgtgttaagtttggagatgacgtaaaacatgttagagatttgtgttaattgagagttgacacgaacatccaagatttaacctaacatgtttacgttagtgtctaattgttaacatatttacaccattaatgttatacgaacgcaaacactgtatttttgcgttagtgctcaacttggactaacacaaattgacacgttataacgcctttttgatatttggctgaaattaaa

SEQ ID NO: 237863 - DNA, 6850 bp, Cannabis indica
ttacaattttgccattttatttcataatttatcttttctttcactaatgccatattttttaattttattcttataaatgtcaaaattatttatttaataattataattaattatcaaataaaattgttattttacttatttattaattagaccttacaaagtctctcaattaacaaataaacattgaaacctcttttcttcacaataaagcccttcttagtgaaaaatcataaataagacatagtctaatttagaattataattaattaattaaatcaattaattgagtctacaaacagtattatctcaactagtgtgtggaccatggacctatacaatcaagcttccaataagtagatctagaatgtacaaagtaaattatctaatttattaattcctcttaactccactatagatttggaattattctcctacttatataaaatgctctatatgttccaagatatagatacgctattaattatccattgtaataatccaaatatttaaagatcctctatagatgatctacatcaagtagggacaaatttaccattctacccttcaatgtattttatccttaaaacacttagttacctataaatgttatttcagtaaactaatataattacggaaatgagatctcaatcatttatctctattaagccaagctcgaaggaaattattgttttacttctaaatacttatagaagctatagatttcatatttatgattagcgctccccctcaattgtactaccatgttcccaagatgtaagtatctgaaagatccattggtcaactttaacgaataactctaagaacctaaataacacggttgaaatcgaacctaaccatatcaggattaagatctattgacctaagatcaactaggtgatattgacttagatagatataatgataagtttatgatatcttatccaatgtcaatttctgtctggtccgatgtatactccatacatccgatactcgcatattttaccaataccctggaaaggacataacacttatttaaggtgtaagtaaactttatcgctgattattatgtcagtgtaaatctagtatactgagaaatcatgagacataaattttgaaacatataattttgattatatgccactctattgaaaacactttaatcatgaataactatatgttctggatttaatagaatttatacattgaacatataatcatgaaagcaatcatgtgaaccatgcaacataaaataatttttgatcttttattaattagtgaatctgattatattgaaaagagttttatttagggcataaaatcccaatagaactaataataaaataaaaccgtgttatacagacaagactcaaacactcaaaaccgtgtcacagaaacaagactaaacattcaaaaccatgtcacagagacaagaataatcgcagtaacaaaaattgaatcgcaatagcaaaatacaaccctgaccaagctacacttatgccaagagaaagtcagcgagtttggtccaacaattttaattattaaatatcaagttaaatgataaattattttaatacatgattaaaatattattatttaataaataaaatataaaattagaataatttatttaactggtaaaacaaaatgaatcaactataatgagttaaagctatatatatttaattatttactaattaaataatatttttttaataagtctaatcattaaaggtttaattaattaataaatagtcatatattgttgaggaaattagtgacagtattgattaacaaccaactgaaagtattggttagttagttaaatttattttttgttaagtcgttatgcttcctcgtatacttttctactattatatgtagcgtgtaatcttgtgagtttagtaataatgatacacactttgtttcactctctttctcttaatttctcttctctcaactttctctgttttctctgttttggattctaacttggtatcaagagcagacgacaatggcgacctctgcaaagaatttcatcagtcctactgtggttcctaccaccatgttcttacctccactaagattagatcaaagcaactattttttggcggtctcaagttcttcccaccatccgtgctcatgatcttgaagatattttactgcgtcgacatccaagacccaaaccttaggtattagaagcacctggttcctcaaacatgatacgtaaccctaaatttcataaatggatgcatcttgatcaatttcttttatcttggttaatgtcgttgagatctgacccaatgattggccatattgtgcactgtgaatctgctactgcaatatgggaaacactggagcaattgttcaatactcgatccaacgcccgaacgattcatctcatgccccttctccaaaacacaaataaaggttcctagtcgattgatgaatacatgttgaagatgaaaggctatgctgatggacttcgtgctgctgggaactccgtttcagaagaacaactgattctttatgttcttgctggagttggacatgaatatgaatccattgttgtgaatctgacctccaaagataaactcactcttcaagaagttcaatttatgctacaaaatcatgagatgcgacttgaacttactcattccaccgccctattggatctgaattctcctcaagctaatcttgctcaagccaagaaacaccaatccactggatactcccagactggtcgacctctaacttctaattactcgcacaatgctactcgtggaagaggcagaggaaatgatccttacagaggtcgtgggagctcaagtaattcccgtgtgattttccaactttgtgagagatcagggcatactgttcaacattgatacaggcgttttgatgtcaatttcacaggagttgaagatgctgctccaccatcaagtgaaactgccccacaagccaacattgctttctcctcagccccacctgatgatggttggtatctagacagtggagcctctaatcatgtcacaccagatgccaacaatctcatgcaaaggacttcctacaaagggaaggaaaaaaatggttataggtaatgcttctcaactctctatctataacattggcaatagttccttcaatgctgatcgaattctttatctgaaaaatatattacatgtgcttgccatttccaaaaatcttatcagtatatctcaattcaccaaagacaataatgtcacaattgaattcacacctgatctttgttttgtcaaggacaaggattcgaagaagcatcttcttcagggcactcttaaagatggcctataccaccttcaatctcatcaacctactgtcacaaactcatcttccagatccaagatttacttctctgcacaagtgtccatgacactatctgttgatgctagctctttttcacattcatataataaaggattttcagttgtaaatctatggcataaaagacttggccatcctagtagacatgttttgaataaaattcttacacatttgcatatttccaattctactgttgatttttgtcatgcatgtcaacttggcaaattgcatcaattcacatttcattcctctaaaaatatggctaaagctctatttgatattgtgcatcctgatttatgggggccctcccatgaaacatctacataagggtacaaatattatgtacactttcttgataaatttacaagatacacctgggtctttacattaaaacttaaatctgaaacaccaaatatttttctgcaatttaattcctatgttgaaatacaatttggttgcaaaataaatactttacaagttgactgggtgtggtgaataccgacccctcaaacctattcttcttaaacttggctttgttttcaaacattcttgtccccacacacatcaacagcaaggaaaagttgagagaaaacatagacatttcactgagatggctcttactctcttagctcaaggtgagttacccctaaaattttggttagatgctgtcacttctgtagcatatctaatcaatagactacccatccaaaaacatgaattcaaaatcccatttgagtttccttttcacaccaaaccagactacaattttcttaaagtttttggctatgtctgttttcctttctgaggccatatagatctctcaagtttgatttaaaagctcaacatgcttgttaggttacaatcctgctcataaagggcatagatgtctacacccttctggaagattgtacattgctaaaagtgtcacttttgatgaaaaatgttttccatacaaaaccttgtttacctatacctacattcaataatcctactttattcatcaatctctgccttttccacagaccaatatcataccagatgtgcctactgtaccaccagctagtccatctgccacaatgtcatccaccagtccaggtacaacacttcactctcacactcccccacctggtttcccacatcccatctacccactatttttaggccacaatattcccagcaccacctccagttcaacattcacaagtattaatcctgccccctactacaactcatcctcctgccacttccacatccacaatccctcaatctctccctaacttgtatcctatgcaaactagatccaaaagtggcatcaccaaacccaaagtattgggagctgaactaactactactaatgttgatttttgtgaacctaaaagtgtgaaacaggccttacaaactctaagatggagctaagctatggacaatgaatattatgctctgaaaagaaatggcacatggactcttgtcgcgtatacaaatgatatgcacatagttgaaaacaagtgggtctataaaaagaagctcaaggacgatggctccttggataagtttaaagctcgattagttgcaaaagggttccaacagatccctggagttgattattttgacactttcagtcctgtggtcaaggccagcaccataagaattatattcactattgctgtcacctttagctggcgaattcaacaaatggatgttaacaatgccttcttgaatggtgatctcaaacaaactttacatgtctcaaccacaaggatatgttgatgaccaatttcccaatcatgtctataaacttcacaaagccatctatgggctcaagcaagcaccaagagcttgatatgacaagctcaaacatgctttggaaacttggggatttcaccaactctatctttgacaactccttattttatcaaaatcaagacagtcagttgatcatagtgcttgtttatgttgacgatattcttgtcactggtgcaaactctaatagcattcaacagcttatcctcaatcttcatcaacagtttgcacttaaggttcttggaccagtcaattatttcttaagttttgaagtgtcaagacagggtctactcttcatctatgtcaagccaaatatgctcatgacatcctaagaaaaacaaatatgcttgactccaagacttgcaccactcctatgagccctagttacaaattatctattgcaactagtgagccattctcagaccctactctttatagtagcactataagggctcttcaatatttgacacttactagacctgatctatcttttgttatcaataaactcagtcagtacatgcaatctcccataacaaatcattggtgtgcctgcaagagggttctcagatacattcatggtacaatgtctaggggtttggtttttaaaccagctaaatggctctcccttaaggggttctcagatgctgattgggcctgtgacattattgatagaaaatctatcactggcttttgtgttttgctaagagggaaccttattacatgggcatcaaggaagcaaaagcagtgtccaaatccagcactgaatcttaataaagggctttatccaccactgcaaaaaaattagtatggatcacttccctcctacatgaacttgaaattagcttacctcaaaaacctaagctctggtgtgataatcagggagctcaaatgttagcctccaaccctgtctttcactcaagaacaaagcacatggagatggatgttcattatgttcgagatttgattctgaacaagcaaattgaagtatcttatactccctttgaagaacaacctgcagacatatttaccaaggctctaacctttcctaaattcaattttttgtgtaggaagctttccatggaatacttcccgaacaccttgagagggcatgttgaggaagttagtaacaattgtaattaaaaaccaactgtcaatattggttagttagttaaatctgttttctgttaggttgttatgcttcctcgtatactcttcacctattatacatagcatgcaattttgtgagttccgtaataataatacacactttgttttactctctttctctttctcttctctcaactttctctgtttggattttacttcttagaatcaacttatatatatataaatatataaatgagcattgctattagtggtattcaactctttttaaagacgatgatctacaattggttaacaatacttcttaaaagttattatattaaattataaaaaactcgatactaattgcaccaataataatataacacttaattataagaaaatactaggctacaaatgtaccttttagcattttattttttttatatatatataggatatgtccatggtaagaattattgttttgtccctatggtagaaacgtttttacaaccattgataataaatctaacggtaataaatagataagtgcatataatagttaatatttagagtacactagatt

SEQ ID NO: 237864 - DNA, 533 bp, Cannabis indica
tgatagttttgactgctaatatctcccactaaaaatttaccacgtgtacaatgtggtatgtccaccatagcacttaattaataaagtcttttcaacagaagtgataaataactaatagaagtgaggtttagaggcgattttatcattaaaaattagtttatgtgattaaatgtcactaatcatataatttatttaattttaccgctaatatctattatttaaaatatatcaccaaaacaatattttctttattttactttaaatttttacattacgttatatcaatttatttatattattttttttcttcatttaatattatattttaacataatttattattaaatagtaaaacactaaaaaaaacactcaattggatttggagagattaaaaaaataataatataaaaataatttaaagtacctcttaaccttcacttacatgtagggaaggaatagatctcaatatagtaagcatatgtgggagtagaattttgggaccatttcttcataaatgttttttttttttttta

SEQ ID NO: 237865 - DNA, 983 bp, Cannabis indica
taagtttttaattaaataagtaaattttaattaatcacgtttttcattaacctcgttgattagcaacgagctgcacagtacgtttaaaatcacactaacacgcctatgctagttagggtgttacacgttcagatatggacttgaaatgagtaaagtctacacgcaacttcggaagtcccgtgcagacttgggaggcaaatgttatcccatttttcgtactacgacgtggtaacacatactggtgacatgtggctcctatttcctacatctagctgaagaggtattccgaacatagctcaatatacatctgcacagatagagtctgcctgaccgagcagggcaagggcagatgatccgaacaatgtattaagacttagcagtttcaagacttacatcgtaaagcacaaaaacaatccctacaatcaagggatcgtatcaaagggatatggcaagctgtccgaatccctcaatctatgtattctaaatatgtaatgtgtgttcttacgaattatagatattgtaagcaaaagggaaaccttccctcctgtatttagccccataaatagttatccatcctcactttaaaaggggtcgaaagaattacttcaaagagatctaagagtaaacactcagagatttcattgtgagagcttcaagaaaggaaacactgtattctttgttcttgagttaatacatgggagtaggctattaccgaactaaaggggccgaacctctttaaaatcttgtgctctttattgtttactggttcttattaccttgtcttaattacattttttattacttattgagtgactcattgtcgttggctaaaagtgaggtcaacaatatatttgaagttataaaatgtaaaataaatgtgattatggaataaaatggatcttatttaaaaaaaaagttcggtttggacggtttgaaccgaccaaactgaggttcaaaacggtcagttttaagataggttttgg

SEQ ID NO: 237866 - DNA, 1156 bp, Cannabis indica
tcccattcccattcacattccttctcctatttgcattcgcattcccattccaattctaattccctagcccattcccatttcccattccccgacccattcccattcccattccccggcccattcccatttccattctcattcccattcccattccctcgcccattcccattcctattcccattcccaatccccattcccattccctgacccatgtccatgcctattcccattccaatttccattcctattcccatttccattccccagcccattcctgtaacgattccaaaacccaaaaaccccaaacgccaatattgcagaacctcaaaccctaaaccctaaaacgcaaatcccaaaccccaaaccccaaaacacctaaaccgtaaaacctcaaaatcccaaagatcaaaccttaaaccccaaaccctaatccaaaaaacagcaaacctaaaaaatccaaacacaaaaacaccatagcccaaatcccaaaccccaaacccaaaccctaaaaccccataccctaaaacccaaaccccaaaccccagacttaaaacctcataccccaaatactaggtccaagatcctaaactctagaccctagtcataaaaccccaaaccctaaacctcaaacccaaaaaaccctaaatcccaaatctaaaaacccaaaacccaaaactcaaaacaccaaatgaaaacccaaatcccaaacacctaatgtataacaacttaaccccaaacccgcaaacccaaaaaccccaaaccaaaaaccccaaatcctaaacccaaaacccccaaaccttgaatataaaaccccaaattgtaaacccccaaaccccaaaccccaaacccagaccctaatagaaaagttattgacaacggtcttggcttcgtccctatgaaatttcacaattttttaagatgtctaggaaggaaaaaattgttgaaatttatcctaaacaaaacaatatttcaatttttgaaataggagttattttaacaaaatttaactttaagccaatcttcatattcacatgttagtagtacgaattctttgtgactagtggggaaaaatatttcgagatgggttcgggccacatttcacaaaggggtaccactattagaaatgtaaaattttaactatttcatttagaatgat

SEQ ID NO: 237867 - DNA, 1075 bp, Cannabis indica
tgattgtcgtagagcctttatgcactcttgttaatagctatttagcttctttctcggtaacacatattagaggtggtattgggataccacgtctacgcaatacgccgtctgggattggtcacagcagctatcccccttatccttgatttttaggaaggtttttatttgaagttacgctgctataggtgtcctccatgttggacggttgtctagcatgtctatgtcttttgaacttcagatgctcagttcctttaagtactgaataggtaccaagttttccttagctatcaaggtgctgctggctatcaagcaagtgcatcagctattgtgtcatctttggggacttgccttttaatacagcctttcagctgacttaacaagtcattaaattagcttaaataagccatcatctctttgccttgagctacgtattcacataggatatgacctaggactagttgagagtcgtggtgtatgtctatgtattcaacccgtgctttgtgttctagcttgaggccagcaatcggagcttcatattcagccttattattagaagctttgaaactgacctttattgaggccatgcgtccaccaggcaggtggtcaattcacctttctagattgagttatcttgctcttgctctcactcttctctggcccttgcttttctcccaaatcttgagtgattttagggagatatgcttgtatatgctgccataaagttcgtgagagctttgcctttgatggccatgctaggttgataagtggccttatattggctgagctcaatggcccacttgagtggtcggccaggtgcttcatgttttggtgcacctgttgccatggccgatttgaatgtattgctttgggagttttggtaggagagtgaagcatgttcacttctcttccttctcccatagacttcatggcataatgcgcttgcttccaatattctcattgttggagaattagtggagattgtctacgctggccagcatgtcggacaacactttgggcagtatgatgccttgtgtttgttcaacattgacctgccctcttgtctgggcttgccgat

SEQ ID NO: 237868 - DNA, 643 bp, Cannabis indica
aaatcaattgataagtgcctaccactcttcaatgtattgcgaggccacaaaaagtttgagtggacagatgagttcgaggaggcctttcaaagcagaaagagccacctatcaacacctccaattttggaaaaactaataattgtagaaactttactcctctacatggttgtcttggaaaatgcaactaatgtagcaattgtgcgagaagagggaaagcaccagcaaccagtttactatgttggtaaaaggcaactgggggcggaattgaggttttcacctcttaaaaaacttgccctatgcctaattcatgcatctggcatattaacgccttatttccaggcacgtctaatacaggtgttaactgatcaacccctgagacaagttctgtcaaaactagatgcttctggaagattgataaaatggtcaattgaacttgggtagttcgacataacttatcacccaagaacatccatcaaaggccaagccttggcagatttcctgatagaagggatagctcccgatgaaaattcgcttgtttagtgagacacaaatacttggaagttgtgcatggacagagcatctaatgaacatggctcgggtgcatgggtgatactaatttcgccagatggctttaagtttcaca

SEQ ID NO: 237869 - DNA, 716 bp, Cannabis indica
ttggctacccctacctgagattttaggtagagcctatcactgaagagcgatgggaggccatgataaaaagcatggggtactagctcttttatatttggctacctttatagggcttatcgtgaaaaggccattattgaagagtgatgggaggccatcgctgaagggcgatgggtactagctcttttatgaattcctgcacggtgaaacattagaggaaccactttataagttggctagtgagagtacttacctagatgttctccattccagtattttagtagaagagccacctccaagttctcgttgtactcgccaggcttgtatgtaccttttcttgttatcttgtaacttggtgcgggtcttttcagtttggtccaaacatgattgttgtaggatctttattatcaaggaatattcttcagagcactaaacctctttcaaagaatttcctcttcttgacttgtttgttaatgtacctggcaacatattgttggtagatatgctactttaagttggtttggtctcttgtttcttctatttcttcaagagattttgccaacaagatgtggtttacttcttggtcatagtataccaaaagtatgagagtagactattgatagatcatgccagctagggtacagaccagatggccagccacattgagggagcataacctgataacctggacagttggacgaagctatggtcagccagcc

SEQ ID NO: 237870 - DNA, 1494 bp, Cannabis indica
ttatttagggcataaaaaccaacaacaacatcaaaggaagattcgaaggatgatgaatttgacaaggaatcccctttctcaagagaaattcaaatggaaccacttccacccaatttcaaggagcctcgcatgacgccatatgatggtacgattgacccaaaataccatctaggagcttttaatgagctaatgaagatgaaaaaggtatccagcaaggcaaggtgccagtgctttgtggttacacttaaaggtgtcatatataagtggttcaagaggtttggacctagagcattacatcctggaaacaattttcagaggaattccttcaacaacataaagctgcaagtattatgcctataacaagtatcaccaatgtaaagcaaggggagaatgaaggcttaagggggtatatccaacgcttcaatgccaaagtcaccaaggtaggaagaatttccaatgatgatcataagttctccatatctgctggaatacaccctaggagtagattatggaggaatatgtttaaaagaaaattggatgacattaaagacttctacgagagagcagaaagatatgtccacattgaggaagaaaatggactcttggaaacagacacaagaaaatgtacttcgggaagctcgtcagaccctagtaggatctactagacaataactccaatgctcgtacatccaagtaaagcctctgctatacagcccataaaaataaatatccaagatatccctctaagtaaagttcccctatgcaagaaaaagttcatagcgatagcaagttcacttttagtgtgctacaataaatcaaagaaggcactcaggtgggcctccgaggtaaagtggatgacgttggacacttagggggcacacaaaagaaaacaaaagagaaagggggatatttttcaaatcgataaggactagctacccttggtagacaagagaaatgttcctacttatcccaacaaaagttagccacaagaggtcttgaaagacactcatggcataacgttgaaatgagagggacgcctctcaagagtaagcaaacgtttttcaatcaagagggtagcgcagtcaagtactataagctccctcccatctgagtaaaaggatgaagaaataataagaggttgagactgctcaaagagccatactcccatcaaatggatgctcgcttaccacagtagaaaaatggcttgcccaaagagggactcccatagtcgctcggcctacaccagttacgaaaattacttggccaaagagtgacctccaaagtcatttggctaatgccggttacaaaaatggcttggccagagagggaccccagagtcactcgaccaatgccagtaatgaaaattgcttggctagagagggattccagagttgctcggccaaagcaagttacaaaatagcttggccaaagaatgaccctagagtcacttggccaacgccaattacaaaaatggcttggccaaagagtgacccc

SEQ ID NO: 237871 - DNA, 619 bp, Cannabis indica
ataaaatgaataaaaattatattcataccttaagggacgttaagattaaatgaattctccactaaaattagtggccggagttataccaccacctttttttaataggttcagtcatagtgaaataggaaaaaaaccaaacttttttagtgtacagatttagatattgaaaatagaagattttaaaagaaaatagggtaaaatggtgtagaaaggagggagataaagggtttttttagaggtggttggcgagcatttcgtcgtgggtgggtttcgctatggtgatttcgtgctgaagaataagaaggcgaagtggaagacgaagactcagggtttttttttataatcctatgccatcggttattcctagtaaccgacgaaataagtgcacacgtgtcagtaaaggtgtgcacctatggcatcggttattttctaataatcaacggtatagagttaataagtaactatgaaaatttctcaacccacaaccgactctatagggtattagttaatttctatacttatagttttactaaaaaattgcgcctctaaatgtcaattttaaattagacgggtattattatgttctttagtttctcattttataaaaaaaattaaaaaa

SEQ ID NO: 237872 - DNA, 709 bp, Cannabis indica
aaaaataataacaataacttttgacccaaacaatccataatgaaaaatataaatgatctcataataataaaaattggaaatattattgcttaacttcttgacaacaaaaactagtttttttgaatgtccacaaataaaatgtaaaaaaagtggcagtagttatttttttaacaaactttaaaattatatatatatatatatatatggctttaacttaacatatttatctaaataagttataaatttatgcaaaatcatcacctgaactatataatatattatgatcaaagtataataatcattacttaatttctgatgatcattttttcctttactggtcaattatttctttacttgtgttgccttgttctccaatattcaatttcacctgaaatatataatatatttccatcaaagcataataatcatcacttaatatcttaacaaataactggtaaattaagtggtatgattttaatattactgatttcatataattaaatgaagttttgatatatgtagacaagtttaagacttctaagctctaaccaatatcgagtatacatataattatgcaacaaataatttaaagagaaatactaaagggcaccagtggtgcctagtgtggcgtgctgccccatgacacacccacaatggggttatttcgtaacatgacactactacaaaaaggagtattttcgtcggtttt

SEQ ID NO: 237873 - DNA, 1072 bp, Cannabis indica
catctgaaccaaggaacctcaaaaaagccctacaacaccctaaatggcttgcttccatgaactctgaaattgggtcacttaaacgtgctggtacatggacacttataccctatgaaacccggtatgcatgttatttctaacaagcgggttcatcgaatcaagctcaatgctgatggctcattagatcgcaataaatccagacttgtagcaaaaggatttttacaaacaccaggaattgattatgctgagaccttctctcctggtgtaaaaccagtgacagtacgcactgtgttatcccttgctgtttctcaccaatggccagtcaagcaactcgatgttagtaatgcattccttcatggaaatctcactgaaaccgtgtatatatatgagccagccaccaggcttcatcgattctgagaaaccgactcatgtttgcttactgcataaagcaatttacggccttaagcaggcccctcgagcatggaacaacaagttaaaagattgtctggtgcaatggggattcacaccatcaaaagttgatacatcattatttgtgtaccgctcaggctcttcccttattatttctccttgtctatgttgacgatattttagtcacaggtcctagtgcttcactcattgacaagcttgtaactgatctcaacaaagaattcttacttaaggaccttggtgatgtgcattattttttgggagttgagattttcagggacacttcgggcatgtatctctctcaaacgaaatatattaccgacttgctcaagaaactcaatatggaaggtgccaaaagctctcccaatccatctagtgcagcaacaaaattatcattgactgaaggagaacctttcccagatgttactttgtacagaagtaccataggagcattgcattatctctctctcactagacccgatgtggcctatatcatcaacaagctgagtcaatttattaaagctcctacttcttgtcactgggaggcttgcaaaaagttgctacgatatctcaaaggtaccatttctgaaggacttgttcttcggccaacaacagacatgacact

SEQ ID NO: 237874 - DNA, 727 bp, Cannabis indica
atcatccttggctatgccaaagataagaaaatgtgctttatgttcagagcggacaagttgtctcacaatcctcccactacgacgatgtactagggtctcctttttctagaattgtggtaactgcttccagtcgttcaactaaaggtgctaaaattgatggtttaaaaatctacttatttctaatttccttaataaccacttgactacgtggtttgtgattttataatagtcatgttcaagaaaagtagcatttgttgatacaaatactttattgtcttgatgactataaaaattagaacctcgagtatcctctgaatatcctacaaacatacacacttcagttttggaagcaagtttctaagtcttgggtttaagaacatgagcaggacaaccccaaatataaaaatatttcaaactggattttgtccccttccataattccattggagtgttgcttatgctcttcgagggtactacatttaaaatgtaggtagccgaaatggcagtgctgagtatcacatcattgattcgaccatgtctaacaagatttgatttcttgtctttataatatcgttttgctgaggtgtttcaggtggtgtaagttgggataagatctcttcttccagcaagtagtctttgaattcaaaatctaaatagtcaccaccacaatctgatcgaagtatctttaatgatttagcgaattgcttttcagtcatagctttgaagt

SEQ ID NO: 237875 - DNA, 1072 bp, Cannabis indica
agagtttaaagagacttcttttggacgacgagcctctctccaataaatacaaccgcctttcacatcatacgtaagttatttttcttagaaacttaactttgaaatgtcgcttaccaaacttttttctatttgcaaaggttcctccgagaccaattcctactcttgggatagttgagcgccacagaatcctactaagtctttgatttgggctgcgagtaggaaatttcttattaaatgagaagaatctgaagagcattggccttcatgcctcagacgaatttacgtgtgattacaaaatacccaagtattctttgtggaaaatggtcccagttccaagtgaagaggaaagtgaggacttcgtggctcgtgcacaccatctcgagaaaactgcccctcgagaagaaagatcatcccgaggtaatcaatgtgggtggtcacccatggtgcttagggccgaacgtaacaccctagtttctttccgagatagtcaatacaatttttatacttggaacccctttctcatagatcccataacacatgggttcgaaagttggtacccagagttccatgttcagattatccaaactagttattactacaaggttgccgagtagtatgggactatgttgaatagatcgggacacatagattcaagctgggatttagatccactaaaccctttttctgatgactcgccatggttctaaatagaagaactccccctttgaatcctcatcaggatcccattaaggtaaatcccaatgttagtgttccttccaccataaaggaaccgaccaatctggataacactatcaatccaaaaaatcatgtgaatcttgttgatcatgccattcctccaaggatggaacaacccacagatctcacacagttgggctagtcaacatggagcaacctccacagagcaaaactagggttattcaataatgctacgtagaaaaaatagtgccagggatcggcgaaccatttattggtgagcctctatttgcactgggagatgatattgagctggccaggtttagggaagggaaatttgattttctatacttagaaa

SEQ ID NO: 237876 - DNA, 986 bp, Cannabis indica
ttttttttttttctttttgtagtcttctttattattattggcaaaagtacctcagttggatacaaataagtctcaacctctaaaaatagcagcaatagtcttcaaggtcatgtttttgaaggactattgctgctatttttggaggttggtcacttatctgtatcaaactgaactttttggagacttttgccgcaaatttcccttattattactaggaaatgacttgcacttcgtgaacggtataagaatgttggatttaactccatgtaggagtgacaaaattattatcgtgttcatgttatattttagttaatatgcttttatatttcgtatcagatgtgtcaatccgttattaaattgcgtctaattttctcaactctaacccgaaacataaaaaattttattatattcgtgttaacttaccttgacctattttgatattactggaggtaagaaaaatatagatttatctattgaaaaacttatatataatatgtatatatagtttttatatatcataaaagattaaatattttaaaatattttcagtgagacaccaagatttttacgcggaaacccaatgcgggaaaaaaccacatgattatagtccactcaaatcatccactatcactaaagttcaataataggattacaaagttcttctctagtaatactagaggctcataacaaaataaagattaaacaatcttggatcaccaatacaatcatcatcacctcaaaaaatggatacacaaatagcaaaatttgggtctcaccaagtgggacttatagaagagcaccttagagaggacaatcgccaaatcggaaccggtaagtttgaagagcaccttgcaaggattcaccacccaaaatttaagctagaatggatgagaatcaaccacttattcttcaaagcaaaatgaaaaaatccctttctctctctagctttatttctcttctttccctctctttttctttctttctct

SEQ ID NO: 237877 - DNA, 717 bp, Cannabis indica
tagccttagacaaaagccaaggtatgcacctcagtagatgaaccaggtcatattctcctacgggcaccatctctgagcagcgtttgtgactcaaacactgtgtcatataaagctcggattgccatccaactcagcctccaagaatgaacagttaggaaagtatcaagccttatatatccgatccacaagggaatcctggtgcaaaagtaaccgccaaccttgcttacccaacaaagacaggttatactcacgcaaactccgaaaacccatcccacttgagttctcattttttcatagtttcctccaactaaaccagctcacacctttcctaaaataataataaaataataaaaaatatttatatttcttaaaatttactattgtaacagtaatttaaaaatatatattttttattattattttttagaaaaaatagaaaaaataattaaaattataattaacaataaattttattttagagaatttccctatatagtatatactatttcttaattttttttttttcaaatttacagtttgagttgttatcgtagtttctatagtggtttttatgttggttgttatacgaattttagttgcgatttaagttggcccattagttgttacagggatttctgtgtaaaattccgtaaaaatgcaaaaaaaaaatagtgtaaaaataaaaataaaaaccttaattttttataaatcacttaa

SEQ ID NO: 237878 - DNA, 1680 bp, Cannabis indica
ttgggcaagtaagtagaaagtgatcattccgttgtaatattattgttggtcacttagattgaaaaacttggtagattgtctacagtaatgttctttttatcactcttcaacttattgttgtttcaagtaaacaccatatttctcaacagcttaaccatgaatttaaagtgttctattgatgttgtcagtcagctaaagctaactaaacctgtaatcggtgcaggtggttgctctcttcttacgatcaaagctcaagaaggcttgttcagatcatcaaaactctattgaaatggtttcaagagaagaatatggtcagcttttttgtctttcttcttcttatttccctcaatgtttagtgttctgggtatgcatttattatttttccttatgttttttggtcaaaattgattaaaactggtagaaaatcaaatgtaggcacaaaacatctggaaaccagtacatttgaaataactaatttgaattcaatatatttctcagttgtttcatcttttaattatctccccaatattgttttcacgatagtgttataacaaatagagaaaatcaatagaaagcaagggagggagctattctatgtcatttttaagggttttctgacaaacagaaggcttacaagtatataaactaagatgtagcatatttttgaaattcgagagctcgtcattcatagagtttttaataaactgcggatgagaagaatagtgggataaaggatgcaagaagaatatagctttaaatgtgattgtttttactttccgactgacatcaaattcaacatatttgttcctagattttaatctacacgcaccttttactatttactccttttcatgtgttttgcagaaggagaaattgattatgtgagggttctgaatcgtgcccttccgaatgatattcgagtattaggctggtgtcctgttccaattgacttcagtgcaaggtttttccactgtgtacattgtagaggtttttcagtagtaaaattgtggagtaaatatatttgcttctttgaaagatgaactagagtgttgctctgtcatgtgcattggtatttgggcttatgactaatgataaactgccataaacgattttaatggactggaagatttcattagcggtaggaagttttgaagatagtgtaacttgtaactcttctgctttcatgatggatttcttgataataatatatgattacaacacctgctttcaaattttttgtcaaatttcttggtacctagtacctacctcataaaccccacaaatcattgggcacatactcaataaatcccgcaaacatagtcatttgaagataatttcaagttctctgctatttttttatttgttgtacatgtctttactgcatattaatcaagggaaaaaaaatcgagctccctgtatatttctgtatttttgttttaaagttctttccttacatagtgtattgcccttttcattagaaattttcatatttgactcattcagtgatttattaatctacttttgtgtttgtgtgtctgtcagtgttagattgattgtcttctaatggttgccttatccaaaaatacaggttcagctgtctgggtagggagtacaaatatttcttttggggagacaatctagatcttttggtatatcttttagctcttttggattacttaa

SEQ ID NO: 237879 - DNA, 745 bp, Cannabis indica
tttttttgttctaaacatgttttgatttattttggatttgtattgcctctgattatttttttttggattaaaattaatgttaacttcctcttatctgaggttaaggggaaagatctcgccgagctatttgcatccgtaagggagaagctagcatcagtcccatccggcggtggtggtgcagttgcttactctgcacccacaggtggagtcactgctgctgcagagtcaaagaaggaagaaaaggttggagagaaggaagaatcagatgatgatatgggtttcaatcttttcgactaaaagctttgatatggagattttgaggtttttgctatttgaatgttgttttaatgttctatttttatttagatatttagagaaggaagcaaaatttgacactgtattttatatttattaagttatttagagaaggaagaaaaatttgagacacttttactgtataagcttttactctaccttgtttagtacattgcaattgtgccacaaaaaactaatgtcatatacttaatgtacattgtattttataatattgtttaatagtttaaatattctgctaattactatttaaaaactaacgtattattaatttattatataaaactaatatattattaatttatataaaaattagaattatataaaaaaagttaatatattatcaatttactaatacaaaattaaaagaaaattaaataatatatatgtatattggtttattaataatttt

SEQ ID NO: 237880 - DNA, 1171 bp, Cannabis indica
catcaagaggtatatattcttatcttgttttttatgtttagatttaatgtatacacatttggatatccattggactatattacaatgataatgagataatacaaattcttctactgcgtagctgatttagtactattaaaaccaataaattttccacttcattccttattgattttaagaaaccaactcgatgtaatttatccttacgaatagtggactcgtctcactatacagggacacaaatttgattcaaagaaaacacacgagagaaatctaaatttaagaatgaaatactcagagattattgtaagagcttttaatagagatcaagactttcttgttcatctactcataagtcaatacaactgaaggaaagtaggctattaccatcatcaagggatcgaacctttataattttggtgttttctttactttatattattcatatttattattttaattattctttaatcgttttaattttgactcattatcattggctaaaagcgagatcaacacacacgtagtaaataaatactattaatcaccaacatataaaatatataatactaattttggaacaaacaatactaaaaaatatataatcaaaaaagtttaacattcacaatagtctcatatcaataaaaatataagaacaaaataattttaattttagttaatttacgtaaataataattttatatatatttatataaaaattgcaataaaaatgttagcaaaaacaaattacaataaaaaattctaagaaaataaattttatattaaaaaaaattattaaaggattattttttattattcaaaggctaaaaaattcaaaaaaacgtgtatttcacttcaaaaaaaaaaattaaggtaatattaagtctatcaatcacccacataaaaaataaataattctaatttgagacaagctaaattgaaataatagaaatctatatataacctagaagtataaactcactatggtttctaaaccatgtgagactttttaaaaaaacttaactattattaaaagtgtaaaacttattgaaaattagaaaataaaataaaaaaaataaaaaaaatctacaaattagaaaatatagattattagaaggatatgattccacatggcccctccttacaattctacttttatatatatatatat

SEQ ID NO: 237881 - DNA, 650 bp, Cannabis indica
aaatcgtgtaagacaatgtactactaactatgacggatccgcacataaaacaacatgcaggttggtgatctgctcctatatatcacaccaattaacaagctatatatacactctagtttgataagatgtttggcaacagacagcccacaagatcaaggagttgatccatataaattacttaggtctgattttattcttctaagattgagttgggctcatttattattacattatagaatagaacatcaacatatactgaatcaaatcatattttatttatggaatttttttttaaaaaaaatactagagtttaaattaatttttacaaaaatacattcatacgaaagtttttcaaaaatagtgtatttttataaaataatagtaaaaaatataatagaacaaataaaaacaacagtagaaaattaaaaaataaccgtagaataacactaaaaacttaacacatgagtacacgatatttcttaaaaaaaaacacattcttttgaaaaatattccacccagcggtaaaaaagtttaaaattagaaatttatgtgttgtaaataattattttatttattcagatcagataagttttacctgggctcgataagaagacagtacgtagcgcagaatggtggcgtctcctatctct

SEQ ID NO: 237882 - DNA, 954 bp, Cannabis indica
aaaaaaatatattaaaaatttattctaaatacatatgaacaaaggatcttcatttgtattaattattactactaaaatcaaaactaaaagtaccaggttactctctgagcaaaaataatatctaaaatttaacaacgaagttacttttttaaattaacacgctactttgcaagcatagcacaacacacactatagatacaatgttactttttaaagaaaaattaaagctaaaaattcaactactaggttacttttttaaaataacaaggttatttatttattaaaaataaagtcacaatttaacactcaactatatttagtgatacatgtatcaagttacttacaaactaacatgttactttacgcaaaaatggaatcaaaattaacaaactatgcaaaaagcataggtaaaagtgtcaggttacaatttgaagcaaaaatagtttaaaattcaacaactatgttacttttttttcaaattaacacgttaatttgtggaaaaaatacaattaaaactcaacaaactataccaaattcaaaagtaaaagtaccaattacttcctaaagcaaaaacaaaatttaaaattcaacaactaggttacttttcaaattaacatgttactcaactaggtatattactaatacaaatgtcatgagttattttgtaaatgaacatgttactttcttcataaaactctgtcataactcaatacattaaataaaattcagtttgcatagattatttatgaaaagtagttgttgactggatttttagccaaccgacgcggagtcgtaataaatgagatttaaaccaaaatcacaataataaatgcaattaataatgccagaattcgtaataaatgtaaataaaagacaccggatttaaaaaggttcgtccccggatgtcggtaatagcctactccccttgagttttattgatctgagttgcaatag

SEQ ID NO: 237883 - DNA, 858 bp, Cannabis indica
aataaaaaaaaatatatatttgtatacatagttagggttaggcattttaacataatatatatcactcgtacattgtaccataaattgtaagagagtattgttattagttattggtgtcttgccaataataaataacttttttttatatataatacataatcttatataacacacctcttcctcttgtaatccttagtcctatagtaattttctagagaaacacaacaattgtcctatatatatgtaatggctcccacagaatatttcgtgtgccctaccctataataatgcttcaacatagaaacatttattgacaagaactttctcatcactatatacccatttcaaagtaggtcctacccaaaaaattataaaatataggtatataaaaggagtgtactatatataaatatgatcactatactactattgaatattataacaattattgagagtgagttgtggaatgaatttcccttgtgcaaaatgatcaaatatacttattagctatattgtaatagcttgtgattattaagatttgtaattattattattattattatgggtcatcgttgctgcaacaaactgaaagtgaagagaggcctttggtcacctgaagaagatgagaagctccttacacatatcaccactcatggacatggcaattggagctctgttccaaaacttgcaggttaatctctctctctctctcactctttcactattatgtcaaaatcattatatacttaagtaatcatgattagtagttttaattcttaattaggtaagctttaaatatacatgaatagaagtaatgagtactaatggaatgggtacaggattacaaaggtgtgggaa

SEQ ID NO: 237884 - DNA, 744 bp, Cannabis indica
tttttgaaagaaaacccaaaacgcgtgggtatgaaaatttaaggagatctccctcaatcgttataatcgttgactccactagatctccccctcgattgttgatcatttctcgttggtttcatggagatctccccaaggtgatcctgttaccatggcagaatatcgatgcaaaattctcaccgacgttcatagagatcaggctaaagttcctagtcggtgttcatagagatcgcaaaaagcttatacaccgttggtggttgttgattttggatctccatcacttgattgtgttggtgaagtgttgtcgacaatgaagagcaactcacttattttgctttgtcaagaaggataagttctttatggaagaagcctcctctaccgtattttttgaaaagaaaaactttagttttttaattttgtttattttctcgtacgataataaaaagagaaatttacgactgttacgaaaattctgtttattacgcaagtgtacgtatcaagtagtatctcacgcaagtgaggtcgaaccacagggaattggattaagtactactaaattataattatgattctatttggtaaaataataagttgcaattttaaaagtaaataactcagaaattaaagagaaaataaacgaagattaatcaagatgagagattagggaggtgaatcctgttgataagttacctatgttaatgcctaattgctatccttatctcaatgtgaaagacagattataaa

SEQ ID NO: 237885 - DNA, 1114 bp, Cannabis indica
ggccctcgtcaacattctatttacttgagttttttagctctggcagctgtgccttttttagcgggttcaacaagatgacacttcccaggagcctttacgcgctcttaaaactgaaacttttactcctgcttgatctcatcattgaaaacaattttctcaacgctgagcttctttttgataaaatcgtaataccgcagcaaatcatttgtcaactgaaataaaaggatttacagttagtgctttttcagcgtgaagaacctaaaatgatggaactggtactacagtatacacaaccaaatttaaccagagtgagccacattcaagacaaaatatatatataattaatcttccgacatttgtttcaccagctgaagtgacaaaaagggccttggaacaagagttcatagaaaaccaagaatggacaaacaaaaaagaacagtaactacctggagaagttgagattatgattttgcagaaaacaaatactgggacggtattttaaacgaaatcaggaggatagtcccctttgaaatgctagacttattgtagcatgaaatagatttgaaatgagaccaaagtaattaatcagctttttttttttgaaagaattaatcagcttattataagggtttcttattgtatagacaacacatgtttcacaaatccgaacaaaaatcagaaaaacattcactgaagtctgatgcatcattaaatatctgagaatacacaaagttcatgataatcatcagacttaccagaagctgttgaataatgaactacacatgtatttcattttgcaaatgagatggtagaatgacaatcatatgagttagcaaaacaacagcaaaggtatttataaataaacaagaaagggtattctgtacctcaacctaccatcttcatcttctcctaggtcaatggttaccttaatgaactctgtttacagttgagaatttcatagttcttttcgtccagcataagcattgaggccactgtttggaagaaggccatccttggccatgtcagcaagcacattgaaaactgcatccatattccttccttctggttgatttcaacagtaattttgcgagctcagcatcactaagccggcagc

SEQ ID NO: 237886 - DNA, 1954 bp, Cannabis indica
catttggaatgcattgattactgcagagatgaatctgggttcattcttgatggaattccttgaacaagaatccaagctgtaagttccaagaaaatgggactttaaaattatcttgttcgtgtttgtatataatgtttaattgtttgcctctgttaatttttgctgcaaacgaccctggtttgcaaattgaattccttttcatttcccataggagatccttgatcaacttgcagatattgatttagttgtgaatttcaagagcacggaaaagcatttggagaataatataggaaaatgtcaaaaatacatgggaaagaacaacaatgccagttataaaaatctaaacttgtaccctcagatggacaacaagtccacttctactgattctgaaataccgtggaaagagaagttcattaactatgcaaaacaagtatatatacatacaaacaagttacttttatatgaatttggggaccactataaagttgattgtcttatttgttgttttcttttctgtagagcaagtcattggaagaatactacaaaacacagaggaaacttgttgatattcaagtaagtgatgcacttggagaaacttggcaaggtttattggctgctttacatctccagcatacaaatgctgtaaatgtatttatgcttctttttcttcttaatttattattgttaatggtagatttgcatatctaactgctaagttgtccaggtttgagatctttcttattgaacagattgttatataattattggaaattatcgatttggaaagcctatcaacatataagagtttgtgaatccaaccagcaacaagattataataaagtacatgtgtacaaatattattccattatataataatataaatgcacccatatatataaaatgataatgtaaatggatcaattaatacaaatattaatttataggtaatcggcttgaagcttggaccaccattagttcagaaggaggaaactcgtagtgtggcggcaggttctgtttgccaataccaagtcccttcggttcaatctcatcacaggcgaatgctagaataggcaatcttatttaattgtggcatggcatacaatctcaactttactattagttcggaataatttaaaaaattttgccctgttgttttcaaatattttagtccaattttttttttcagtcatgtaagcattatgattatttctttttcttagagatattgcaaaatgggatgtcccagttgagtttaatcacttgaacaactgcaccacagaaaccacaaatatttaaaatgggttactttcttatattcccacactcatatgttaaggttctaatttgtctttattgttgttttttgagatttctgtattgtgcaatatatgaaaattggtttagtcttcttgtatgaaataataatgttgctttaagtattggattttctatttgttttattgtttaaatacttcttttaagtataaacaagtgtgaatgtgattgggttcgtattcttaaaatttatgatatttagtatcattgtgtttgtggctgcgtggtcgattaaatatgcatctttttacgtggtcggttaaatatgcatctttttgtttgggatgagaaaatatatttttaaataaagacttttattttatttttttatcctgttctctccatatttttactgttcaaaaaaattaataaaccgctcaacctgaataaatagctaaaatcaaactgaataagccgacaaaaaatccaacccgaataactttacgaaaaactcaaatctcccaatcaatatattgggcgggttgaatattattctaacccgcctaaataacccgaataaaccgatttatatattttttactaaaattatttataacataatatataaattacgtttcatagttaaactattttacatttaaagtttatattttatagt

SEQ ID NO: 237887 - DNA, 1268 bp, Cannabis indica
ttgaagatatttacgaaaatgccactgcatacaaactaagcatcaacatgccaccagcatgcgccacaacatgcgccaccacttgaccaccacttggctaacttgtgggcatcacttagcttgtaacgtgccctcttggaccgcacataacactacgcatagtgtgggactataccttgtctcagtcacacattctcgcaagtttcaatcaagagagaatctataggagccgttactgacacgtaattgttttccaactaaaaattaaattcatgtatcacatatctacgagattgtgctcttatttcaaagcaaaaaatttatattataacatcaacattttcaattcacaattagatgttgcaccaaactttattcattgaagtgcttgtttgattgttttgagcaataatatatcattatcatactcacaatgaacttctaccaccatcctaactatattgcaaaattaaattagttgtgtatgaattttggcgatcaattcaatataaagtttcagtttcttctatttgttctaatatgtacaagaaatcatcttctaggatttccatttcccttttgggttacatttgtagggtacatatctgaagtaaataaatgaatgaatgacacagagtccattgtggcccatcttcacgtggagctttaacttctcttccatcaattttagcaaatctgtttgtatgggcaaaagttggtgtccccattttagaactttcctatcgtatttgagatgaggaaataaacataaatgacttttatcaattgttttaatctgattacgtaagattctcttgtatatataagtaccccaggacctaaattattatacattgaagttttttttttgtaaggaattatacattgaagttaacaaacgcttatacacaaacactagttttgtatgtataatctaacgtttctatcatgacacaaaacatcgaaacgacatgaactctagctagctagtcaggtatagtcagctgacctcaccaatgtttctccttgcatatcaaaatgcttccagcccactttttctattcatatctcaaacaaaaataatatagtatcttacctttttcgtttgttgattaatataatatcttacctgatatttttttaatgctatcaaaatgatttaaagaacatttattgaaacaaacaaatatgaggagatttgattataaacttctattaattttttttttcaatttttgtatttaaattattatacttacaatattatt

SEQ ID NO: 237888 - DNA, 886 bp, Cannabis indica
aaagttatcgcgagaccaaacaactcatggcttttcttgcctgaaagagaaagaaagagatcttaacgggcatctggctaaggaggaaatcttttggaaacaacgcagcagagcaatatggttgactcatggagatgaaaacactaaatacttccaccaaaaagcatcctcgaggcgaaaaaagaatagaatcaaagggatatttgatcaaaatctgacttcgaaaagtacaaaagaagagatagagatgactatttgtgaccacttccgagagctattttcagcaaaggactatgagggagatatgattgcctaccttcaacgatttgtcccccttaaagttagtagaagtcaaaatagttttctactttctagttttacagaatcagatatacaatgtgctttgtctcaaattaatgctttgaagccccccggaattgacggtatgcctagactcttttatgaaaatcattgggaagtggtggggaaggatgtcactaaactgtttttggatatacttaataatcacatagactgcaggcacatcaacaaaacacttctctgcctaatttcgaaagtcaagaacccaacacaagtcgctgattttcgaccaataagcctttctaatgtcagctataaaataattacgaagtgccaggccaaccgaatgaaagatattctaaaagaattcgtatctgaaaaccaaagtgcatttatccggggtcgtcttattcaggataatgctatcttgggatttgaaagtctccactgcatgaaaaaaggtagatttgggaatggaaaaaagatggccctcaaactggatatgtcaaaagcgtatgatagagtggcttgaaggttccttaaagcaatgatgacttgcttgggt

SEQ ID NO: 237889 - DNA, 856 bp, Cannabis indica
tcaaaatatataggaaagcatgagaagggtctatgtgatattttattattttttccttttattattttttaaattttataacacatcttttatacataaaggagagcctaaacaaagttgagataactatgtttaatttttttttttttttcgtttattttcttattgtttctcctttttaaatatatttttttaatatctttgagtattagagttattttcaaaaagtcccacatactatagaaactattgtggtgatatacttctaagttatatatatatatagatcactatttttttactttaatttattacaaaatttgtattatttattttattttatgtgggtcttcattgaagaacttaattatgcttaattagttgtaattttttataaaaaataaatgcaaaacacaattttatattttttaatatttgtcaagtctttcatataaaaagtattttcttaaaattttttttattgtaattttgtttaaatatatctaaaacaatatgtatgtataaaggatgacctaaataaaattgaggcgacatgctataaatctttctttacatttttctcttttttttttcacattttttaatatatttttctttatatctttaaaatatgagagttatgtttaaaaagtctcacatggtttagaaactattgtggtgatatagatctaggttatatatggattgatatttttttcactttagtttatcagaaagttagtattaattatttattttatgcaggcgattgaagaacttaataatgcataattagttgtaattttttaaaattaatgtaaaacatattttttaatctttgtcaagtatttcatat

SEQ ID NO: 237890 - DNA, 2235 bp, Cannabis indica
agtactcgagatacatgtctttggcctcacccaggtaatcaaaattcgattgagggttagcctttccaaaagtcataaaaaatctacgagaccggctgtctctaaggcatgcactttttctcttccagcctcgtcacctccgctcgctgttgttcagcctccgatttgtacttctcaacctcagttgtaagctcctcctccttagacttcttctcttcttccagccaacagaagacagtccgaagaactcccctttcctcttgaagacaattcacttctgctaacaaggtgccgatggtagcttcaagttggtcagaagcctcgagatccttagtcaacttggttattttcctatcggcaataaaaagcttcttgttgacttcacctagctccattcggacagctacgagttccaccctggcatcattagcatccttcctggccaagtccacttccgccctcatggtgttggacatggcagcgttcttggaggcagcagacttagctcgggaataggtgtaagccaacttcagtccagcctacgcagagaaaaaatattagagtctgagccaagtaaagaaggattaaaggaagatgtcaagaaagacttacccttgtaaattccctcaagactcctcccatcagcagccccagggaagattccttgtcaacgccggccagctgctcactcacttcaagaacaaaccggttcatgtagtgagtgagcatctccttgcctctcttggcttttggatgcactggcaaaggtggggtaggagcccgcatctgctcagatctgctctgggccagctcggatccgctgttcgactattcgggcctgtccgagcttcctcctcgagaatctttgcacttagcagctttcagagcagaagggtccgcgatagttagctccttagaaagatcaataacctccccggctggtgccttttccttggatggggtcgcctcaccgcccctaaatttcttggccagaggagatgagcttgagcttcctccaactctgcatgaaataaaagcaacatggttagaagaaaaaaggcatcagaagtataaaagcatgataaacaagaagtttaaaaataagacggagtatcctgcgaagcgtttgtccgagcaagactcaaaagatcatcatcacctgacaagtttcttatctccgctaggacggccttcccttttcctagtacgggggaaggtggttgagccggtaaactgggctccctgattcgaatggcatgttcaacgagcctgggctgggccagaagtttcttcctccttttgagcggagtcacctgctcttcctcagcctcatcttcaggatccaaaggctcatgagcatactgtttggcccttgcacctcccttcaacttagcttcacgcttaagttgaatgagttcattctcctaatgagctccttcagcccgaccagctctagatttcctcttcttctccttcataggctgaggaaatgaaatcattcgggtaaagcccgtactccacaaagctgttctcagaggtcaaggtcaacagagtgatatcccgggcagcacccggtagcagagcaagcttttgagctctatcccagagggcaagtgtgaacagagggcgatgatatgtggggatctgttgaaactgagtgtaggtggtgcccatgccttccaccatgaagtattcgtcaacaaaatgcttaattttgctaacggccttatccccggtgctcgtcaaccacttgaagtctggttgaaaaaaatagaagtaccccgatctgccttgcttaggggtagacttcaagtcaaaaaaccagctaacctcatgcagagaaggcatatcccacttctgggaggcgtagagaacgaagaaggcagacagatacttaatgcccttgggagtgaattgggtcggacagaggcggaagaagtctgccacattcctaaagtatgggtgcaaaggcagcaatgccccttgcttggcatgagcacccgaccaggcacacattcccctttcagggtttgtggttcaattgttgtaagcaggaatatagcagtctaactcgcccaagtagccatcctgatcgatatcccgtaagcgtgcctcagtgacattggacagagggctcacccacctggcacccaaagcaccctatcttctgtgaggaaccgcggcagtaagttcctctttggcatagtccacgccctcaaccaggacgtcgcaatc

SEQ ID NO: 237891 - DNA, 608 bp, Cannabis indica
ttagttgtgaaattgttagaagattttctggactgttggatgacagtgatgataatctagtcatacagcaaagtaatggagaacagggtattgggctggatttttcttaatgttgtccaaaaaaagggacatatttggatgtattttgattataagatttagttattcataataaatatttgacctttgggttctcaatttctacttttacaagcttgtttgagtttctttatcttaaatcttaagcttgatatattttctattttcctcttgtttgattgaagtcaaactaatttttgaattatatgaatcccttattcctccatatagttttaactgtatcattcattcactgattggatttatttttgtttctaaagatggagaaggcagtgaagacatacaaggcaaggtttgtggtgaatgttggagaatttggggaacatgatccactcttgcaaaatgtaagaccattttgatttcagaacttaaatccaactttaagtaaatgtgtaaaagtgagtaattggtcctttcttgaacaggcttctcagctggtatcctcaccgaaaattccctggtatgccataacttgcaatgatttagct

SEQ ID NO: 237892 - DNA, 845 bp, Cannabis indica
actaaaagtagttattttttgtagtaatcaccacttgtgcggattagattggattgaaaattaaaaaatctacacttatgcagattagatgttgattgacatgtaaaagtagcccatccgatccaatccacacatatttatataaaattttaagaagttatatatacaattactattcttttttggaaaatcaaaaaagtttattcatgctcaaacaacaacacttacaagataagttacttacaaagctttaattaaagctttcactcactcacctattttattcaaattcttagtattcatagagttcactctagcacaaacactattagtaatacaattaaaagtgacttttacagtaggaagtttttaatcccaaaacaccttgttttgagcatgccaaatgtaataaattgtagctgtaatgacactcaaaagaacttttttttacctctagaaacttttgccttccgaatccattttaggacatcatggagctctatttttcgacaagaaatacaagtctaaagtcaaacttgataaaccaccaaactgctgtaaatacattaaaaaaaaaaggtaagaatgagtcactctccactccactaccacacaacaaacacaaggaagagttgtataattaaactgacaaagtctgtccaagatagacaaacgattcttcaaagatagccaacttatgaaaatgtgttttggagtgcaaaaactatcccaaatgccatcataacgccatctaacaacactcccataaggcatcttggtgtatatatcagctatggaaaactaataatttcgaaagttttcttgggagaagacttgttttatcc

SEQ ID NO: 237893 - DNA, 615 bp, Cannabis indica
tttttgggagatttgggtgcagatttctccgattcagcagccttagacttcttgggtagcaaaactgggttaatattgggaagaacaccaccactggcaatcgtaacaccgtgaagcaatttacccaactcctcgtcgttcctcacagccaattgaacgtgtctagggttaatcctgttcttcttgttgtcacgtgcagcatttccagccaattccaaaacctcagcagccagatattcaagaacagcagctaggtagacgggagcaccggtacctgtacgttgggcgtatcttcccttcttgagaaatcgagcgatacgacccacggggaactgaagcccagccttaacggacttcgtcaccgacttcttcctctctccgcctttccttcctccggctcccttggctgctttcgtggcttccattgatgaaagttacgagcttttttctctgaaacgattgttagggttttggagggaaattcaattttgttttgatttggtttttgaaatttgatgcagatgcaaatttatataggggaaaggggactgccacgctggcaatccgcgacgtttcatttcgacgaatgggattaaaggctttaatccaattaga

SEQ ID NO: 237894 - DNA, 1454 bp, Cannabis indica
aggtgcaattttttccctttggtggaccacgtcttgtcttgtgacatgagtaaaaagttctaagaagttttggagtgtttagttttgttctgtcttatggcgtctacgagtcagcatggtaactccttgaatgaaaagtacgactctgtacacctagaggaagaagatgaggaagaattattatgtgatttcatagaagatgtggggcaaccaatagacgatagatggtgtttagtggggaaatttctgacaagaagatctattgatgttgatgcgatgaagcacacaatggcctctctatggcagccaggcaaaggagtatttatcaaggaattggagcccaatcgttacatctttcaattttatcacgaaattgatatccagcgtgtgattgagggcagtccctggacttttaatagaaatcagttagtcattcaacgtcttaagaaaggtgaagatcctaagagtgttactctgtcttgtttggatttatgggtgcaacttcataatcttagaacagggttcatgacagatacagtggtgaagaatgtggctaaatatataggaacttttgtcaagtcaccccaagaatttcatgggaatatggcgtgattatctgcgagttagagtaaccatcaatattgagaagccattgaagagaaggatgaagttaaagaagccgaatggagaatggatctggtgcaatttcaagtatgaatttctcccaaccttttgtttcatttgtggtttaataggacactctgaaaggttctgttcgcgtttatttgaaaaaccactggaagaaatagagaaaccatatggcatatggatgaaagctgagccaaggagaagacacaatcaagttggatcacggtggctgcgtactgggacagaaacagatgcccagttctccgatgaatcaacagtccaaggtgtgaacatggaaacaatcaatgtgattaatgctcacgatcacagtatcaataccattaatgctagagttgacactgctagtatcatggaattaagggagaatcagggagttaatcagcaaggtgtactgaataatagtattgataatactgatatgctttatggtgttaatcagcaatcaaccgtgattgagggccactcagacaatcatacattaattgtctcggattccaagcgtagaagaacaaatacggatgggattgaaaatttaagcgaggatgatggagatatgaatgtagatgttactgatgggctgtcaaaaaatgggcaaagggtgggtcctggggtccaggcccacctaggaccatgagtattcttagttggaattgccgtgggcttgggaacccacgggctttacaattcctaaaggatattgtgatccaaaagaggcccaaattcgtttttctatgtgaaactttaagtaaaaaggatgtcctagaaaggcttcgtgtaagccttgg

SEQ ID NO: 237895 - DNA, 598 bp, Cannabis indica
actttaaaattaaacttttacttctatttggttgaataaatattttatgacgtgtgtactaatttagatgtggatcgtggtgtgccaaagatgcaagacttgaatcgtagctctcctaaaacagtcaggtgggctgagggggttgagaatactgactttcagagtttgggaaaggagatttggagcaaattcaaatcgaatagggtaccttctccctctactcggttgaaatatatagaacctctgaaagttggagaccaaattgtagctcttttagatctggaggaggtcaaaatagaagcctcagtttagaagaatgttatagtttgtatcgttcttggtgctaatcctccattcagagtgtttgaaggattcattaaaagggtttgggggaacctaagcatagataagattatgagaatgaactcaggattcacaatggttaatttcagggataaggctactcgtgacctagtattggaatcgagagtcattcattttgaaaaaaaaaaaaacaaaaaaccaagtgatccttcatccttcggaccacagacatggatttggtgagtatggttagatcagttctggtatggattag

SEQ ID NO: 237896 - DNA, 1091 bp, Cannabis indica
gcgcgaccatatggtcgcgcatggtcgctaagtgtaacttgctagaaaactatattatgcgaccatgtaggtcgtacatggtcgctcagtgtaactgtaaaactatactaagtgaccatgtgcgatcatgtatgtcgcacatggtcgctttacactaatttttggattcccacatgtatttctaaatgcatcttaatggcttcaaaataactataagctaagtaatttgatattcttactttgcacttgttaatttgagaattttaactttataacaagtatagatcacatatttatatgcatggactataatggtgattggaagattatcgataatcatatttgggaaacgtttggtactggttgcatcaagggatttgtggttgatcatagtattaagtttcatcaacttgcgattaaagtctatgtaaaaataggtgttgatcaaaatttgtatgaaattgaaataactcataaagtggcaggtgaaacattcaacaagatagcacaaagtaagatttgtggtgattttaatttagaggatacattgaaggagttgtacaaagctaaagaagtgattcttttgtatgtgtgcgtaaaaaaagtataatgataaaagaaagacaaaatttgtcattgatgatgatggtgatggtaatgaattcactggtgatgatgttgaatttggttgtgatgatgatgtttttaataatgaaagcttttacgataattattttaggtgtcatataataaatcaagttccgaatgatccaagttatgtcccaaatgaagatataccacatagtggtgaaggcatcataggttccaatcccacaccagatgatattgtacatgagagtggtaaaaataaacttcaggaatgtgataaagtagtgaagaaaataatggcgtaattgagaatgtcattgtagtcgaaggaggtcagattatcccttatcaacattatgatatgtttatgggaaatgttgcacaatgtaatggagaagcaagttagaatagtggcaggcatgatagatggaatttaaaagtgggtcaacactttgtgaataaggatgatttgacttattatc

SEQ ID NO: 237897 - DNA, 1040 bp, Cannabis indica
ccattggggacttttaaattgaacgtggatgtatcattggatgataaaagtgatacaattagagttagagcaattattcgaaactcacaaagattagtgatggcatgcatgtcgaatctttatttggtaatggtattttttattaatgttttgctgatttaggaattttttatgatgttgtttctcatgcttccaaataaggtatgaggttaggttcaatgtttatatggtttgtacggacgaagagaggtttcccttctgtccaaaataggctcgatatttatttaatttaaatatttttactagtttaatatcttaaggtgaatcttattatgttctacgatggttttgtagggaattttacagttatccaagttgaggcagtagctattatggtggcattggattagtcgcttggaattgatctccctctccattctatagagtctgattgcctagttgtgtgatctctgcttttgctaaaagattttctcattgtaatgaccttagttctcttttagatgatatttctagtttactatccaatttttctgaagtgtctctaattcatgttcgtcggtcagccattatagttgctcataaattagttgtgcacgtaattaaaatagatgataaactaatttggatatagaattttccttttttctttttcaacgttcttaacgtttatttttttcaataaaattttgttcattgttaaaaaaaacattattttaatgaattttagattatactttagataattactcaactcattactagtcttagagatattctcattagtattggtgtacatatgtttaatcttaaaaaagatatacatattatatttagtgaagaaaatagtgacaaaatatttagtgagtttgaagtttgaacgactcctggttcttggggtgggagtcttcgtctccttcttcgctacgctacgctacatacatatccgcgtaagaagaaccccatcaaataaaggactctcttctctacaccaatcaaaaccaggcctttcaagtttcctc

SEQ ID NO: 237898 - DNA, 713 bp, Cannabis indica
gcttcttgtttcggttctagtttcaagtcacgaggtacggccgagtccaggcattaagtcccagatcccaagtcctgacatgggtcctacgtccaggtttgggtctagggtcgggtcccgaatcacaatccaagttgtgaggcccaagttctggtcccagtttgggggaccaattcctaggtctaggtcccatctatgtttgggtcctaggtcgcaatccaagtccaagtttgtgttccggttcgggttcatgtcttaggttaatgtccgagtccaggtcccgatttgggttcgggtcccatcctagtctgggtttaggttttgggcccaagtccgagtttggttcatgggtcctgggtttggcccaaatttttaggtttgggtcttggtctgggtccaggtcccggtcttggtttaggttcgaggtgatgggtcccggtcttggttcaggttccaggtcatgggtcccagtctgggtccaagtgccgataggtgttttggtctgagtttgggtcctgtaacagtcccaggtctgggttctcatcccagtcctggtccgattccgattccgagtctggatcccggttcgggttcgggttcgagtcttggtacggatctgggttcgggtccgagtcttggtacggatctgggttcgggtcctaaattcaaatactgactatgggtcaggataaagccttaggtctagatttata

SEQ ID NO: 237899 - DNA, 1451 bp, Cannabis indica
gttcgtcattgtggagagtgactatgggattgtgatcaactctctcaaccttgttttcgcttgttggatattgagactactctaattgtttgttttgagctctctagattttttttgatggttgcttgttttggtgtattcccagaatttggaattttgttgcccataatgtggctaagtgagccttcacccacaatcagtttggttgcttacctatttctcacattcggaaaagacttattttgaatgaccacgaggtctaattttcttattaatagatgaatcatttaaaaaaaaataaaataaataaataaataaaggaagaaaatttaatattttaattgttggagaaaggaaaaaaacccaaaacgttcaaggtatacatatacaaaatgacctatttattttagccttatcttctagatcttcaaatccctttttctccatatctctcttccaagtacactcattcatcataatcgacaaactatgaatacaaatcaaaatacatttgctactagtcaaagattaattgttggaaaaaactaaattggtgaaatatggtacaacactatagagcaactagaaaattaaggacccacataaattttatattattttaatctatgccattgtcggccactagagaattgctaaaaggtgtcgtatctaacacttttctcagtgtcataatgttatttcatataacttaagaaaataatttttatggaatattgctaaccaatcgtgaggtgctacctataaaaggtgttagacactactaaaacctaataacaatgctttggttactaagggaaatttcaacttcaaaggctttccggtgagaggaattcagccgtttcttgtccaggattttttttttttgggtgattgccatctgagaattttagtatgttttctaacttatttgtgcttcctggtaattaagtgttctattacaaataaataaaattataaaattaaattaaattaaaaaaaaataataaattaagaaagtatacacacataaaaagtatattcaagtgtttctcatacaagcaaaaccaaatttcattaaatgaagtgttatcatcatattgggtccgacacactctatgggatcttttcccacgcctctataaaataattgtcctatatatttattataattatattttaatgaaattatatattgttactaaaaaagaaataaaaaactttacaatataactaaagtttttaaaaattagattttgaacctccatttttttaatcaaacatattgaagcatcacacacaatttggacaatatacaatatttcgcaaaatattatattaaacatatgtgttatacatatatagatatgcatatttatacaaggttgatgttacgtttaatgcacgtataattagtttttttttttgttttttaaattaggtgatgttaagtg

SEQ ID NO: 237900 - DNA, 913 bp, Cannabis indica
caacttcttcgtggcccaataagctttgtgttccaattcaacgggcaaatgacaagccttaccataaactaaacggtaaggagacatgcccaaaggagttttgaaagcggttctataggcccaaagagcatcatccaaccgttgagaccaatcttttcgagtaggattcaccactttctccaaaattcctttgatttctcgattggaaatctccgcttggccatttgtttgaggatggtaagctgtagctatcttgtgcttgacactatacttagccaaaagagccgccaacactttgttaacaaaatgagttccctcatcactaatgagagctcttggagtcccaaaacgagtgaagacattcttgtgtagaaatttcacaccaccttagagtcattggtgggacttgcaattgcttccacccattttgacacataatctacagccaccaaaatgaataaatttccaaaggatgggggaaagggtcccatgaaatcgatgccccaaacatcaaacaacctacctcgaggataacttgcaaaggcatctcatttcgggcagaaatattaccaacccgttggcatctatcacaccgtctagcaaactcataagcatccttgaacatggaaggccaatagtaccccgattgaagtacttttgcagctgttctttggcctccaaaatgccccccataaggtgatgagtgacaatgctcaagaatattttgaacctcttcttgcggcacacaacgccttattacacgatcagcacactgttataaagaaaaggttcatcccaataataagacctcacatcatggaagaacttcttgagcggttgcccttttaaatcagatggatcctcccactcactaagtagttggcaaaatcagcataccaaggagtggagtctt

SEQ ID NO: 237901 - DNA, 1270 bp, Cannabis indica
cttgcgccttgtaccattgtcgggtgtcaagtagtcccgagttgaaggagtcgtggttgtagagtacctgttgtagggacgtcaggggctacttgttccatctcaccaccaggccacgatgaggatgtggccgtactcggtctcgtacctctccgcgtgcaagccttgtcctttgattccttccttaataatttcctcttcaacacgtatgcaaattctcacttctcttcacatttctcacactcactcacgggtctcacacaacacggctctcgcagctcgcaggtgagcctcgcacacaccgctcacatgcgagcccttcacacaccacacacagctcacattcgagcctctcacacctcgcatgccacggctcgcatgcgggtctctcacagacattttgcatcacgacttgcatggacgtctcgtatgcatcacgacttgcgtgaatgcttcaccacttgcacaaaggctccatgactcacacaaatacttcctagcttgcacaaatgctccctgacttgcacaaatgctccccgacttgcacaaatgctccccagcttgcacaaaagcacactggcttgcacaccccactagcacatttcagtggtcttagtattttggccaaaactttctcgatatgaaaatcctccaacaattgccacttagtaagttagtcttactaactctacacgcaagcctcgcacacaccacacacgtctcgcattcgagcccttcacacaccacacacaactcgcgtgtgagaccctcacaccttgcatgtgggtctcgcatggatgtctcgtaccacagctcgcatggatgtctcgtatgcatcacgacttggacgaatgctccaccacttgcacaaaggctccacgactcacacaaatgctccccagcttgtaaaaatgctccccgacttgcacaaaggcacaccgactcgcacaaaggcacaccgactcgcacaaaggcacaccgactcgcacacaggcacgctttctcgcacaaaggcacaccggcttgcacaccccactgtcacatttcaatggtctttgtattttggccataactttctcaatatatgttggaattagacgattcaaaatgcgttgaaaagataagaaattgatctatggtttttatgtgtatgaaaatatctaattctaagcacatcattatgaaaaatccttaaaaaaaaaattcacttagtaagttggtctaactaattctactcatgcccgccaacctctatcaaaaataccttaaa

SEQ ID NO: 237902 - DNA, 1231 bp, Cannabis indica
atcacgggtcccagtctggtttcagttcatgtcccaagtttgggtctgggtctaggttgaggactgagattggggtccaattttaggcctcgatcccagttctgggtcccaagtcatgttcaatgtttgagtttgagtttaggtctgggttcgagtcccgagtcccggttagggtttggattcaggttttggacccgattcgagggttggtttgtgtccgagtctggatcctggtctggttacagttttgagtctgggtccatgtcctcgtcctggtcctgttcctgggtcttgatccgcttctagtttcggttccagttttaagtcacgaggtacgggttcggggtgaggttcaggtccgggtttcggtctcgagtaggattcgaggctggctctggttccgaatttggccctgggtctaggtctcggtcccgttcaaagatctcggtctggttccagttcaagtttcagattttgttccaaagtgtgggtctgggtcttggtatgtgtccgggtcctgatttgagtttgagtttgcgttcgcgttctagtctaagtcctagatttagacatcgacaacgaatcgagtccaaccatctagtccaggatcccaggtcccgagttgggtcctatgtccaggtttgagtctagggtcaggttcccgatcccaatccaagttctaaggcccaagttctaggcctagttttggggcccaattcttaggtcagggtcccccatctatattcgggtcctaggtctcagtctgtgtttgggttcgggtccagtccgagtccaggtcccgatttggcttcgggtacgagttcggcacccactcccagtctagctctaggttttgggtcctaagttcgagtctggttcttgggtcttgggttcggccctagttttggggtctgggtctgggtctaggtcctattcccagtctgggtccaggtcccagtcttggtttaggtcccaggtcacaagtgttgatctggttcaagtcccggtatgggttctggtatgcgtttgtgtttaggtttggaacctgttacagtcccagtcctggtcccgattccggttctaggttcgggtctggtatcaggtcggacgtgaactagggacccgatcccagacccagactcggacctagacatggatctagatacaaacctggactcaaacccagacttggacccatactcagaccaggattaacacgtgggacatggat

SEQ ID NO: 237903 - DNA, 643 bp, Cannabis indica
ctgctgcagcattcacctaccagaatactacaagtctccggttatgttccacacaatgccagttgccactctcaatccgaaatgtctagcaaaagttcaattcatttaattctaattatattaactacccaagagaaagtagtgttcaatgaagttgctataatgagaagtcatgacaaaaaagattaataaggatcttgttctaagaaaagaaaattatataaaatcaactaaactcgtcataatatatagttaaatatctctaatatatatggtcaaacagtaatcctctcatcgctttagttagcctagttatttaacatatagcttaatttcttaaactttatttttactttaatgctaataggataattaattatgatcattatctatgcacgtagtgcaataataataaatctactgattaatataattctcatacatataaagtttagtatatatcttgtaaagtaactggttattcaactaagatgcaaatttgtaaattgagtgccacccagataaagggcatccaattatttatgctagttcttcatacttctgtatcataccttcagacttgttatgccgtgttcaagctcattttgtgtcgtgtcagtttgcaatattgtgtagtgcttgg

SEQ ID NO: 237904 - DNA, 1381 bp, Cannabis indica
agataagtattgtcatatctgttcgatttggactgttgaaaaaaaaaagactgatcgagatgctggaaaagttttttagaggtgcgaaatatttgtgtggaggaagggggcattatgattgcggatgggaattgtgaaatttgggacagatcttggatccccggtaggaaggaggaggaaatcaagctgaattttatgttcgagaagaatcagcccctttggcaagtcaaggatctatttgtggagggcactagaatgtggaatgagcaacttgtccgtgagtgtttcaatggaggaattgctaatgatattctcaacatcaagcctttaacggggggcacggacattgtgttttggaatgttgcaaagtcgggcaaatgttctatcaaaagtgcttactgggctagcaaacaacaccgtttcaatacgcctaataagttttgagaaaaatggtggaagctgcgcctgcatcctcgcttaaagtttctggggtggaaaattctttcttacattctccccacatcggccagattgggtccaagggaggttgagcataggaagtgtttattttgcaatctggaagaagaatctactctccatttgttttgtcattgttcggtgactcggggtatatggttcagaagttcttgggggattcaaattgatcggcttggctggaatagtctattggattttggtggatagtggacgagccttaaggatgaggcacttatcctgtttaccgcttgagtgtgtgacactctttggaaatggcgaaatgacatgatatttaagaatgttggctgtgatgtggagcgtgtctttcgggattgtatggtgagatttcaggagttttcttcttgccattattgggaagatcgccaagagactcgggttactttgaaggacattacaccaaactccatgtgggacgattactggtgctgtaaagttgatgcctctgtgtctagtgttgatgcaggagtggcggtagtgtgcttgtatgatgggattctctccaatccttagattgctgttgacttttccatggtgtcgtgcatgttggaaggggaattgctgggaattcagctagctttgaaggaggcaactgaacatcgagtgcgcgaggtcaagatagaatcagattctaaggtggcggttttggcttttgagtctggttctcttccttatggttggggtacctatcctttgttctctttgtgtcttgagctgtgtaaatcctttgaggatgttgttgtttttttcattccccggttggagattggtttggccgattctttagctcgttgggctagaaagtcgagggtgaagacttcgggtcttttaagagatgtagccccctcttgtggctactagtttt

SEQ ID NO: 237905 - DNA, 1052 bp, Cannabis indica
ttcacactttggttattctccctttagtcttctctgatgacgagaggtagatgttctcttatgatagtggccagctggttgtcatctaagtaaaatccattttcttggagatgttgtgaacgtctacgcatggtggctagttaatactcaaggaaatacatagctatgggtttgccttcccgcatacgacaccaaacttttgatggtaaaaactcgtcaacaagataattataaacaagcaaatgctaagaacttgagcaaatatgttttagaaagttaaagaactcaaatgacaaatatgacactcttctattgattctccaagctctcttacaaacaattttccaacccattcttcaatggaagagaagggtatttatagggagctctaatggctccaaaatacaagtggtcccaaaagttgggggacaaaatttcttttgtaccatgaagatcagcgcgttagaggggtagtggagaagtggtggtttggtgttagttcgtaccccgagtgggacaaaagggggtatttctactacttgtaccttcatacatatcgtacgtttgttcccttctcagagttcccacatcattaaaatctagttaagtgttgacaccatgagacatgagccttgttgtttagacttagtaagaattttctccgcaatccctttggtggtccctccattgtaacatatactctaagtggtattggtcttttgtgtagagcaagtggtattggatggtaactaggggagtgagtgggaggataatggtaaaaatagagatggagagaggtaaaaaggagagataaagatatagagagatatggagaggggagtgtgagggagcgaggagctccctttgggtgtgtaagtaaggagggagcggggagaagagagcaaagaaaaagaagagaggagcggggagaaggagaagataggagagacgagcagggagaaggagaagataggagagacgaggagagacaaggagaagataggagagaggagcggggagaaagagagaagagtgaggagagaagggagagc

SEQ ID NO: 237906 - DNA, 972 bp, Cannabis indica
gatctaaactcatttagatctctgtacacaagaacacttagcattcacacagttgaaccaccttcagcacagtaatctgaactctcttcagatcaggcagattcaatctccatcttcaacctcaggaagaccacatgaatttctatctacaaaaacacaaaacaaacaaaggaatatgttgccctagcagagcaagaatcaagaagatgattctaaccgaagagagttagttagcaaaacagacacaacagaatatatatcctgaagataataaaaactgactaactaaccaaccagctaagtacaactggcatattctaacaaacacgagaaagctgacatggcactaagatagatttagcgagatcagatgcaactaaccacagaaaagatgttagaaaaacaaatcttgaagcagaaaaactgaacaagagtatttacctaatttgctacacaaaaacatgacacttacaagctgcttcgttatcatcgacagttattgtattaatttgttgtctatttcatatggtgcacctgcaataattgtatttttgaaggagcatgttgctaagtaagtagattaaactttgtttcaaggctagagttcaattttgtaactttgtcgaagtttacatctacagggaaaaaatgtaatggctattttaaataatagtctttgattcgttcgggttgctgtttagtaatgtgtgttgtttagtggttgttaaaatttttattttttcttccttgtttcaatatatataacaaaaataaaataataaaaaaatattatgacatatattttgaggtgcgatgataatacaaaaagttgaaatagtagaagattgatggtagattctaagttaaatacaatggggtaaagaatttaaaaaatatatatatatatttgaagagaccaaatgcatatttttcttttaaaaacttaagaatcattaatttaaaatgagcatt

SEQ ID NO: 237907 - DNA, 742 bp, Cannabis indica
aaaaaaattaaaacaaaaatcataatatttttttcttctattcttttttttttctttttcttttttctttctttttcattttctcgataccttcttcttcttctctctctctctagtatggatgcaaatactaggtgcgacgccattgccgaggaccaccgagtcggtcgaggaccaccgagtcggtcgaggaccaccaagccagcgtcgttgctgaggaccaccgacccaggtgtagtcaccgataaccaccgcgtagaaccgatcgatcttaaccactgcgtagaaccaccgaggaccactacgtagaatcgtcgatctcttagccggttagccccgattctctctctcagccccgatcgatctcagccacgatcgatctcctctctctcctaatatcgatcacctttctctctctcccgatctagagtttttcagtattttttttgcaatctttgttgttgatatttctgtgtatacatatccctctttggatatttttgtgtttttagatttagatgagaaaagataatagttttgggaaaataaatttagggttttaagtatgagttttggggctgagattttgtgtatatatatgtatatgtgtgtgtttgtttttttgttggatttgaatttgtttaaattaatttgagttttattttgtttgattttttttttttttagtgatttggatttgaaaaatagattctgtggtgatttcgatagtggtgggtggtgt

SEQ ID NO: 237908 - DNA, 1297 bp, Cannabis indica
ggttctggtctgagtttgggttaattctggtctcaagtttgggtcctagtcatagttccaatgatgattctgatctgggtttggtttagggtctgggcatgggtctaggttggggtcgggtaatgagtcttcctccgagtttgggtacgggtttttcgaatcccagtttgggtccaggttcgattcctgggtctgggtcccaagttcgtgtttgggtctacgtctgggtctgggtccaggtccagtgttttgatccctttttgggtctgggtcggtattcgagtctgggtctaggttcatgtccatgtctaggtccgaatcccaatttagatcaggggctttgtttgattctgggatcgagtcccgattttgggctcaagtctcggtcctagtctgggtccgggactgggtcggggactaggtctgaggccgagttcttgggttgggttctggtgtaattcaggtccccgcccaggtccaggtactggtcacagtcccggtcttgttcaagggtcctggtcacattctgattcaagtttttgtttcgggtccaaggtctgggtctgggtccacgtattggtccagctttgagtctttatccgagtcccagatcaagacatcgactatgggtcttgtccaagccccagttctcggatcctgtgacaaaatctgatcctaatcacgtgtcccagtcgagtttcaattcatgccccaggtcccgctctgggtatgggtctagctgtgggaccgagactggggtccagttttgggtctcaatcccagttctgggtctcgagtcctatttaatgttcgagtctgagtttaagtctgagttcgggtttgggtcccgagtcctggtttaggttcaggttcaagttttggacccaatccccgggtgggtctatgtccgagtccgggtccaggtccggttacagttttggctctaggtccaagtcctgctcctggtcctattcctgtgtcctgatctgcttttagtttcggttctagtttcaagtaacggggtacgggttcgggtcgagttttgattcgagtctaggttcgggtcctgatttaggtctggggcgaggttcaggtctgagttttggtctcgattagggtccaaggctgggtctagtttcgagttcgggtttgggtttaggtcccggtaccgttccaaggtcccggtctggttccagttcaagtttcggttttggttcccgtgtgtgggcctgggtctttgtatgtctccgggtcctagtttgagttcgagtttaggtttgggttttggtttaagtcc

SEQ ID NO: 237909 - DNA, 785 bp, Cannabis indica
gccttggaacatattttttagctcatccagttgtgcttgcacggcaggattaacttgttaagcctcttggccgaccagagtcacatcagcatatctttgagctggattttgagtgcgagccctgggctaaatgacaggcgcgtcatgctgcttgtccaaccctctccttttgttcagatcatctctgagatcatgaaccgttcccaatcgattaaatatagaaacacctggttgtctctgtgaatggttggtttggccaatcagctagccgacacaattaactttggtggaagtattaggtatgacctctcctgatgaagtgctagacaaggtctgcctgcctaccacttggtccacatgtggaacctgtgatcggggattggaaggctgaccacttagagtttgagaggtgttcacagcgggatctttgtttgtctcgcccaaggaatgacggttgcaggctgttgactagtagcctgacaggctttccgtatcagcacggtggcctgtctagtttgatcgtctatggctgcttattgagcccttaatgtttccatctctttgtccctccacttagccaacatgcgcctttgctcttcaaatgcaagattcaccgcagcacggatttcctcctaatcatgatgcagggtgttggtatgaccttgaatgattccaacagcagcacggaggttttggatctcagtgtcatctccaatggttgttcaaacatttgttacgggcggagcaacagtgttgggtatgccctaattagctttgaactggta

SEQ ID NO: 237910 - DNA, 788 bp, Cannabis indica
atgtggtttcatcgtgggcaccgcaatcggcggtgcttcgacaccggtctactggggcatttttgtcacactgtgggtggaattcgatactggagagcttgagtcaaggtgtaccaatgattgcttggccgctttatgcggagcagaaaatgaacgctacaattctagtggaggaggttggtgtggctgttaaactagctgtggatcttcgaaagggaatagttacgagggaagagattaaaagggctgtgagtttggtgattaatgatggaggggatgatgatgatgatgatgatgatgatgatgaggaaaggaacttagggaaggtgttgagacttaaagctagaaagcttaaagtgagtgcagagaaagctttgagaaaggatggtggatcttcttatgattcgctaactcagttaactaatgatttgatggtttcgcgaatatcttcttaattaatcttaattaatcaaccacatcaatatcaataatgtatattttcaataaacgttcgcataagtcatgataactatgataaagtgtgtttttttagtcataactacgtccacgtataaatcataactatgttaaagtatgtttgtttagttgaaaataaatatatatcaagtgatttacattgctattgttttttgttttttattttcaaatattatttttgaaatgagaacaaaaaaataggttttgaagttttcaaaagacaaatcggtttctagtgttttctaaaaatatataatattgaccaaaagtgaattattttttaaaactag

SEQ ID NO: 237911 - DNA, 545 bp, Cannabis indica
actgatattcaagccaaagaagcgcaagcaagagttcaactcgatgattgccaaaatctgctgtatcagtaaccgttaaatgataaactgcaccagcaagaacaggaagctaggtccaattatgctgccatttttaagaattattttcttttttgcagcagaaagcaaaactaaattgggcaaaagtgagagatgaaaattctgcattatttcacactagtatccgagaaagaaggagacacaatcaggttctcacagctgttaatgcagaaggggaaagagtagaggaaccaagagacattattgaggctttcattcaatattagattggtctgttaggtttcaatatgcaggggaggaggccaatacagcattgcatacttaaagaaggaaatctgttaaccaaaattcatgcaaatttccttatgaaagagtatagccgataagaggtaaaggaggccattttcgctattcctggtaacaaagctccaggaccagatggttttggtagctccttttactagtaaaattggaaggttataggt

SEQ ID NO: 237912 - DNA, 1450 bp, Cannabis indica
tatatcaagtaggcaaagtttaccgtgtttaaaaaaccaaaaacaaaatcatttgacttgtggaccaatacacattatacagtaccgatttcttaaaaaaacttatcgtaaagtagatcattatctacccaagtataaaccatagtttatggacctgaactggcagcatgttcaaacaataaaataatatataattggtctaaatgtgcagagtgagctactacttaatattgtcaacaaacatgcattgaaatcctaagtacaagcagtttaagttcggctacttttcatactcaaacatcacatgtgtccaacgtatcttcacacacagtcactattcttcttttcttttgtttctttttcaatgttttgtagttattgaagaagcgagcaagacccatactgcatagtgtatacacattgaaatgcatctaataccaataaagatttcatatatattgcatattttatactgaaatgtgactgtcagtagatggatactcaatactccatcggattatcctacacatttaagatgtaattgtttttatacaaaaagcatgaggttttatgacttcttcattgtaaaacaaatatcgaatttgtttctcctttgtcatgttagtttctttcaataaatttaaacccgatagttctactgggactataggagacctcatagcagctctcaatgttttatcctttatcctttatcatacaagttatgaaatgagttttatcagccttagtatgttgaaaagatattaaaaatatcagtaggcatagttaaagaaagttttttagcttccactacatttctaaagggtacatctgtatttatctacactgaactgacaagccagtgtttcctgtcaaagcatcagtaaacatatttgatgaatcatcatctagaagtcttaaaaagatatcgcatatcagaatgggcatgtgcatccacctctaaattgtcaaccaagtgagcagatcggatgcttggtaaatattgagaaactttaaagacacaaatgcctacactgtgatgcttcctggagacattttcacataaattgtgcagtgaacccaaaggaaaagcttaatagactatttcaatcaaccatttgaagctagctcacgtggtctggtgggtaggtttttgtgagactgagtagtactaagtgcaactccacataatgtattttaagaacataaaaaatttaaaagtgaacaaaaaataccagcaagagaaaataatagttacactaatgagacagttgcaggtggttcaatcttcattcagccattgataaacctataaaacttgattttaaaaaaaataaaaatggtagtttgctgactcaatgaaattcatgtgaaagttaaagaatataatcaagtttcctagagtggtttacaaaagtttcaagctttgtataggttccattcaatcttc

SEQ ID NO: 237913 - DNA, 1522 bp, Cannabis indica
aatacataaacaaatcacaacatattttaatacccttaatacctcatccttgctactgtagtatccccactacttggaatcagaactctccacagatattattctctcttcacgctgaaaccaccaatacctattataatcttttataatatttgtctttacccaaagggctggtgcgtacaattcgtttctccatcttcggctcataatacattctctgtttcgtaaacagtgtcagaaagaaaaaatgtttttacagaaaaaagacagaaagcaaagaagatatatcacgcactctttgttgtatatttcttttcacacctccttctttttggccattctccaactgttgcatccgatttcttcttaattgagtacgttttctgttggcatgttttcacatccatattatgtttcttggccatcttcttcaatgaggtatctaatttcttgctctcactgttaaattaatattggagaagaatgtaagcctcaaacagaaagaaacttcttaattaaagacaattaactatgtaataagctatcaaatagaatccagacctcttgccctgtgcatcatcgtgttcatgttcagatggagagtcctcgccctttattttcttaactttgttcccgcactgattaactcaaaattgttgcgaaggagaagcttcttaatcgttggcgttgattaattaaactctaatttttctctggatcccataattttagtaaaatcggttagggctaaaaaaatagattttgttttcctttaagttaacagttcggttgatttttctctagatcccataattttagtaaatcggttagggctaaagaaatagattttgttttgatgttccgttaacttcacgttaacttttcaaaaataaaaaaaaaaattcgttaaaataatcgttaaaccaagaattgccgttaaaccaagaatttttgttaaataggcactttaaatatataaagatattgattttagtaaaaatcttatttatagtcaatacaaactaaattaatattaattaataaatcataatccaattcggttttttgacataataattccttatttattatttaaatagatgggttggcaaatctcctaaatattaaattcattcgatttattataaaaaccatttaaatttgtatcttcctattcaactaaaaaacaaaaaattcaatatttcattagcctttagtaactgcccatttatttcaatattttccaattataaaacaaacaaaatattcccaattcactattaatgtctccacctcacattgattacaaaatctacacatttataatttatacaccaaattatattatgttatctataataaaattcatatttattgtcatttgtaatttttggaaattgaagtaaaatgaatcagctaatataatcaccctccaatttggagtgaattggcaaaataggctttgtgaaaacttttattaggaaaatgacttttcaaatattttaattagcaaaatagcttt

SEQ ID NO: 237914 - DNA, 1032 bp, Cannabis indica
tcagtgcgcatttatagagtatataagtcatatacttagttactattttcctctaatggagtgtatacaaataatatattactttaggcttatcaagtgaagcccagcccatgaggcagtggttgtatactgacttggcatgttgatcatggtcacagctgttactatttgccctattatatattgtggataattaattatatattaattgcttgatctataattatgtagttctctattttagcttgatattattctctgtccgagatttaaggaaagtgacttctttattctgctcgaaacaataaatggaaaactacagttggcttccacgtatacactgatgggttcttccagctacacagagctaagatctctctggatacggattagtcttgggagagactcgtttgagcgagaagtgaaatcgcctttccaaaaggccaaggtggtattgggctcgacctagttcatgtcgtttagggcccacaaatgggttttaaatagttttattgaatccacgtatcccatgctagaaatacagataatatttacccccaagtttccgaaatattgttgattgtggaagtttgcttcagtctacataggtggacatgtggaggctaaaggtgtggaacctatacaattttccaaataaaactgaatgtgaaagatagtttttatttattcgcttttaagatctgatgtggcattgtttctttggctcgcgaggcatcttgttcaattgatgaggtgtgtgtggcaaaataagtaaactgacgactattaatttttgcacgaactttgaggagaatgtcataatatgatttcacctcgattctaaacaatgcactaaatgttaaacggatggccttcctagatgttggatctattttgtgttttgggaggataacgcttgaatgttgacttagatttgcatggatcgtcttttgtagatataaatatctttaaacaccacattttaacacttttacccaaaattttgaatttttctttctcaaacccataacc

SEQ ID NO: 237915 - DNA, 1377 bp, Cannabis indica
ttgtgaaatgaaaacaactagcatttaatctcaaaatggaaacaatttaatcacgaaatataaactacagacaaatgcttttgtttttaagaaaaactcaaagattaaaccaaagaaaccaaacatcacataccagaaaaatcatattatcgaatgccatgcacaactctgctttgctatgctcttgaaaatccaaagcaacaacataacaactctctcttcaattgtaaagcaagatattcaacttccagtgcaaatgaagattgagctgagcaactgcaattttacaggtccccaaatgaattcaccaattgtgaaaaggagcaattaatgtaagtaaaatcggagaagtcttctcaggtgatgaaagagtttgcttgtactgatcatgctataatagtaatgaatttgaatagctgattatagtcacatcagaatgtacctcatggaagctgcaaataggagcttttttaatggctctcctgtctggaacattggctggctgcaacaacgttggttggctgaaatattttatcataattcaaataaatttagggcatttataccaagaaaataaattaagctaaccatttatcaaatataacagaaaataattaactttattcttcaaaagcagcaaaaataaaatgatctaagcatttatcaaaccaaccaaccattgatagtcaatgtttaatatatatgttttagctagaccaaatacaaagcaagtaaaacccacttgcttagtctctttgtaagtatgagttatgggcttataatgccaacatataactctatataaaacatatacaattacttaattatactaattttaatattgatatattctcatataaattctcggtgtttggcaaaacaaaacaaacattgacttgatttaaatacttttaaagaatataaaccatatagtacataacacacataatgaacctaagaaatacataattaatagagaattaaagacatcaaagttaaacatttcaagaatttgtttgtaaaacttcaaacagggcacattaccaatcttaggttggtgaaaatccaactaatatttcacagtgacttgaatattcaaaacccaaccaaaactcaaactcactccccacataatgaatgaataaatgaataacaaaaagtttcggtaactaaatttgggagagataattatatggttaaaaacatgtttttttaatatagtagaatgaaatagatagagaaataaaccttataaagttgtatatgggaagaaggaggaggagcttgggcttggcttcaaacgaagtcttcgaggttgggatgaaatcgtcgagcatgcaactactgttgggttttatgccctaaataaaactcttt

SEQ ID NO: 237916 - DNA, 913 bp, Cannabis indica
ttttgtttacatgggagagaaaggtacaagcacagctttgatctttacctctatttccttttagttatgacatttttctgcaaaacacttaacatttgatctcaactgaaattatctgcccttctgttcggtttaatattcaatccacaaggaagtacctgaatttaattgttatgtaggatcttggacgcctcttcatgctgatgtttttaggtcgtatagttggtcagcaaatgtgtgtgggaagaaacgttggctcttcctgtctccttctcaaagtcatcttgtattcgacaggtatgaatgcaatttcttgcatttaaagcaatcagagagatccatgctgataattatgatgctataatccatgataaatgaaacagttttggggttttgttgtgggtgggggagctatgctatatagtggttcatgccaatggattactagcttttactgcaacctcttacaagttttgctacttttaagaataagttaattgttatttgttgtcaactgtcaagtttatttactattaactgcggccaatgttggttctcttgaagaataagtggttggtttaactttctcagtttttttcttcagggtgctagagtaggtgtagtgatgtttgttttgttttgttttgtttttggtttgctattgtaacttctttctatcatcatcagaaacatgaaaagcagtgtgtataatatctttgatgaagttagtgaaacaaaatttcctggttttaagaaggtaaatcaacagcctggagtttctttaagtttattctgatttatttactagtttttgcatttgctcatctatttctatattctaatattcttcttacgtataggctatttggctggatgtatacaagaaccaaatgaaattatatttgtgcctagt

SEQ ID NO: 237917 - DNA, 1349 bp, Cannabis indica
catatttatgaaaattcttctataattaatttaagaaagcctcacacagagtttaaagcttatatatatggatcaatatatataaaaatatattatctcttttttgttattattattatttattttttgaagaaacttgtgctttattgaaaaacattgaaacagtacaaagcaaataaagctacaagttatatggaaggtaaagaaccattccaaactaactcattatctaatccaagaccaagcttagctaagttatgagcaagaacattattttctctaggaacaaaagaaatagctagccttggactgaaagataataagttcttgacattaaccaaaacatcatccaacacactattattccaattacaagaagtaagcttatctacaattgatttacagtccgttagcaaaacatctacaggaagagaaatcatttgagcccattgaattgcctgaaaaatagccttagcttcagcaacagcaggaggtaccaatccagagaaaggagcagaaaacccagctttaactgcattatcagcatctaagaccaccactccaatactatgccttcgattagctgaatctatggctgcatctgtgaaaattctaagccctgtagagggaggtagctgcagaacttgagtcaaactagatgcaaattgtgaacctgtgacatgttgttgctgcgcatccaaaaacttaaagaaataattaagactccaatcatacacttctttcggaggaaaagtgaactgattataaacaacattattcctttgattccataaagcccatataaagcaaaataaaataccaatatcatttttgtccaatgtgtgaaaaagaccaagaaaaaactcatcaacatccaaatttttagaagtattataataagtagcaaacctggaatatcgccaagctttcctggccctggagcaatctagcaaagcatgcttaatagtctcattctccatcttacaaacaggacacaaaggagaatcaatcacacattttttaaacaaggaaaaagcaactgggattgcattagataacaaacgccagataaagagtttaaccttaggaggagcaggagaagaccagattcgtttccaaaacttcttagaatcagaaaaagaagaagaagaagggagatcctgattagaaaaggccaaatgataagcagatttaacagtgaaacacccagaactctccttttcccaaatttgcttatcatgaccataattgccagaaacagggacagcaaggatgtcatggaccatggactcatcaaagcaagactgaatttttcccacatcccaggttcccgaatcagtataaaaaaa

SEQ ID NO: 237918 - DNA, 1289 bp, Cannabis indica
aacaagtgcagcaggactgtggcgtgccctggagcagttctatggtgcacactcaaaatccaaaatggatgatactcgaactctcatacagacaactaagaaaggaggcactcccatgatcgaatatcttagacaaaagaagagttgggcagattctcttgtccttgcaagagaaccatatcctgaagctcaactggtaacaaatgttctttctggacgtaatattaattatctcaccattgttctgcaaattgaagctcgaacaaaaaccagctggcaagaacttcaagagttacttctcagttttaatagcaaagtggagaggctgcaaggaggttcatctctaagcaagaatcacaccaacttcactgatcctcatgccaactatgctcatcaacccactcaaggaggcagaggcagaggaaacacaacaatggaggcagacatttccatagaggaaatggaggcagatctcgtggtcgaggaagaaccaacaactccaagcctacatgccaagtgtgtggaaaatacgaccactgtgctgctgtttcctacaatcggtttgatgacagctatatggggtctgatccacactcctcaaaccagaacaaaaccggtcaaaacaacaacaatcttttagccttcatcgccacaccagaaattcttgacagtgaggcgtggtttgctgacagtggtgccaacaaccacatcactgctgacccatccgtgatacctcagaagcaagagtatgctggtaaggagaaagtgacagtaggaaatggtgataagcttgtcatttctcattttggaaatggcaagttgtacaccaaaactggacaatggctgaaattaaatgaaatgttacttgttcccactattgctaaaaatctccttagtgtttctaaacttaccactgataatgatgtgataattgaattccattccaattcttgttttgtgaaggacaaagcaacaaggagggttctgcttcaagggatgcttaaggatggactctaccaacttcaaactcctcaaaacaagtcagcctatctcaagcttttcaacacctaagtctactgtttctgattgtgatccctttactggtttagcttttaaaaccagatcccatgtaaaacagtccaaaactgataagtttgctatttccacaaaagatgtttggcataggagactaggccatccatcctctagagttttacaccaagttttaaatacttgcaatgttaaaatttcgaaaaatgaagttgatcatttctgtgatgcatgtcaat

SEQ ID NO: 237919 - DNA, 927 bp, Cannabis indica
tttttttttcttaattaatttatatactattactcttatgacttttctattcatacacacgtagtcattttaaatcttctaatgcattttataaagaataaatatttaagtttaattttcaattacaaataaatatttaagtttaatttttggtagtaaaaatacttaatttatatttctagaattctatagatatttgatcgttaaatatcaactcattatccacttgttatttttttattagtatatttaaattattttttttaataaaataaaaatttaatgacattgaccaataaagattgtcgcgtgacaatttactaacacttaacaacgaagtatctgtagaagttccagaattttaacttaagtattattaccgccaaaaaattaaacttaggtatttatttacaaccgaaagttaaacttaagtatttataccgcaaattaccctttcataaaatatttacattttttatttttagagcactcccaacaacttttctactttatcctttaaaatatcttaccaaaatctcactttttctgttttatctcaaatatttattatattataccatacatcaactttttttatatttttttctatcatttaaatattatatctctacatatattttataaattaaaataaaaaataacaaaagtaatgaaataataaaaaaataattaaaaagaatgagaaagaaaaagaaaataataataatatttttagctcactactattcattgagctaaatgtagcgctaaaggaagagctatgatttattctagctcaccatttaccttacttgttagaggtgcaattttaccaaatttttcaaaattttagctaaagaattattttagctcatctattaggaattctcttatattagaaaatataaattttcaataataggtaaa

SEQ ID NO: 237920 - DNA, 1207 bp, Cannabis indica
tgttgacgctgaaaagcaatcaactctgtaccatctaataagcagagcggccaacgaatatatgaatagaagtaaaaagagaacaccatagttatagtagttgactctgctttctatgaaggtaaatggagatatgtctacttagaactttattatcataaaaacctaattaccttacaagagaactacggaaaaaaaattctagagagagaaagtgtgaagacagagagaagctctaaccttgtaaagaggaggtaaagtgtgaaaaatgacctaggggagctctccttttataggaaaggaggtccaattaaattaaaataaaataatataaaaatttacacaaattttgttgggaaatcctacactagctcgcgagccaattttgaggcccgaaactttagaattgcgatcggcatgtgagacacacttagatgcaccttggaaggagctttaattttccactttaatcgtgtgattttgatgaaaattgagaaatttatagtcgttttactgagtagtgtgtacagtagcaaattgactgtgagattagcttgacttttgggcgcctgggttgacgtttatgtcaacctgggtgcccaagacttggtttcttgggctttaggcctattttgatatgcatgaatgatgtgatagctatccttagttcattctttggcctattttgatatgcatggacgtttatgtccactagtgacggctaggtgacattcgggtgatcaccagtgcacatgggtgtcggtggacttgtgtgtgacacgcgtacatgagatatttacttgaggaagcatccaaattcttattttaggggcaaaacaacatcgatgcctagagcaaagctgttgtttgaaggactgaacaccgagcctcaagccaatgtcaactttggcgcccaatgcgcttgcacactggcatgtggtgatgcttgggggataacttgctactcgaatgatattttctcctaattccaagtctcatatcattttttgtagtaaaacaagaaaaatgatcgagatagaattgaaatcggatctacagaaccaccaatagggtggttatgtcaacctgggcactcaatgactagggtgatgtcaacatgagtgcctagctctccaactggggcctagatggtggaaatttattttaccaggatcttagatctactcacaagtatgttgtttaaaca

SEQ ID NO: 237921 - DNA, 736 bp, Cannabis indica
tttaatgtgagacaatgaatcttgttttcccgtctatgtagatggcacgtcaacctatgtagaaattttgataacaaatataattttgatataaagtataaatcttgggaaagatttctgtgatttggtggatgacttcttccaatcggtgaatttacacaatggctttaatgttacgaatgtcaccctcatccctaaattggtgaaccctaagaaagtgtcccaatttaggccgatttccttgtgcaatgttgtttataaggtaatctccaaaattattgcaaacagaattaaacctgtgctaccgagattgatctgccctacccaagctgcttttgttccagggaggagcattcaggataataatgttttaatccaggaaattatccagtcctttaagaggaagaaaggaaaagaaggttttttttgcgattaaaattgacctggtaaaagcatatgacaagttaagctggtcttttattgatcatgttcatttaagcttcagagctcctgagaagttccgtctgtggatccgacaatgcctaactacgacatctttgaacctgcttctaaatggtagaaagattagaagctttgtcccggaatgtggtttacgacaaggagatcccctatctccttacattttcatctgggttgctgatatcttttacgactcctacaggatgccctgattaaaggggacattaaggtatcagtttgagcagaggtggaccta

SEQ ID NO: 237922 - DNA, 577 bp, Cannabis indica
ctagaaacttcatttaaagatactgagcaggtgaatgggaaagtaaaaatcaattttgatgacattgaagaggaaattctgttttggaaaccatcaattgtgtgctatgttcttggagttaatcctccattgcacattcttgaaggatttgccaaaagaatatggtctgatcaggttgacagggttaaaacattggctcatggaatttttctcatccgatttacatctcttgagtttagagatcaggttatgaatgggggttatgtgttttttaatagaagacctgtaatcttgaagccttgggaccctaatattaatttcaagaaagaggatgtcaagactgtgcccatatggatacaacttgaagatcttgaactgaaatattggggccaaagatctctctttaagattgttgggcagattggtaagcctcttttggaagactctattactaaaaatcgggaaaggctgaactatgctcgagttctaattgaagtacagatggatcagcacctcccatccatgattgaattcgaaaatgaacatggttgtattacttcagtaggtgtcaagtatg

SEQ ID NO: 237923 - DNA, 749 bp, Cannabis indica
aaaatctccagaattgagaaattataactctaatgcccatttctaataataggacccacaacaatattaaatcataaataattataaaaatatcaataattaatgctaattgtctttactaatccatattctaatatgcagtcattacatatattcataccttatagtgttatacaggttacatgggtgagtctaagttcaacccgacctgtgagtatataaatgtgcagacccaaaacccaacctgtgtaatgaacgagttcaatctgacttgcccttgaataaagggatttttctttatttttggtttcacgggtcaagtctggacgggttgaccagatcgagccctaacctagtacaaatattcaaccataataatgtcgatatcaagattgaaaaaaaaggtgaacagttgggtgggtgcggatccgacccgaaacaatgaggggcgggtcatacacctgaaaatcggcctgattgatttgggttagaaccaaaccctccctgattatatgggctttttttacacccctagcctcagtactaggctgagccttggaccgaaatgaaacacgaccttgaacccgatcgcggacccaaacttggacctgatcgtggggccgaactttgaccaggtctaaggcctcaaccctagtttcggagcctgccccgaatcctgatgcagtccaaactaatcgctcctaagaatttatttgaccctcatatacgtaatctagtatctaagaatg

SEQ ID NO: 237924 - DNA, 730 bp, Cannabis indica
ataacttcatttatatttaatttatgtttttatattctcacagatagattgcttctgaatgtcttaacaatagagtatttgagattttcttggcttatctccaaaaggttgcaaatcatgcttattggaaaatctgtttgagagttgaagatgttcaagggaagaatgttctcacaaagttctgggtaaggttatgaacctcattattttaatttcaaaattatttatgtttacactatttatttttcgtcaatgttttatgtatttaactataactatatccataccaaaaaaactataatcatgcaaaattatatgaaattgacatcaccattaaccacagataagttgaggtcgcttgtcttaaagagagagaaggcttgtgtgcaagtggcaaacactaattaaggctcatgtggatgtcaagaccactgacattgctttcactgaaatatggtaaaagactaattgattgcagaaatttttcccggggtacgatcagtgatatggtaaaagatgtttttcgggggatttcatttgtttataacaacatagcatactacggtggtgacactgacaggtgattaactattctctttcttttatcgtctctgtcaaagaaaatgaagattaaaatccaccaatgagtatcattagttttcttatctacaattttttacacacatgctatcttcaattatcaataatttagagattgatttttaatttt

SEQ ID NO: 237925 - DNA, 812 bp, Cannabis indica
agcatcaactgccatattatatattaattataattaagattgagtacaaaaattaaaatataattagttaattaatgactagtgagaatataaatatatttcaataaaataagatataattacatacttaaataatcaatggccaattttccattagaaaatcggccagttgatttgtgatctgtaaaatcccttccgtacggagggaaatttgatttgatgagagttggtaaattgttgttgttaccaacatctacaaccgagtctccaaatacgaagactgctggtacaatcttttgtgttttaacgtaagtattttctagcatgatcaaaataagtatcatcataattttggtgtaggaaagagttgtgaaagccattaatgatgagtagttaattaagtagagagaaaactaggaaactttaattataactgagaaaatctgcaaagagtaagatttggattgatgtaaatgttaaccaggaagtcatctatatatatacacacacaaagttcccttataattaatttctaggattaatggggtcatcatcatctttgaattttgttagatataattaatttaactagtactagtctttaatttcgttttgtttattagtttaacttttgatgcatgattacaattaattatacatacaagttataataatgtttagtgaaacatcttttcttgcatgcaatgcattatgcctgtgcttaattattaggatccttaatgcgcgacaggctattttaaagggctcttgtatgattattgcttcgggggaaacgattgatcttaaatttc

SEQ ID NO: 237926 - DNA, 1013 bp, Cannabis indica
acacaaggtggtgcttggtgggcaaattcctaacaggtcgtgttttggattttaatgtttttcagaatatgatggcttttctatggcaaccgggaatgggaatgtatgtcaaggaactcaatcctaatctattcctttttcaattctatcatgaagttgacatacaaagagtcatcgatggaagtccgtggacttatgatagaaaaccttttatctttactagattaaaggagggagagaatcctaggcttgtcgaaatcaaccatgttgatatgtgggttcaacttcataatttacaatctggaaatatgacactcagtgttgttatgaccttaggaaactatattggaacgtttgtcgaatcggattcgaataactttgtcggtgtttggagggattatttacgcgtccgggttcggattgatgttggcaaaccaatcaagcgttgtatgaagattaccaatgaggatacatcatggtactgggtgaactttaagtatgagagactgcctactttctgtttcatatgcggtatcatcggacattcggaaaatttttgtccaaggttgttcttgaagccgctacacctccaagaaaagccatacagcttggagttaaaagcattgacacaacgaagacaatcaacctttggggcgcagtggctccagtcagaggcggcgatacgagatgaatcacgacatgaaggccaacctagcaaatcagatcattcagcggttttaattcctagaaatctggaggtagtgggggaagtagttggcaaattttaaggctgtgcaatcactaataatcagccacaaaaagagggatgtggtaatattaaggagaatatggcagccaatggagaagattcaacattaaatgttaccaatagaggaaatttctttgattcctctattaccaacataattgactctaaaagaagaaggcctgatagcatagggggacaggtgggctccctggaaaagcaatttataatgctataaatgttatgg

SEQ ID NO: 237927 - DNA, 1046 bp, Cannabis indica
tacattcacttcatagatgatcatagtaggttcacttggttgttccccttgaagcacaaatctgatgcccttgctgcattcatccagtttaaagctcttgttgaaaataaatttgaaagaaaaatcaaaatgttgagatgtgactggggaggagaatatgatgcattctctgatctagttatcaaaaatgggattgagtttcagcactcttgtcctagaacatccgctcaaaatggtagggccgagagaaagcacaggcacatagttgaaatgggcttgactctcttcgctcaagctcatatgcctttaaaatattggtctgatgcttttcagacttcggtttttctcattaacaggctgccaactactgttttaaatggcaaatcaccttatgaggtggtaaattctaaaataccagattataagcttttgaaaatatttggagcagcctgtttcccttgcattcgaccctaccaacaacataagtttcaatttcactccattaagtgtgtgaatttaggctatagtgaggtgttcaaagggtacaaatgtcttagtccacatgggagaatttatatttctaggcatgtgattttcaatgagagtgaatttccttttgagcatggtttcctaaacaactataaaccagaaaatacagtcactctagatacaccacattcttggttcaatctgccctctatgatccaaaacacatcccttagctctcaaaggactcaaactgtacaccatactgaagatctcatctcagaatctcctactttgcaatctgtgaacaaccaggtcagtgatgagtttaattctgatgatacacctgttgttatctctactggtgtggatgtgaatgcaggaaataacatgcctctgtctcaagaacctgaacaagcagctgaacaacaaacaacacctgttgttcaccccatggtgactcgagccagagcaggtatttttaaaccaaagatttactttggtcaggccagttttgatcaatccatccatgaacctttgacacttgaagctgccctgca

SEQ ID NO: 237928 - DNA, 880 bp, Cannabis indica
ctttaatggcataattttattcaatgactttttctgggattttctagttggaatatgttgtgtatacattgtttaaatactctggaaagtttggaggcaattggaaaaattttgagcaaattggaggtttcttggggaggactggtagaaaccggttaaccggtttaccagtatctataaaatcgattaactggttttggcagggtccccgagaaactagtttttctcaattctcgtccatttcagtgcattagttgggtgtttccatgtttcctaggttaatgtaatccttcgagagtataattgagccttgagttgtagactcgggtttcccggattagggtttcagacgtgatttacccagttttaatatgtgattagggcatccatctagcacaagaatttctattcaggttggccaactcatttgaatgtgaaaaggaggtaagaactgtatataatgtgtaatatgaatatgcgaatgtatgtatttgttaatatatatgcatgcttgttgtgattcatacactaccaacacttgtacggtagcagtacaaagtgcattggtaaagtgttaatttatgtatgtattttacttatatttagttcttttcctcctcttttgtgagaatatatgttattttgtatttttatgttcttttgggtaatttggagttgttagtgggaatcaaaaacttgttgtgctaaaattagatatacgcaagtgcacgtagtcataaataagtaatacaataataagtaaaagagtatcgtctccacagggattgattagaaattaattatgcaaaaatcaatagtaaacaatttgggtaaaacaaacaagaagtgataatttaaactaggctaaaaactaaacaag

SEQ ID NO: 237929 - DNA, 720 bp, Cannabis indica
aaattattttaaggttttttacaactcataccgaaattttcaacttttttcatcaaaaatactgtgtactgtgttaaattttcactgttgttttacagttattttttagttgtttcagtattgttttaattgttctgttttgttattttttggttgttttataaaaatatagtatttttgtataaaattccgtgtgataaattcaatatttttgtaaaaattccaattatttttggtttccaagcttttcttgttaataagttaatttgtgtgtattttcttttctttgttattgtgttatctatttacgaaaattaactcattaataatagtactttaaaaacacatagtattatagataagtaataattaaaaaccatacctgattaagcttagaataacaacaagcaacattgtaacttgctactgaagcttcattaagatctggttttgatcccaaaacagactcaaatttctccaatgcttcctcatacttaccatttctatacaaaaccaaaaaaaaatgacaactttgttaatcaaataagtcccaaaattcacaatcaaaacacattgaattagacattgtcatacttgtaaaatttaagcccttctctaagatcaatttcgcgctgttgcttctgctcttttttcctcatgtaattttgcatctgaaatcgtttactcgaatcgaatcaaaactaaaaaaaaaataacaaa

SEQ ID NO: 237930 - DNA, 940 bp, Cannabis indica
atggatagaataagaatggtaatggaaaagtaattatggtgtttggttggcataataaatcaatagtggaatagactaaggaataaatttaattttttttaataatcgtaaatacaagaatatttttttaaaataaaaaaattattatcttagaaaaaataattcattcaaatatatataacacatttaaataaaataaatatatttatacatgattaattaattagacgttataataattttattatacaatttaaaaaaaaaagaaaaatcttataagacattattattattataaacaaataaattgtattattattttattttagaaaaaaaaaaggtcattacacatttatattagataaataaaagataaaaatatatataataaaaagtgaaaagcaattcctatggaaaagtgattctatactaaaaagtgaaacggaaaaaaggattacattccaatggattaccaccaaccgatatcactaccttagtaatattgttcaaataaaatacataagttttttatactatgtgtgcaaaaatgactttttttattcttttgggaaattatttgaattaaatactaaaaaaatatgaaaaaacagagttacactctcaatgaaagaggtaaacaccttctacctctcaaaaaatgaagaaaatttagcttaagagtcaaatatggactctaatgggtgatatataattttactgtgacaattaagagcacttacatcatatgttttaaaataatatttttaaaacatatttaaagaactaaactaaaaacacgcaacaacaaatgctctaaattcctttattttaatttttttaaaattaactattcatgctctacatttatagaataatattcattattttaaatatatatatttattaattgtttaggattaatttttctttttatattaga

SEQ ID NO: 237931 - DNA, 871 bp, Cannabis indica
aacctcctcaacaagtctcaatagtctcaatatgagcttcaaatatttctataattacgtaagaaaataatttattattttaaattaatttaaaacataaaatataattatatgatattattgatatcggtagataataaatattacaaaattaagatacgagaatattattaatagtaagagaattgaataaaatatatttagaaatataatataataaagtacacaggtaatgtaaattttttaaataaaataataataagattttagtgaactattttaaagcataatgtaaaaaagtttactagagtactttaaggtattattgtcgcgaagtagcatattttatatgagcattattataaggaactatgctgtcttgcaccagcataaggtgacacctataagtggttagtgattttctataattattattagaaaaatttgtagtataaagattcaaagttctgagtttgtaaaaaacataaatctaatgagtttttttaatggcataaatccaataatctttttttagtggcataaatactcaatgttagtaaaactgtaatttttatctagttttgtctatacagactccgttttgaatttattaaaaaaacgatttagaagtaattaatacaacatgtttctgtccagacctagtgatttgatatctgggcgttatatatgccctatttaaaatactaacagagtttgtacagacaaaactagacgaaagtttcagttttacaaacattgaatatatatgtcaataaaaaattattgaatttataccacatacatgcttaaaattttcggtacatatggcgttattgactcttattattaaaataaaataaataaaactcga

SEQ ID NO: 237932 - DNA, 1003 bp, Cannabis indica
ttaatctaaaattaatactaaaaataacctaacaaaatggaagggcgactagtatttggagggatccctgaattcctcatctgaaaagttttatcccgaaacctaagggcggggtcttaaccaatgatctatgtgtacatgacctattgcttacaaatggagattgggacatcccaaagctaaatggcctttttgataaagaaacggtgtctacaatcgttaaaggtggtaaaccctcaggtctaggggatgatagatgggtttggacactggagaaaaatggacagtttacaagcaaatcgggttatctgtctcaagctttggatagagatcatcaatgtgcgatagcttcagcactatggaacaagctgtggaatagcaaaattttggaaaggcataagatcttatggtggtgcatcctctctaatgcgttccttattaaatctgtgattggtaggagattccacattgaggacacatgtttccttttgtgtggtttaggggaggaatccatggaacaccttttcttgtcctgcgatgtggcgatgcatttatggcgatcttcaccttggggcatctatcctatttgcaatactgggatttgagtttggggttgggtcaaatttatatggaatctcaataatagggggatccaagtaaaagaagttttcctgtatgcttcgattgttgttgaaactatctggagagtgcgaaatgattttctacataacaactctcatccggatgttttgaaatgtattgaccagatttgtaattcttatacagaacttcatgatgctttcttgccttgccctacaccatctttaagggggacttggaggtcgccacctcaggattggataaaattgaactgtgatgtcagggtgggcttagaaagcatgtgcttagcggtggtaactagaaaccatctgggtaaagtggttcagattcacacggctcggttggacttctcggaggtattatgtggagaaacagcggcttg

SEQ ID NO: 237933 - DNA, 747 bp, Cannabis indica
gaacatttttttcaaatggttcagcaaaaaattaattgaatattatttagataagaaagagtgtctttgcaattactgataataacaccgagaaaacagttataaagagtgcaaactacgaataagcactatgatgagaccattcgactcagaaatatagggtgtactagactttcattttgatcatttaatctaactcaatgcttctttgatctctacagtttgagctacttcattattagatattaattataatttcttttgacaataaataaacattaatcttaattaattaataaagttaaatttattatcataaagtctattaacaacaatatcaaaatgcgagtaatatagaatagcaaactattaaaataaaggaaattataacaaaaaaatttgacaaagagaacaaaatatatttagattcatttgttgttttactataataagttaaattgtgattatatatataacattcattttagaataggtatggcttttgactttcctcatgactgttaattaggttaagtatagatattttttagttaataatggtatagtagttgcttacgattcatgaaaataattatcaaatgtagagacccaaaagacaatactcaataggttatggaccttaattatatggggctatagccctcactaacaaaaatattgccttttaaaaaattaaatgtaattttttttaatttgataattgtagactaaaatagtagaaaagcc

SEQ ID NO: 237934 - DNA, 1623 bp, Cannabis indica
cacctgaattcagaattgaggtaagattagtataatattatgcatatgttttacatgtttagcgtacatgttgtttatgcctcttagattacattgatagcagtaatagtatacatagagttgtacttacaactgataaatgtatgttagctgtaatactgatcgatgttgtcacatcaatatggctagagtatgactagcatattaagtataggctgacattatggtcgatagtatcgtcgtatgaacgttctagacttagtaccgtgtgggacacgaggattagggttatgatccgggttatttgtatgttatatgttatgctttgcttactgagttcgtcgactcacagtgctattgctatgtgtaggtaagggcaaagctaaagttgaggagtcgtgagagcgagaaggtaaagattgtacatgtcggggcggttaggcctggagcgtacgatcttcgggacatcagggcttttgttgtttagtcgctaggcgacaaatcttttttatatgaatagtaaacttttgtaattatattttgtaaacgggatcttgggattttataaatgtattaggttatgtttttaattaaataagcaaaattttaattattcacggtctcaaataatctctttgattagcaacgagctgcacagtacgttaaaaatcacgctaacacacctataatagttagggtgttacacaatgtatactccatacatccaaaactagcatactttgccaatgttctggacttaacagattttgtatacattaaaccataaacatgaaaaaactacatgtaaatataaacgacttataatcttttattgataacaaatcagattagattgaaatgggttttatttagggtataaaattgcaacacacttcttgaaagcttgtcacaaaccctagaatttgaagattaaaagctaaattcttcctggcttcctagcttaactgaacaagagagaggaagaaaaaaaaaaacccaattttctattcttttgtgttttttttttaatttccatctaaggataattctaatattatcttttcttccatagtggccaggtgcccacaataggaagtgccacctaactctcaaggtcaaaatgactaaaatgcccccacttacataattaaatggtaaaatgacctaggggtaaaatggtccaaaaccataaccatgactaatctcgatattccaaatgtctaactagatcgccccgttattctaaaaatagtaaatcatactaaagtgactctataggccatacatcactttccactattatacggcataaaaaaatgaaattagccctaactatctactcattatcaaaaataattaagcggtcattacaattatccccccgttaaaaggatttcgtcctctaaatctaacctgaacaactttggatattaagccctcatatcggactccaactccaggtggcttcctccaccttgctatttctcgaaagtaccttgaccaaagctatggtcttgtcccgaaggactttgtcctttcagttgggattttatgacctaaataaaatccatttcaatctaatctgatttgttatcaatgaaagattaaaaatcatttatgttt

SEQ ID NO: 237935 - DNA, 2649 bp, Cannabis indica
tgtagtaacgagtgagatacgatgatgataataatttaaaattgatgagttttctataaatttatcaatacgttctattttttatatataaacttaaatcacaatcaaaaataatatttatcaaattactaaaattctatcatgtctgattctaattattatgccaaaaacatatattttgaaacggactttatagaaatataatgtctacaataaattaattaataattataatttattgagtttaaaataattagaaaaatcaaaactctaaaatattaatttattttttctgtgttattaagaattaaaaaataaaatttcaaatagatactcactattaaaaaaattacacaaaattattaaaatttaatataattttataattaaattattattaaataagcatgtagttttaaatgtaacaaacggatcatatcatgtgatttctgtattttagaaatatactctcaaatttaaaatcttcttaatattaaaaacaagtgtaataatgctaaatacactcaaattgcagacacttatcactttaatttaaatacttctttacaaataactgtatataactattattctagcaaaaaaaaaaaatatataaataactattaactgccagctataaatgaagtgttgcttcatgaaaacaagtagtaacattcataaggggccagcaattggagttttttcccagtactattatccagaactcaagtatgaagtaatataacatccaatggtacgcacaccatctgaatttttttttactttaccattctagaatccaagatgtggattgttattgacaaacaaacaaaatttagacaatcagacgagctactgccttgacatctagatgtaagaatgattattgcaaaacaagtaaaaactgcctcagaaaaatattctgctcccacaatatttggggagcttttgagccgttaaagcggaaaatccctagtctgaactacctaaggaaggccatgctacaaagagtaaaacagattacagaccccgaaaaattagctccatcttctcttgtcttcctcttcatcaacaggagtgtaccactctggccgacgcttcaagttgcttaacctgtagttcaaaagtacttcctcgctggaagagctctcgtagccaccaagacaagagttctcagaaagggaacatcagatccagtattttttgaactcccatatttgaaccaaaagctgccaaacctcttcatatttgttgtgtcttctgaacttccaaaaacaacattgggaatataaacccgcatgtccttttcagtcaatgggaagtcataagggcaaatcataacatttggggccacacccttggcagggtggttggcataatgagcaaaagctaatggatttctcctatctacaacatcaccaccataatccactcgttttccttccaaaggcttacttagtagtttccacaacctatccgaacctttctcatcactttgcacattggcgctgatttttggaatggttaaggcattccaaacttcacaggtttcatcccccaaaccccaaggttgagcattgatcacattcccatcatatcttgtgattagatatgggtttttcgcgtcaacccttgggtacccaggaatgtagcggtaataagcaggagagtagactacaccagggtagatggcaaccacattaccaacatcagcttcaccattcaaaaataaaccttgtcctgcttccttgtgaggtatctgggaaggtttgatttcaagtgtgtagcccaaaagatctctgattttctgagacacttcagctcgtcttaatggcttagttttaggtacatctgcactgaaaaatcattatcaacaaccattcaaatatactacaataactagagtaaagagtgccatgttctagcactgattaattaattggcgctcaccaaaaactttcaatttaattaagtggcctagcctcaattaataatgtccccaaaattcctggaaccaaaataactacgtgcaaaaaatagtagtcctacaagttttataagggctttgatatcatataattggaaaaattgccaataggaacatacctggatgattaattgatgaggtgttcctcccgatagccaaactaaggccactacggccagaagccacatctgaccgttgacgtgattcacttggctcatttctcttatcgatgtcaacaagaattttatccattttctcgcaaaagcttttaatttgagaatgaacagtttcttggacaagcttctcctgatcaggaaaagagaatttacttgccatgtctatgatctcatctacatctgcctcttcagcattctttcccaaacgattgaaactgaataaaataaaagatttctggtaaggaaaagtttaagaaaatctaaaatgaacgcaatagaattagaaacatacgaacagcggcattaatttcgtggcaacaaactcagacagacatgatcaaaattaaaacaaacagttacagagcctgaactattaccatatttgtagagagagagagagagagagagagttaactaaccgtttcccctgacgatcttctccatgcaaatcttgaagaatgttcaagaaaacgatccaaaagacaa

SEQ ID NO: 237936 - DNA, 835 bp, Cannabis indica
ttacaatactcctctgcagcctcgctacacataaaatgagaattattctcgcaaataattctagtctcgacatcttattacaaatcgacttgtttagtaacgataaattagataaattagattatgtttacatgaaacttaagtacaaatctagtccgcttatatatgaagcgacttctctacttatattggtctaaagttttatgttatttaaccaaattaactactaacaaatttgttatttttttttttttgacgcagtgatcaaaatcacacaagattatcaaagcagcaatccacaatcgacgatgacacctcctcgaaccaggatagctcattgtctaaccgaaaggcatgttttcccaaatcatgcactgcagaattctcatcccgagccatatgagacaaaaatgcctccgaaatttgttatttaagtgtttaaattttacatatacaaattttatgatttttcatacattttttgttttttttttctaaaaagattatttaatgaaataattgaagaaaagctaaaaaaaaatatgagaaaatcaggtatctttataataatcagaggggtaattagtcatttatgctgtttttttaacctttttataaatttttctcatcaaataatattttcaagaaaaagtcatatttttataaacttacttttaaaaaactattaaaatgaaattcccctgtttaataactatactgaaggttgatcttgagtcgtaagtaattgtgggtcgtttgtaattaaaaataggacaattgaatttgaacccccattaaaaatgattatgatatttttcaaaaaattgtaaaaaaa

SEQ ID NO: 237937 - DNA, 704 bp, Cannabis indica
cttgggttgattggatagttctttattgtgttagcgcatattgttggtgattaatagttaatgagcttaacatctctgtgtgtgtaaagtctagttgaagtagaagagtgtgaacttttctagttaactaaagcctttgatgagtaggcctagtctaactagggttatgtagctaagtccactccttaactctataaatacacagtctaatcacaattatatacttttgatgatcagataaataaaattgcttctgatttagagatctagagagaaagattaagttaatagcattgcactatcaaattgaagtaattactatagatcaatttagtacacatacctaattattatatattattattgtattctatattatatacaaattatcttccatttattatcaatttttctaacaaccaaaccaaaattatagtaattatatatatgtactatatgtattatatagatataattattttgatagttgtatgtcaaatattatgctcatcaacataatgttaagataatattaagtgtaagatacaaatacttagtttttatattaagttatatatttttctttttaaatgtcatactaaattatgttatatataatttaattaaataaataatatttattttatagagaaatatgtttaatataaaaggctatgaaattataaaaaaaaattatagtaatt

SEQ ID NO: 237938 - DNA, 1201 bp, Cannabis indica
taaaattttttggaaatagaataatagtaatttatcttgtttactttatcagaaaacataatcgaaatgcttaaattgactaaattgtagttattttagttaaactatagtatatggtagttattttataagacatgttttaaaggataaaattgtcattatatatttaatattgaaaaataaaatagaaataaataaaatctattacccttaatgatattccttacaaacttggtggggaaaatattctctttcttttatcccttatttaatcaagttctctctttcttaattttaataatgcaagtaaacaaatgtaagagaatgattactttaccattgattctcattacttattagtaaacaggccattagtgcaacattctctttcttgaaggacgcattttctctttccactacttgtgtgtgctccaagttttctttcatttgagccatgatagtggcaagttgttcacggaagctggtctattcctcattgatctctccttcctccatgtgtttcgccattgcttcagtgtgggttgactaaatgataaaggttgaaacactttgctcaattgcagcttgtcagggccccacggtgggcgccaaattgtagatgctaaaatccacaatcaatcgaagatgatcatacgcaggcaccggcaacctgtagaacaaaagaagagagtaatcgagaaatcttgggagaccgggatggtgtcggccgaagggactccgacggtcaagtcaacaagattgttaacaatgtaatataaaagatgagaataaataatcgaactaagttaccacctatcttgattgcagaaataagtatgtagttttagagagaatgagagagtgaacgataagaagtattgagatgactgaaattgatcatcctctcttcatgactgagagtagctcttataggcgtccatagaaagacgttactcatgactgctcgccccccttgtgaagcgctcctctcccacttaatcaggagatcgttattttcgtggttagtttgactaatcactttagaaattgttagatgagtgataagactcagtctcgtatacgggtcggatcattgtgagcacaatgttgggtaatgggtaatgtctgacttgcctgtattgttttgggcctgttgggcttggtattgtgatcgtaccgtcaaatagtccaatccaatctt

SEQ ID NO: 237939 - DNA, 841 bp, Cannabis indica
tagccaatgaaaaaataaaaaagcaggccaccatttaaattaaaaacacgtacgacacatttgtcgccactaactcagtatgtgttccaaacttcgtacacatctcccaataagaataagataccccgctcactatactctcttcactttatttatttgtaggttttttcccttttttgtttttggtaaagagttgttgaatgagaaatttagaaacattcattttctaaaacaatattgaagagattacgatccatggaatccatatttctgaaacttgtctttccaccaccaccttctatcttcctcaatacattatccttgattaatattccttcctttgccctcggcgggctctccgaactcagaggcaacaatatgccttattccaaattcttcatcaccaacaacaataataataataatgtaaatgctactaatcttcaaaaacagtcttcatcccaagagaaaaaaactactgaagatgtcaaggtgtctagtagattaggcatgcttatatgttacactccagcttttctagcaaccttggctttttaccttctttttccccaagagagctacagcttgagaatgctcttgctcaattcggctctggctcttcatttcttcaagaggatttttgaggtaaccatatatttatttatttgatcttttactccaaaaaacatagaaaagtatggaaaaggcccaaaagggtgtgtgttgaattaaagcattctcaattttgaaatgtaggaagccatttttttactgtaacatgattggtcattctgtttttgggggaaattattacatagataggaataggatgaatgttacc

SEQ ID NO: 237940 - DNA, 4725 bp, Cannabis indica
agctaccaagatagcttctaaaccaggagggacaaaactctcgcgggaaacacaaccaggaatggaaccagaagaacgagtcaaaaagttagccgtctggtttccggaccgtttaacaaagctaattgaaataggaaataaaagagaggattgcataagagcaacacaatccgaaattaaaagccccaccggagacaacaagcgcttcttctgttgcacagcttgcaccaccagcagcgagtccgactccataaccacaccagcagacacacacccctcaacccactttcccttcacccaactgagcgcatcctttaacgctatagcttcagccaaaaacgggtcgggctgaccataaattttaaccgccagcgcatcaatgaataaaccattatgatctcgagcaatccaccctaaaccgaaaattctaacatgaatgaaagttcagggagcattatttagtacatatcaaagtttgaagggcacgatttggtatatatcaaatctggagagcatggtttaatacataaacaatcatgaaacaataaaattaaacaataaaattaaatgaaattagacaaaagtccttaaaaaactcccctagttaaaatggtttcatttacctttagccaaaaacaaaacaaaatggtttcatttaccaaactaaaatcagagactaatagttgtgacaatgataatgcattttgaatatcgtcgtcgtctcaggtgagcctccgttgtcggtgttaccgctcagcgattggagactgtctgaatttgagggtcctgaacttgaacctccaccaactccgcaatattatcgaggtatccaattctcattaaccatttccccatatgttttaacgtctgcaatttgtctttgaccttattagggttttctattttctgttgaaatgctctaattattagtctgatttttatagtttcaaactgagaaaaagaaaattttaaactcacaatacagaacagagattaagtgagaaaatatatgatacaaaggcacaacatagtaacttggtagaaaggaatagccactgcataatttgctgttacactaaaagccatatcagttagtgtgaggtattttgtgtatttttcattgatttgatttttgtgaagatatagaatggcttattggtaagttattcaataaatcagttggacactatcagtttcattactttaacaaatcagagcaattgctaagtaaaagctctaatgaatgcttcatgttattttgaagttactggatgaatgttggttataggaaattcatccaattggtagattttagatttttaagtatagtagacatcttttggtttttgaaataaagattaaaactactatatttctctttgtccttctctcttaaaattcttaggtttttggtagcaaagattatttgtccatgctctcttgcagtcatttacttgtatgttgaaatcttgtgttgatggattgtctgatacatattgtgttcggctctgtgcaattggtcagcttgcacagccttgggtccgggcctgtgaaccacagagagaatgcattttgacctaaaattcttgaagactacaacaataatgcatagtcattttatggttctgaagaaaatatattaatcttgttatatattcataatgattcggagaagctttctatgaaatacggacaattgtcatgtttaacaaaaaaatatgttttttttttgtttttctattcaagaatttgttgagtgtgaaagttggtatttgctttattatttttgggtgtacatttgaaattcacaattgcatattgtaacacttactggtttattttatgtggtttagatgctggaatggtgtttgtttctgatgggataactttcaatgtaatgctgttctcaccaattagagcattgttgcttagctgaagtttttgtcttatatttggaaactttcttgaatgcggaaatgaaaaaattggttgtgggatcttttactttgaaacgaacgatatcaacttcgactcatctttgtgagagagttaagcaaacaggtaatgttcacttcaagtaatatagttgagattactagtatatacatcatatctagtttgatagatcaacattgagtgaagttgctatttttattgctctggtatttactgcaggacatttttaattaaatattatctgtatattttgagcagaaaatgagatcgtgcaaatgttctacttgcccactgtaagagattcgatgcaaagcttgcctatgaatggaaaactgttgagaaaggatccatcagttcgtaaattggatgaaaggtttacaaggatcttgaaaattttcaagtggggacccgatgcagagaaggcaatggaagtgctgaagctgagattggaccaccggttagttcttgaggttttgaagatagatgttgaggtctctgtgaaagttcagtttttcaaatgggctgcaaagagaagaaattttcagcatgacccaaccacttacatggctttaatccgttgcttagatgaagcaaggttatttggtgaaatgtggcagacaatccaagagatggttcgagctatatctattctagatcctgctcaattatctgaaatcgttagtatattgggaaaggcgaagatggtgaacaaggccctatctatcttttaccaggtaaaaggtcgcaagtgcaagccaacaactaatacatacaactcgatgatcttggtcttaatgcaaggtcatcatgaaaagatccatgaactttataatgagatgtgtaatgagggagactgttttccagacactgtttcatacaatgcacttatattagcatttaagaaattgggtcgttatgactttgccattagattgtttgatgagatgaaggagaatggtctacagccaactgcgaagatatttaccaacttattggaagtacatttcaagttgggtaaggttgaaaaagctttggatcttttcagggagatgaaggagagagggtgttgccctactgtctttacttacacagaattaataaagggtcttggtagtgctgggaggattgacgatgcctataatatctataagaatctcctaagggatggttgtaaaccggatgtagtactcatgaacaatttaattaacatctttagtaaggcaggtcgcttggaagatgcccttagatttttcgaggagatggagtctcttagatgtatacctactgttgtgacgtacaactctgtcctgaaagctttatttgaattaaaagctccaatttccgaggtttctgtgctgtttgagaagatgaaggcaaatggggttgcttctagttcatttacctactcaattcttatagatggatattgtaaaagaggtagacttgagaaagctttgttacttcttgaggagatggatgaaaaaggttttcctccttgtccagccgcctattgcagcttgatcaacagtcttggaaaagcaaaacggtatgaagctgcaaatgagttgtttctagaattgaaagagaactgtggacgttcaagtgctcgggtgtatgctgtgatgatcaagcattttggaaagtgtggccttctcaatgaagcattggatttatttaatgagatgaagagacttggttgtgatcctgatgtttatgcatataatgctctaatgtcaggaatggtgagggctggcatggtagatgaagctcattccttacttaaaaccatggaagaaaatggttgtattccagacttaaattcgcacaacattattctaaatggcttggctaaaacaggtggcccgaagcgggctatggaaatgtttacaaaaatgaagcattcaaagatcgaaccagatgcagtttcttataacactgttcttggctgtcttagtcgagctggtttgttagaggatgctgcaagacttatgaaagagatgaatttaattgggtttgagtatgatgagatcagctactcatccatacttgaggcggttggcaaggttgatgaagttcacagattcacctcttaagtgaaagaaagagacttggtatgatatcatttctcttgtacttgttttactcttgcaactgaaaattgaatcttgtcatagatagtagtttcttgacctcaatggatgtgcttgattcttttgttggacaacttgtgataaactcaaaaacaatgttgattcaaggtttaacttgtagtttttcaatgatttgcaatgcagacacggacatggtatcacgtttccacttttcttgtaccttactaactgtgtgttcttgtatatatgctcattgcccttgattttgaacggtaattctgtgtaccaaagtaatttatttcttacatgagtaatttcctaccaatagttggttcagtttctattctcaaaggaataggatcattccttaaagcaaatgctatttttatttaggcattagtaatgttatcatttaaagcagaactccctaggctatcttcatgaacattaataaaacataatagcaaggaagttgcataccgaaaagtccctcagattttgtgttctgttttgctaaccttagtaatcgaactatatttcgaatttgtttctttgttctttaaattatgtagtggaaatatctatatcttattcacagcaagcagaaatgttaagatctaatgaattttttttgctcattgataccattttcagggtg

SEQ ID NO: 237941 - DNA, 865 bp, Cannabis indica
aaatttaatatatcttttttattgtgattcgcattattttttttatttttattccttttctttttttatttatttttttacaaggtcaagttctttaggaaatggagacctgatgcgtggggaggcccactttgtgccggtgagaggagaatgcatcattagacacttaaaaagtttttttttttttattataaactattgtcagattttctttttgtttctctttcatttattgaaagttaaaaaagtaaaagtaatataaaataatattaattaaattattttatttttataaaaaaaaaattaagattagttatttaaaaaagaatgagagatataacttgtgaatatattcacttatttttttaaaaaaaattattttattttattattttatgtattttttttcaatatttattttgagctttgacataatttttgggggtctaattaattttcatataaaagttggattattatctaattttttgttagttgttatttagttgttcaacagaaaaaaatatgtaagcttaatttttcagagtacatatatacttttgagttagtatataaatatttttgtaattgttttaaagttgttatattattattattattattattattatttatattattattattattattattattattatatttgtgagatattagtgtgttgttttgtaatttttatttttgttgtcacaacatgatgatgtatattaagtcgggttattatactattatttgtgtgttgttattagttgtgcaaatagtagaaaaattaaaatgtttagttttttttttcataagtacatgtattatgattgtttttgtgttgtgtttatattttttt

SEQ ID NO: 237942 - DNA, 1118 bp, Cannabis indica
aaaaaagagagaaatcaaagttgtaaaagaaaaaagatcaaacttttgtaacctgtggttgatgaatggatacaagctctaaggaagcttgacggagaagtagccgataatattgggtgaactccgagatcaaaattccggtgttttcttttcactttcatcactgtttgtattctctcatctcactcttatttttcaaatatttgtatgattgtgtattttgtgttcttgttattttcagtttggtgtggagagtttcttggtcgagattaaaaggaaagttttctgggttcagttctaaggttttaaatgtgattttttctgggcttattatttcgggtagaagaagataagagcaagaaaattttgttttgggttgttcttgtttcgggtagaacaagagtgaagaagctataaaaataatttaagaaaaccctaaccatttttgttactgccattagaagaagcttgaaaagattagaaccataagagtcctaatcccaccatgactgtaagaagaagaagagaaagaaaaaccttaaccctagtttttatttgtgcagctatttttgtgaagatgaagaaatgtttttgaaaagatttaaatttttagagaggaaaatagaagaggctgccgaagtagtagtgctttagggtttgagatcaattacctgataatgaaccttttatattagggtttcctagatctttagggtttcatttaattaggatgctttttctcttgtgtgggccgaaccactattgtggcaagatgagtcgtgtttgactcattcttctgcttgaccaaacatagattaaaggaaaaggagagacttgattggagagagagtaagagtctttgacttttgtgagatttacattgatacttgattaatatttgttgtcgggctctttgtttttgggcctgaaataaatattgaaaattgcgagttaatataatattatctttttagtatggatgcatattaaaaagaaaatttttaaaaaaactaaccaattttaattcttgtattaatttgtgtctttgaagtttttgttgggtataaaaaggctgcagattttggtaaaaatccaacactgacaaagtggaagtcgta

SEQ ID NO: 237943 - DNA, 603 bp, Cannabis indica
gatgaggagatagttaatgacattttcaatgctcatgacagaaacttgatcttgtcaattcaactgagtgatactccttgtgatgattgctggtactggtctaaagaaagttcaggtgggtactctgtccgaagtgcatataagatgttgcagcagcaaaatggttcttggccgactgctggtgcagacaaaaaatggcagcagctgtggcttttggacatacctgctaaggttaagcatatgctttggcgagcgttgtcgggttatcttccaaccaaggttcagctcgatacaaaacatgttaatgtcgatttaacatgccctttatgtcatgttgatattgaaacaattttccatgtccttatgcaatgtgactttgctaaatcttgttggaatatttcagcaattgattttaaagggggagggggaacaccagattttgctaactggtttggtgaagctttactgaaggatacatctactgtcatggaggaaagggctatgatagcatggcgaatttggttgcctcgcaatgacatcttgtggagcaacaaaacaactacagtttatgaagtggtgtgatcggcaagaactaatcttgac

SEQ ID NO: 237944 - DNA, 751 bp, Cannabis indica
aaaaattaaaaaaagaaaaattagtgcaggcatcagtaactagttatttttaactattttctccatatttttttagctctttttcttttcataaaagaagttttttaaaaaagccacatttttataaacttgtgcctataaaaaacaatgaaaataaaaattttcctttttaaaataactacttattatatattttatgagtttttatacaagtaaaaatatgaatttagaaaaagttatttatggaaaatatattatatatataataaagaagttaaaaataagaaaatttacataaaatactaatttctctccaaattttatatttagactttgacaagaaaattttacttacaaactacactagaagctcatataataggtgcttaggtgtacgtggttggtctttttgtggaggaagtgatggagcatcaaacacgaattcaatgggtaataaattttctttgtttaatcatatttgttagttgttatatttagtttatattgttgttttgatgcttgatctgttggttattactattttatgctattttttgtgtgaaaatggttgttctttaagttttctgcatttgtctgataatctggttttttttcgcttagtctgatggtgcctaataggggtccgatgattagttcagatttgaggtttaggggatgatgtatatatcagtttgatagggtgtctaatgttaagtcgatttttttattgttgaggttgggtttatatggt

SEQ ID NO: 237945 - DNA, 623 bp, Cannabis indica
taccaagataatggaatggagagcgattttgtgaatactatcagtaaccaacttacagaatactactccaaagtagcaattctacttactcaacattagagtacaaaaatgctagtatccatggcctttttggcgtgccctcccaccgttcttcaacagtgacctctgctttactaggaaagcaggggtagccacttcacatctagaagctaaacctgtgtaacgtaagcttgtagattcaatttatgtaagttgcacataaacaaagaccaattcatgaataaataacaatgtttataatctatttattgtgtttaaaccacttgctcactgactaacttcttaaagttactcttttagttccacgtgcgtcctatggtaacctcgcaagacagagccccaacaaagtctatgaaacttggtgaatagcaagggaccaagacacttttctgcatggtaacttcgggggcacccatactgtacaaggcatcgaactagcacaaataacttatgcaaagaaattttaacgctcccataagctactgaacatgcgtctaaatcttgcaggcatacataagcttggcaaagtaaattcggactcttacttgtcaatgccataagaa

SEQ ID NO: 237946 - DNA, 990 bp, Cannabis indica
ttttcctggtgggttttgccctactgttggcgcaggtggacactttagtggaggaggctatggagcattgatacgaaattatggcctcgcggctaataatatcattgatgcacacatagtcaatgttgatggaaagtttctagatcgaaaatccatgggagaagatatgttttgggctatacgtggtggtggaggagaaactttggaataattacactgtggaaaatcagactggttgatgtcatgtcaaagtctactatattcagtgttgaaaagaatatggagatacatgggcttgtcaagttatttgataaatggcaaaatattgcttacaagtatgacaaagatttattactcatgactcacttcataaccaaaaatactacagataatcaaggaaagaataaaacaacagtacacggttacttcccttccattttccatggtggagcggatagtttagttgacttgatgaacagagctttcttgagttgggtattaaaaaaactgattgcaaagaattgagctgaattgataccaccatcttttacagtggaattgtaaattcaacactgctaattttaaaaaggaaattttgcttgatcgatcagctgggccgaagacagctttctcaattaagttagactacgttaagaacccaattccgaaaatcgcaatggtcaaaattttggaaaaattatatgaagaagatgtaggagttgggatgtaacttttgatcctgtacggcggtacaatggatgagatttcagaatcagcaattccattccgtcatcgagctggaatcatgtatgaactttggtacgcagctacctaggaaaagcaagaagataatcaaaagcatataaattgggttcgaagtgtttataatttcacaactccttatgtgtcctaaaatcaaagattcccatatctcaattatagggaccttgatttaggaaaaactaatcccaagagtcctaataattacac

SEQ ID NO: 237947 - DNA, 1005 bp, Cannabis indica
atatcagccatagtgtgtctttctttgtttgtattgcccacacatattttcccatatgaaccctattccatgcagctacataagagatagcccctagaccttggtagattgctttcccattccacaagtaattcctgcatattgtttcaatagtattcaccactttctttggcaaaatcacaacttggcaccaataagcatgtatagccattaaaacagaatttattaacactacccttccagcaaaagaacgattccttgtgctccatgtcttaattctacctatcattttctctgccaacacttcacaatctttacctaagatcttctttgcaccaattggaactcctagaaaagtaaagggtagagacatgcttgtaaaaccatatatttgtaccaatttccttaggtgatcatcaggcatattgcttgaatagattgctaattttgtggcattaggatacaatcctaatgtcacagaaaacagcttgagcccctacaataagtagtgaacacttccaaaatcaccattgcaaaacaataatacatcatcagcaaagacaaggtgattaagtttaattgcagcacatctgtgatgaaaatggaagtcatttttttctccaatcatccccattattcgggataagtattctatacctaacacaaataataggggagacattagatctccctgtgtaagtcctcttttagactcaaagaatccatgcaaagttccattaaatataagtgaaaatcttggtgttctaacacaagtcatcactatgttaatgaaactcgaaggaaaatgtagcccttgcaacatttcttcaatgaagtcccactctatagtgtcataggcttttttcaaattcaacttgataatacaattaggcttattgtttttcctcccacaatgcctaagtatatcttaacaaatcataatattatgtcctataaaccttcccctaatgaagcctccttagttttgagagactaaattaggaa

SEQ ID NO: 237948 - DNA, 758 bp, Cannabis indica
gatcaatctagccatccatcgcattttccgttgtcgccaagcaaaaattacaaaaataacatattgcacatataagctagataatacccctagagtttaataaaatctccgaaattgagaaattataactctaatatttatttctaaatattggggtccacatttaaatttaattcacaaataataataaaataataaaaattagtgctaattgcctttactaatccataaactagagcggtcattacaattcaagtcacaaaaactgaacaggggcttcatctcacacaaactaaatatctccaagacttacttacaagggctgacatgcagaatgctaagactcaaaatatacctatgaacagtgggttaaaactatcaaactatggaagtgaaccaatggaagatgtcaccctctatagatcaatagttgggggactacaatatgctactataaccagacccgaattggcatactgtgttaacaaggtatgccaattcatgcaaactccattacaacaacattgcatggctgttaaaagaatacttcgatatatagcaggtacactagactatggactccatctccaaccagctcctgatttttccattgagcctttttgtgatgctgattgggcagccgaccctgacgatcgtcgatctacaaccggatattacatttacttaggtggaaatctagttgcttggaagtctcaaaagcaagtaaccatctctcgatcttcatctgaggctgaatt

SEQ ID NO: 237949 - DNA, 686 bp, Cannabis indica
ttttttttttttgagggaaaataattcactaaccatttaaaagtaatcacctacggctaaaaaaaaaagagtagtattgaaaaaatattaaatcaatatttattactaaaatttaaactaattataatagactaattattaatttcaaacgtatcaagttaattataatagactaattaatttcaaacgtatcaagttaattataatagatttatcctaaataatagattaattaaaaatttttcctttaaatttaaaaatataacaaattaatcacttctcttaaattttttagtcactaaaaattcttcctaaattattgaaattgtttaaggacatctatccagtttcatttaattttactaattttgtagttgttcatgtactaaatcatactccctaatctttgatatctattaaattatatctctcgaactttgacatgtaccaatcaagctcgctgaatttgtatctatgttagactttctttactaaaattgaaaaaaagaaaaaccttaaatctaacaatctcaattgtttaaaagaatttttaacggctttaagttcaaaagcatgattcaatatatgtgaaaaattcagaagtaaaaatcctaatatattttatatatatacataatttttttgttaaaataagtaatatatattatattttattattttataat

SEQ ID NO: 237950 - DNA, 1168 bp, Cannabis indica
gtatatataatattgacaataagggcatctccaacccaactgcattttcttataaatagtgtgaaattttgttttttttactccaatggcacgacaattttcaccctattttcatggggatctatagtgtcccactattaattaatagtggggcactatagatcacggtattcttttttttttttaatgattaaataatatatattaatataatttattggatttaataaatatttagtattaaaatatttttattatattgataaaataatagaataataaagaatgtaaaatttggtgtaatttttagtgttgtggttagaattggaaaaaaatttagtgctaaaataatagctttttggtgttaatttaacaccaaatttgagttttaccattggagatgacctaagagaagttagtatagtatatatacaagaataagatgaagaagaacacaaagtgaatgaagggggatcaccaataacttgaacaaagtttagcacttttgtctaaaaagtttatttcctctaccaccaacacttatggatttatggaaataaacaagtctcaaataattttttaggttagtgtttaaagatagaaaagtagtgtatccacaaaggtgaacgaaagcctctatttatagtgtaaggaagaaccaaattttaaaacacaaatcccacataccaatggcagttaccagtcctataagagagatttgcagggcaaaaaaatgttggagtaaagtgtgaaaatttctcccattgaatgctttccgtttcacaatttttatcccaaaaaaggctccatgcgcaatatgtcgcttggcaccaagcgacatgttgcttggaacaaaacatttgaaccttcgggatacattgtttcacgtcaaaaaagctaccatgttgcctagtaagaggcaacatatcacctgaaacgtttcttcaactccaattttgagttttgaatctcttcaacgatacaccaacgttctcatataaaataaatgaatatttcatcatttttctaagagctaaaaactttcttcacatgccttctaacccccaaatataattatttttttaattacgtattattaagtttagtttataagttacaaatcccagaaactcctcaaatgttacaaattttgtgtttattatactat

SEQ ID NO: 237951 - DNA, 992 bp, Cannabis indica
gattagcaacgagctgcacaacttgtttaaaaatcacgtaatatgcctatgttagttagggtgttacagtttgctaagagagtatggagggataaaattgatagggtgaaattgctatcatttgggattttcataatcaggtttaactcgatgaatgatagggatgaggtacttaatgggggatatatcttctttaatagaagacctgtgataatgaaaccgtgggatcccaatgtaaatttcaagaaagaagatataaaatgtgtcccaatttggatccaacttgaagagttagatctgaaatactagggggaaagattattgttcaagattgtgggacaaatagggaaaccgattgtggtggattcagtgacaaaggagagagacagattgaattatcctagaattctaattgaggctaagatggaccaacaatttctaggtttcattgattttgagaatgaacatgggttcagtgttcaggtgggagtcaaatatgaatggaaacctgtgagttgtagtcattgttcgggcttaggccatacaaccgagaaatgtaggaagaataccaagggaaagcaggaatgggttgtgaaggaagataaaaggttgaaacaaaagactatagatgaaggtgggtttatggacgtgacaaagggctataaagttgcagatactgctgctaccaaagaaaccttaaaggttgattatgcctttcagggcctggagcaagaagaacagcaagatagtgaattggggatgattagggaccagccaaatgagagtaatacaagaggggggagggggggggggaggaagttatctctttctaatagataagctactatgttggaatgtccgaggggctaacaatccacaaaaaaaaggactggttaagtaatttattagtcttcaaaagtggattttgttggtctccttgagacaagagtcaaggctcctaaacttgggaacttgtactctaatgtgtttgc

SEQ ID NO: 237952 - DNA, 742 bp, Cannabis indica
ttttaaaattttgcacaagactcctaaagtacttaagccggccctaggtaggattgagtgtttaagcttttacaataatttattagttcgttggtttagataataatgtttatataaacgtgtggttgatatggatatttttgcctatatatctttatcatggtaaattctaatggtaatgtagaaagtagttaaaatttagcataaaatatataatatgatccaaattttattatttcttgtttactcttttgtcacttttttttttattttttaataaaaaacttattattataaagtaatactttttgtcacttttttttttttttgtaggaaataaacttgttatcataaattaaaaggtatagtcatttacaataacagagtttataggcggaggtatacaatctgaccaataacaagcctcatccacccctaaagcaaacttagccaacccgtccgcagccatattagctgaacgtttgacatgagaaacatttacattagggaaaaaggataaaagactagtgatatcagcaattaaatcttgaaaagaagaaatagctgatgaagatttgcataaagcatttgaaactcgaagagcatccgtttcaacaaggctgaccggcaattgaagttgaatggcccagtttaagcagtgaaacatagcaattgcctccatttcatgagatgcaaaacaaccaagaaccggctttgaaatggctgctacaacctcaccatt

SEQ ID NO: 237953 - DNA, 977 bp, Cannabis indica
agtcaagttcacaactacattttcgatatgcgtttgttagagaggtgtgtacactaaatatcatatataataagatgcattggctacttttcttattgacaaattagttttgagatgaaacgtcatgtatcttaccaaacactttgggagaacaggttcaaaaagacaaacaaaaagagccgcttgtgattcggtgttaaagagtctcgtattattaatgtgtgtaaagaatctcatattataacaccatttataagatgcatgagtttcttatcattgccaattagttttgtgataaaacccatacaccttaccctacaatcccaaattttaagaacatccttctctatgacaaagcaaataaaattattattattttaaagatatttgcaacaaaatgtttaaattaaatttttaatagggaaagtacttaatttattattgtagcgtctggtaataatttgtttgttttttttttttaattttgaatcatgaaagtgaaagtaaaatttttatttttgaaaataaaaagatattctataactaattttgtttttcaattttaaaaacagaagacaaagtgtgttttgtaaattttattttcattttcatttgttgattttatttaagggtctaggttaggggtcggggtcggggtcgagtttggggccagagctggggtccaggtctggggtcgggtgtgggtttgggattgaggtcaaggaccgagttcgggtcaagatctgggtcaaggtcagggtccgaggtctgggcctggggttcgagtctttgggtctgggttgggtttgggtcaaaggtccagggtccaggtccggggatggggttcgcctctaggtctgggcctgggtcggggtttaggttcagggttcgagtcgcaaggtccaagttgggatcagagtccaaaatattgattaagaaaaaaaaattatttaaaaaaaattgaaaatgaatttttt

SEQ ID NO: 237954 - DNA, 614 bp, Cannabis indica
tttaaatttatttacgccccccctcactttaaattctgggtccgccactgtttacttacacttaggcaagttgaatgtcttttctagggcattagtgaaataaatttgtattggatgtatattgtttacattagactgtagcgatattgacagtaaaattgatattataaacttaccattatatctattatgagtttatatcacttagttgatctttcaatccgatatggttaaactttaagttaattgtattacttgagttctttgacttgttcattattaattagcttaaccttaaggtctagctcatacttacatcttgggaacttgatagttcaattgagtgggagtgttaatattatatgtgttactggataagtgacatgtgtgctttcaaagtcgcaaatcaactcacaagcccattcaccaagctcaaaccaactagtgggtcagcccacaaccagagtcgaactacaattccatcttagctgtaattatgcctcggaaaagccagaccttttggttctagaagcatgactctcgcttagagaaatgaagagtcaaaaaaatgcagtcggatatcctcaggggtgatctcgggagagtagtcgaag

SEQ ID NO: 237955 - DNA, 1261 bp, Cannabis indica
tatggactcaaacaagctccaagagcatggtttgaccaattgaaaaacacattactgagttggggattcaagcattcaaaagcggactcgtctctgttctttctcaaaactgccaaagaaatcatactggtattaatatacgtagatgaaattattatcacaggaaatatttcgagtactctaaatggtttcatcactcgactcaacactaagttctctctcaaagacatgggaccattgcactttttccttggaatagaggtattcagggaccaaactggtctctatttgactcaaattcgatatattcaggacttgctggaaagattcgagatgagcaacataaaaccatgcccaactccaatgacagcaggcaaaccgatttcagcaactgatggagaactcctgtatgatcaaaccaagtatagaagcctaattggagcattgcagtacctctgtcatacacggccagacatagcttatgctgccaataagttaagtcaatttctcaaatcacctacgacagctcactggagtagtgcaaaaaggattctgagatatctcaaagggaccatgaattttgggcttcacattagttgctgcagtaggctcaacatcacaggattttccgatgctgattgggcatgttgtcctgatgacagaaggtctgtagcagggtactgtgtgttccttggcgaaacacttgtgtcctggtcctcaaagaagcaagcagttgtgtcaagatcaagcacggagtccgaatatcgtgctctagctcatctagctgctgaaatttcatggattgaatcattactcaaggaacttaactttctactgtgtaacactcctgtggcttggtgtgacaatgctggtgcaggagccttggcagcgaaccccgtttttcatgctcgaacaaagcacatcgagatagatgtgcattatgttcgtgacaaagtattacagaaacaactggaagtcaactacattccctcacatgatcaaatagctgactgccttaccaagggtctgtcacattctcgattccaatttctcacaagcaaactcggggtcagatcatccccctttcgtttgagaggggctgttgagaaatagaaattaggcaccaggtgtcacaggactatccaatatcagcataacaacctttggttacaacagcaatccctatgaagattttatcaatcattagtgaccttttattgttagaatattccctgtaactttttgtaaaatgctgacagct

SEQ ID NO: 237956 - DNA, 1401 bp, Cannabis indica
tttcaggtatgcattatagctagaaattaaactaattcaatttatatatatatatttaacattaacctcgtccaagaacagaaacaacattatttcacagaccactcccaaatcacttactatcacttgaaaaatgaaaacccttaaaatattagaacattataatctactcaacaaataaaaaataaaaaagaacaaattgccttcaatacctatagaaattattctattcgttctccaaacaaaccaaagagaaagcaataacaggtgttaggaaggtatacttggaatggaaggttcgagatcatgagtttaagtctagtaataataaccttagtttctgtggtagaatgaaaccaactgctgccatatcttcaacaacctgaaatgttaatgccacacgtgagtagaatgaaatgtgaagcaccaatggctgccaccatcatgacagccaaaatgcatacttatcaacttgtttaattttatgagaggcacaaagacaacaaaacaaatcaccaccatagtggtatcagtgtaagttacaacaaaacacacaccgtttccaatgagccaagttgcaacaccccatcaggacaggtacaagcaagactgtctgcatacagaaaaaaaataatatttgagtaaataagtatacatgtctactttaaataagcatacaaaacttataaaagagccacagacatgatctattacaatcactttaccttgacacccaatgaaatctagagaagccattcctctgtccactgtcaattgaaagaattgcatttattagatacaaatttcagtacttgaagaactaacttgaacagtttgtaattaattatcatgattagaatcttacttcaggaagcaacttgctgtagacatatccggtggataaattgttgacgaaaacccaagcatggttccctgtgtacgccacctcaccaaccaacctgataattatttaaaagttcatggtctgccacttcttatagttcaaagaaatataagaatctaattagttgactcactgtttaacagtatagctgcagattactgatgaccaaccattattttacaaatacatggtggcgtgaggcgattaaggaatctaaaggaagttgcctttaagatcaaatcattgaggctccatcctcatacctcccataaaaaatatctacatatcagatcaaagagctactttttctcatcttcccataaaaagtatctacaaatcagagagctatgttttttcacatttttaattggtgaaaacattatctaaacaaatcccaaaatttcctgggaataaggtatgtgaaaagccaaagattaaaagctttacacttcgcctaaggcatactgaagacatgataaattagccactgcaagttc

SEQ ID NO: 237957 - DNA, 1251 bp, Cannabis indica
tttcattttagttaatattttttttttgtaatgttgttttttattctgaaccgattaatattttagtggtcttttatatgtgttagtttctatgaaccggttattttttaaaacaaaaaacaaaaaatcattatcaatgctttttttagtgtgaaagttttatttttatgtatattgtttgagtttattaacttgtttttctttgtatgtattatatagaaccagattcatttttattgattatttttattgatacatgtttaatataaccggttttatttttattaattatttttattggtacatgtttaatataaccggtttcattattttttaattttttttgtaagggaaatgtttgttttgaaaatttttatttattcaaaatcaatattgttttaagatagagttcatattaaaaaatattgaaatcattattggaacatacaaaatctaatattgtatttttatattgaaattgtatctttatcttcaataatgctcttattgttgttgtttctttgttttcttgctccttggctattttgcttgtttttgttttggtggtagagttggattagtgcatgtctttctgttgtggcttgtctttttgcaacgtccacactttatttatgcttttggctctccttttgatctcattcttcttctcctaggtctctctacttgctttttcgtgtatggtggtagaactatcatttttaagcactcaggcagtgtccattcactttcatttggtaatgaatttgatgttgtgtcatatgttgctttcatttcgtctattttgtagtagtccacaacatagtcataaactcgcagtttgagaatacaactattgcatcagcacatgggatttcatcttgctggaaccggttacattcatatgttttgtccagtaaattgacaagaaatttctctttctttagcacattcacttggtggagtattgttgtcaatggtgcaacctattttttaaacagaaaaaaatgattttataaccgatcattttactgttcttgtatctctctaatatatattttgtgtatataaatatatttatattagtgtgttacctcatattttcttgtcttgaataaagttatctttgtagttatttttcttgtcagtgttgtacacttttgttgaatgttcatgtgcttcattgtcgtttgtctaacccacttcgtgtaccaaacttcgtaagactctctatcattgtagtgatgagctagt

SEQ ID NO: 237958 - DNA, 865 bp, Cannabis indica
atgactcgggactactcaacttcgagatgttatcgtccttaccatgtgtcaaacattgatgtccacatcaccaggaaaagtttccaggttaacattgttaataataccattcgaaatataacttttacataatgtaatccttccatcacattttattcaattttattgtgaaatgagttaagtgttggatggtagttaataaacaaatgactaaattaaatatttttcaccctttttaaataatagaataaagattttttataataatttatattttatgttagttttttaaaaattaaaattaaaaatgtgaaagatatttattttctatctatttatcaattatcactcattacatcacttttttaaggataaaattaaataaaatatgataaaattaacaggtcgtatactataagaaacacaacttggtagtgtaaaaagttcacgagataaaaattaatactaattcttcaaaaaaaaaggaatataataattaaaatattatttatttattttatagaggataataaatatcatttttagaccatgtattttactactgattggactctctattttgataaataacaaattgaaccctgtatttttcaaaatagtaccctaaattaattctatttcaaaataaaacttaataataacaaggagtgttcatccaatccaatttgcactatttcactcatagtgcatccgattcacactcagtgcgaattttatattttagatcaaatccaatctgatcggcacaatagctcaaatccaatctaatccaatccgcaaaaatgggaactgaattggttactttttaatattaagctattttattttttcacataactaacaa

SEQ ID NO: 237959 - DNA, 1184 bp, Cannabis indica
ttctcgtaatgtctgaggttcgagtcctttttaggtacctacatagcaatgattattgtttctccattctcaaatattagtggggatactagtttcaaatacttttgaagttgatttttactaataaatatttcagaaaaaaaacttaatcttaacatgttttacatcttctatttcgtaggcaaattgttcaagccgaaggcccctcgggacccaacagagactacctatttcagctcgaaaaggctcttcttcaaattggtaagttctttcaactaaaacaatcttctttccataaattgtttttgagttaaacttatttatggtctaaattttttgattaggatgtgaagatgaacatgtaattggtctcgcgaatgaagtgaggcgaatcctctcagaatcggaatcaatttcgcacaattcatgatcctattgatttgatcatgcaatctcagtctcatacaaataaataaaagaaaactttgatttagcagtgtagaattgagatttatagaaaaggggcaaattgaaattgttccaacattcaaatcttttctttagtaagtgtcattttggcttatacaaaactaatttgtagattggaattctagtaataatatctcctcacatgttttggatcctattcaatttaaaatatgatattatatataccacataatagctaaaaatatgtttatgctaaaaatcttgatacactttgcatagtagcatcatattattattccctaacatcacttcaaaaattttgacacccttaaaagcttaaaagaagtatttattaggaatggtaggatttcgagaatacttctcctaataattttttaaagtattaatggtaatgacttttatttattgtttgttttattttttaatattaaatatataatcacaattttaactttaaaatatgtcttataaaataattattatataccttaatttaattcataaaagcaatttagttgatttaaacattttagttatattttttaattaagtaaacaagataaatcattattattgcatttttaaacaatttattagagttagtcccataaaaataaattgtcatatataaaatgaatgagttacttattatttcattgttaattgttttgagattgaactccatgcgccttattcactttcattctaaattc

SEQ ID NO: 237960 - DNA, 859 bp, Cannabis indica
ttaattattctaatagtattaaactagtttataaagtcacacacgtggcgtccctatagattagggcgttacaacagtcttcttcaattctccttgtagccgagctatgtctccccatgaaattacaaaaatggctaagaaaatgctcaaccaccttgtcatactcatcaactacaactccatcaacattataagaacaaattttattctcagctctcctctttttcatgatagaatgaaaatagcttgtgttttcatctcccatttttaaccaacaaactttagagttctggtgcatgcaactaatgtactgatttcgggcttcttggaacttagcatgagtcaacttttcttttctagctgctgtaggacaaagcgagtttgtggccaaggcttcttgagcttcaatatacatctcacgggcttctttataagttccagtaacattctcatgtttatttacatagcaactttttaggatatgtttgatcctaaaaagttgctggtgtaaacttttcaaatcaataatattgtgcttttcccaagcagtaagaacattctccttgtaaccctctttaagcatccagtaattgcaaaagtggaaagctttagtgccacggttactaaccttgatatgctttacaagacgaaaactgtgatttgaagagctccccatctgaaactagcttctgtgttcgggaaacaatttcaccaactttcgttagtgaacactttatccaacttcaaatacactcgactcccctcttcatggttgttggaccaagtaaagaaagagcctgaggtcttcaactcttctacctgaccctgagcaagctagttttgactatcctggatttca

SEQ ID NO: 237961 - DNA, 1634 bp, Cannabis indica
atctcttcactgagaactagatcacgaacatcattaatttttaacttattacttctcgatgagctactcacatctataaatgtagcattccaacagtctggtagagaatacaaaaatactaatgctcataattctttttcaaatttgattccaactaaattctattgggttgactatattgaatttatttagatgttgagctaccaatgtaccttttatcattcgcaaattgaataattgcctcatcaaatgaactttgtttgaggctaatgacttctcatacatattagagagtactgccataagagtagtcgatcgtggtcttttcctttgctatattgaaagcaatattttgcaagaaaacatcaattaaatagctttgaggggcctatctatcaagaagatcccactcttcatctttcataccgtctcgcttcttttttgagagaggttgataaagctttttctgatataagtagtctttgatctacattttccaaaacccaaaatctgtaccatttaatttatcgaattcacttttccttcgtccgcggccatcactctcacttaaatctagctttcgaatagaatttccaactgagaatatcaatctaataccgattgttgggaaaattacgtaaatttttctataaattagattagagagaataaaataatagcagtaataacacacaaaaaaatttgataacaaattttggtggtgtctaagtcttctgcaaatcttttactgaaactaaagaacaaaaatacacaaaatatttacaacacttctcacaacccacaccttaattatacctaagattttttctcacaaaaattatctcaaattttttctttctctaagcttttaactaaagcccttaaaaaaatttgggtatatataaattgaacctatgtgagtttatataggttttgaaagaaataaaatgggtggtgaaaattattcaatgattaagtaccttctttctattgaaatttacttaacttatagcattctttatttttaactaataaacttttagctaaaactagtttgtcttgtttccttaacataggtctgggtcttgggaaaagttcgggatggaggtcgggttcgaggtccaagacttgggtctgggtttgattctaggtttcgggttcagggctgaagtttgggttcaggtttggggtcaagttcgaggtttgggattcaggttcgggttcgggttcgggtttgaatccgagttcggtctagggtctagggttcggattttggactaagtcttgttcccgaactctagaccattttcaaatattataatacatgctaattaatatatagatcttttgttatatattaaaaaataattcgtattgtattaatatttatggttgtaataattaataaaatataaaattttattcaaacataatttattctttattatttaatgcaatacacccttatatgttttaccaaataagccattcgatgtgcttttttttgggtgaatatattatatatagatactttgcattacttaagacaagaggaacttggtagatacagtcggaggtgcccttatgaaatttatagctccatatttcaaaccatgcttctcacgtattcattc

SEQ ID NO: 237962 - DNA, 847 bp, Cannabis indica
gtttctctagccccattcaagtagagggggcaaatgtactttaaaaaaaagtatgtttcatgtgcttaaattatcctttgagtttgttatttattttcttgtatttcacatatttcacatattatgattaattgttttctatatatttttaatattaattaaattaaaatacgtaaaatatttaatattaaaatatattaataataatatatcacatcttgtagtgtttcacagcttaattttctttatcatactattgttagttaaaacttattgaaatatatatgtattagccttctagttaggtaggtatacaacacaaaacaatcttgacatatatgctttaattgtttcattaacaaatgtttagcttccaatttaactatctcatatgtgtatatgaaataagatgcgtgtgattagagaaatatatatagcctaatcaattgttattattattaagttaattatttctcttaagattaaagaaataatcatatattatataccaaacattggaagtcttcttttctaaatacattcttaatccatgttttataatttggatttggaggtagagtagtaggtattggctattagagtctgttttatcaatagcttgatgtaataaggtccagcatatatactaatttagtataaaatatcttaaggtgttaagcattataaaaaataatgtatgattatcggagcatttcaaatttcaatatcatttttcataaattttaatatagtaaataatataaaaatcattaactaattatgagataacatataatcttattaagcactttaaaagtaaaacaacaacccttatcttttgaccaaa

SEQ ID NO: 237963 - DNA, 1086 bp, Cannabis indica
ttttttaattttattaatcattcaaaattatttttttaagatttaccaaaaaaatgttaaatctttctcttattttttttctgaagaaggtacgatttgatagttgtcaaagtttaggagggaaattactaatttacaaagacatgttagcatttaaacggagtaattggatgaaacctaacagaaagactaaaattctataaatgtaaaagttttgagagaatttttaacaagtcatatattttataggacaagatcaggtggtgtcgagagttcaagggacaattgctaattattcattactacattgtcactctaattttttttagtctattaaaattttcactgaattactcaaaatgttaaaatataagagaatttacaaaatatgggatacacttataagttgacttagaaataaacatgtaaagtgttgctattttccagttaagctttggacgtctttatgcttctgtggagaaggcatatctagaagaacttgaattttttctggattggcttcgattcctctgaaactgacaataaaactcataaatttccttgaaaaaactctaaaagtacacttctttggatttaatttcattccatacatctggatgatgaaaaaagattcttctaaatcttcgatgtaaactgtgttggaaattgtgttggtcttctggagacacgctgaaggctttgtgttggttacatggtattatgtcttccaaatactgaccatgctggatcggatcttgcctgaacaagtttttcctcgttcatccgaaaagactgatggtttatggatctagtccactgacgttatctgggcccattttttaggccttggatatatgggttctatttattatttagatttaacgtgtcctttatcggaaatacgaataacaccatcgatctgggcttacaaaccaagtgcatataaaagtgaaaagtttggttttgtttagagcattttgggtaccaaaacaaggcattttttgagttttttgaatccagacgctgcaatctttacaagtttgataaaagactcgttctctcccttagggcgccgcattgctaatt

SEQ ID NO: 237964 - DNA, 1159 bp, Cannabis indica
gggaaaatgttatctcaatttttactcacctaacgtgggatgcttacatggaaaatatcaacaccatgtggcaagacaactcaccaataaggaggtcaagttagcaccttagccaatgggcgtcttgacactcaaacgggacgacaagtgatagacgggggctagccggccaacttttggatagcacaaggccgaccagcctgcttcctgcaggtgcttggccggccaggatgggacctcgcaagattttgggtgcacaaccttacatgcggactgcatgctaggctacgaattgggccttaataacccaataaaatatatagaaaatacctatatttaaggggcattttagtcttttgtattttaccaatttaatatgtaaatatatacttattatatttgttaattaaagtttatgctctcctatataaagatccttaactcaaccctaaaaactttaagtcagtaagtctcattcaagccgacaagctctcagtctgatatcattctctttctctctcactcacacgaccactttagcttctctcaaatttgctatctttgattcctactttgtaactttaagagagctatatcccacctatagtgatctgaatagtgtacggtatcaatacaactaaaaagagagtgggtcattacccgctaattaaggggaccgaacctctataaaaaaccatgtgttctttactttcgagttctaattgtgtaacatgtaggaaacatcagattaatacaccctcctgtcggttggctaatttcagaggtcaacaaacttgaatatgtattattgaaaatttgaaagttattaattgttattggctatggatcttgaacatgtgttcttgataaatttggcaagaaggggtggaaatttaatttttataaaataatagagttttattgtaaatattataattaaattgcttaactgtttaaaaaattataataaagacttaaatataaaaataaaattattaatattaatttctaaaaagggtcttattaaatattcaaattaaaaagtaattattttaggaaaatagttcattatagtttatttttaattctaaaaaataaattttacatgttggtaactaggggtgttgttcatccaatccaatctgtactattttgctca

SEQ ID NO: 237965 - DNA, 884 bp, Cannabis indica
gtaagggaatgattaccttactattgattcccattacttattagtaaacatgccattagtagaatgactattccattttaaaaataaaggaaagatcattccaatataataataaaaaaaatttaatgatttttttatcaatttttttataaattttaaattttattccattctatttctatttgtattcccattcttattcttatttttatattttcacttctcttaaccaaacgctacttaagtattacaaatttcacaaaaagccactaaaaatataattaatatatattttttattatataaatcaatataatcaatttttaattagattttaaaattttcagttgaattggattatattagatattgaccacccctaacataatcttctcttacgtcgcacttttccttttttttttgtttttttttttcaaggcaataattgggcttaagaatagtaaaagcgacaagaacatgcattaaatatctataattatattaatttataaagtctcttacaaaagtatgaaagaaagagaaaaaccataataagaaagtgacactttccattcaaaaataaaaatgtagactaaaaaatcattatattataaattaatttaatatttataaaaacatagtaacatagtattattattacgcgcaaaaagtgagaatatttcttaaggggcaattttcgtaattttaatcatcctttacctttctaaccagggacaccttcttttcccgctatctccgcgtttcgtctactcgtgtatcctaaaattaatttcttctaacgtaaaaaaacctttcatttcgaaaacaaccttcagaatcgtacacgattcaactcggccacgaccgactcggtttggtttatt

SEQ ID NO: 237966 - DNA, 1424 bp, Cannabis indica
tgaacaaaggcaaatatgctaaagtaagcacccaaccaggggcggagccaggataaaattattgggagggggcaatatcagcaagtgtatatatacaaaaagtataaatttcaattaagaaaaatattacagtgacgcctctgacctaggttctctcgtttcccatggcgaggaagaataaacctggtcgtcggccgggattgaaggtggtgaatgatgcgatttcgctggagcttcgtcgggaacagtagctggttctctcgatagccaggagattcaggggttgcagacagagcagacctcagttcaggaagaagaggaatccctgcaatcagcaaggaaaagctgggctgatgaggttgatcacttccaagcagcttcgcagagccattggcaacaattttcaggaggtaaggtcctaaactctgatgctaagttgtcttttactgagccattgattaatgagggtaggaaaatagctcacatagacttggaagatgtgaaattagaagaggaaagttggaaatcagcagtgatttgtatggttttgggagctaacatcccagctgtggtctttgaaggctttgtgcgtagaatttgggggcacttaggcattgttcaagttgctagaatgactaaggggctcactatggttaagttcaatgatgaagcaacaagagatgaggttcttgagaatggaatgattcattttgataagaaacctgttattattcgaccttggtccgcggatttgaatttgattatgttggtgaaatcgattccgctttggattaggttacctaacctagtctccaatattgggggaaaaaatctttgagtgctattgttagtactttggggaagccgataatggtggacaaacataccaaggatcgaacacgagtccaagtgcagcggtagggaatggcgaaaattctgctgcacttgcagccgagtctgttgtggctggaactgctgctttagcagcgagtaatgctaaagagggaaggaaaaaaagagctataaaggctcctaatgatgattggcaggcccctaaacacaagggttcgggttcaactaaaagagcagaagttgaaaaacaacgagttctgaggaattcttttgaattgctcgggaaaattagagagaggaaataggtgaagaggggccctttcttagttgttgatggatagttgcaatagtggaagttggaatgtcaggggtttaaataaaaaagaaaagcaagaagtggtgttggatattctgagattaaataatgttggagttagtggtttggtagagactaaaataaaaggtgataggttggttgagatgatgcaaaagaggtttgtcaattggaattattatactagtaataagattgaggggggaattttactagtttggaggaaaggctttgttca

SEQ ID NO: 237967 - DNA, 4310 bp, Cannabis indica
taccaaacggcaccttaacaactaatctttaaatatatattttttaacattattaaaatataattgataaaagtaatttgtgacacatcctcgacgcctgtatctttccaatcgttctatatcccccgaagtaggggtgttcatcaaaatgctcaaactgttctaaccgcccgcactgcaccacaccgcaaaaaaatgcggtttgaaattctttgcggtgcggtcacggtttgaattttttctaaaccgcgcggtgcgatctggtttgcgattttgaattgtttatatgcagttcaaaccgcaccgcacattataaaaataccaattcttatatttatttaggttcaatatgtgaatgttcaactcaaagtctactaattattgtattgttgacagttaattttttttttcatatttattttcaagccttgtggtattttgacaaattttgctcaaagtttgttgtatttgtgataatttaattatttagttatagtctaaatcgcataaactacaaaaactgcactactccgcactattttttgcagtgcggtttttgcgggtttttagttttatggtgcgcgtgcggtttgaaaattagagaaactgcttgtgcgagtttgtttagaaaaaaaaaaagtaaaaccgccacccgcaccgcgagcacctctagcctgaagggacattcacgaaaccaggccgtatcgcatgagtgagtaattctaatcttggatttggatgtgactgtgctgaagttgcacgttctgggagtatcttccattttagatcaaagtataattttcttagccaataaaagattgccacgtggacgaccgtaactatatgatgcgaaattttccacatgcaacccaccgttttgtttgagcacacagtcacagtaattaattaataaataaataaattaccaaaattaagaaaaattataattaaaaattagtagagggagagtgtagactaggggagtgactttgtggggttttaaatccacatctctgttcatttccgtcttaacattgggattatcaggagagctgtcatcacctccaaggtacaacaaaatcaaccaagatccctaatttcttcttcactcatcatcaatggcgctgctaatcctgaattattttggttgctaatttcattttatttttcataattacagctcaatccgatccgatggaggtcgataacaagatgtacagtgtgggtttgctcatagtcgccacccttttggtggccaagctcatctctgccctcattatgcctcgatctaataagcatcttcctcccgttgtcccctcatggcctctcatcgggggtcttctccggttcatcaatggtcccattctcatgctacgcgaagagtaccctaagcttggcagtgtatttactctcaatatctttcataaaaagatcaccttcttggtgggtcatgaggtttccgctcacttcttcaaggcctccgagtccgatctcagccagcaggaggtttaccagttcaatgttcctactttcggacctggggttgtcttcgatgtcgattacactgtccgccaggagcaattccgcttctttaccgaggctctcagagtcaataagctcaagggttatgtcgatcagatggttaccgaggctgaggtgacttttcttatctatctcattcattaattttcgatttgctctttatctaatttgaaccacaccataactacccacaaaagcacattgattgttcttctgagatttataatgaattatcgaatatgcccacaatgcacattgattgttctgaaactaataatgaacttctactcgcttcaattatcatgtaaccaaacaaaaccaacacatatgcccacaaaccacagaagcacatgttacttacttgactctgatattgcggtattatactatgcaggattacttctccaaatggggagacagtggagaagtggacctaaagtatgaactagagcatctgattatcctcaccgctagcagatgtcttttgggtcgagaagttcgtgacaagctctttgatgatgtttctgctttgttccacgaccttgacaatggcatgcttcctatcagtgtcctcctcccttaccttcccattccagctcatcgccgtcgtgaccaggcacgcaagaagttagctcaaatcttttcacacatcataaattcccgcaaacaaagtggcaagtcagagaatgacatgttgcagtgttttattgattccaagtacaaagatggtcgtccaacaagtgaatctgaggtcactggcttgctcattgctgctctatttgccggccagcacactagttctatcacctcaacttggaccggtgcatatctactgagtcacaaacagttcctgtctgctgcagtggaggagcagagagaacttttgaaaaagcatgggaataaggtggatcatgatatcttgtctgagatggatgtcctgtaccgaagcattaaagaagccctgagactccatcccccgctaattatgctcctacgtagctcacatagtgactttacagtgcaaacccgagaagggaaacaatatgacattcccaaaggccacatagttgccacatcaccagctttcgccaaccgccttcctcatgttttcaaggatccagatagctatgatcccgaaaggtttgcagttgggagagaagaggacaaggtggcagggcctttctcttatatctcatttggaggtggcaggcatggctgcctaggggagccatttgcctacttgcagattaaggcaatctggagccatttgcttaggaactttgagttcgaacttatctcgcctttccctgagattgattggaatgccatggttgtgggtgtcaaaggaaaggtgatggtccggtacaagaggcgggagctatctgtgaactaataatgccagataattaggtttgctagcgatcgtggttgctaagtttagctatttagacgtttttggctcatttttttatgcatttctattgtatcagcttccgcactctgctgtctcttaaactctcaagtatttacttttctgtttgatcgttgcgtatgttaagctgccatacaatgtgacgatatcgtagcttgcaatttgcagtgagtatagtacctcttggatgatgatgctttgattttttgtttgttgtagttgaacttgattacattgattttttgtttcttgttgtagctgaacttgataacaaggcaataactagaataactagatctcttatcttatggtggattgggatggtgatttattgaaaagcatagtattcctcttgaatgccagaaatatactctattagccattttttcaactttatttgtttttatttaacaaataggatattagcggtaaaactacataaactttatgatttgtgacatttaagtcaaattgatttttttaacggcaaaattacctaaaatgctcttttgttttggtttttacccttccgttcataaaacattactgtatattttgatgcactcatgacgaatatttagtggtctacatgatattaattatttaaatattataaaaaaaatttaaatttaaaataaaacaaattataaaattacaattttttcttaattgtttttcttcttctttctctctctagaaccatggatgaccatatgatttcttcttacctctttttcttctattatcaccctacaacaactaccattatcactaccactgtcactataattatcacacccactactatatacccaaaaaaatatatcaaaccagtagaaattaaataaaaaataaaaagaaacccttaaatgaccggccaggattcataattggagaaggtctgatttttctgccaaaaagaaacaaataatcatgaaaaaaaaagtaaaggaaaaatataaaccaatagttaatttgtaattctaaaccaaaaattttgacaaaaaaatccactggtttagagccgattagacccttggtggttgggagtcgagatgctcgtcggagttactacacccatgatggtcagtcctcttttcaaccccaactgcctcttttgacggatctcctccaccgaaacccaaaccctcaaagaattcaaagtctacaaacagactaatatgagatggggtactggaggaactgggtctagacctgggagcatcgattggacaacaagactcgttggaagaatcgaaggtcacgacagtagaggaaggtcacaagagcccgtggtggtggtgttgggatttcgtgccctaaaaaaactcatttc

SEQ ID NO: 237968 - DNA, 746 bp, Cannabis indica
aataaaaaaataaagataatttatttccgtatgtatattgattaatataaaaaagagaatatattgtgttattaagcaaagataaagagttttttcatttggataattacataaaacataatttatttataaaaaaattataattttttcaacatttttacggaataaaacaattacatgtaagtaacagaaaataacataaaagcaatatcaaaacagtacaaaaattatttacaaataataaaaaattaacaataaaataataaaagtagaacataaaaatacataaaagattatattttatataaataaaaaaaaactaaaaatattgaaaaattcgaccgttattttttttttttgtttttgtgtgtttttttattaaataaattatccctagttttaattgtttgtttttttttaaagaaaacgttcattaaataaaatacgaaattagattcgatcattacaaaaaaatatttgtaggaacagttgatacatcaatcatatttgaaacaactcagctagctaacattgttagcagtaaaattacaaaattttgtttgtttatttaccttttgatgctgttcttgagttgtaagatttttgcttagattttacttgtgatactttctactttctttttgggaaaagtttgataccttttggtttgagaagctcaacaagtacacgtttaagtttaacaatccaagaggagatgctctcctaaacagatgtatttttttttt

SEQ ID NO: 237969 - DNA, 756 bp, Cannabis indica
ttttttttactttttctttttatctattctcgattatttacaatttttattgcatgtgtcatgattttatacattctaatacgccacctcctccataactgccttcttcttcttttttttgatttttttttgattttctgtttctctttcctccgttcttcgttgccataaatcacgatcacccagtcgaagccctaacccacgtttttgtcaacctcccatctatgtcactatctccattttgttcgataatctctgtaagttcttccctcctacaaattcatctaaagttgatcctaagattggtttgaagcgcattgcaaagaaagtaatgggtgatgttccagagccatctggtactaagaaaagacctattccagataaggtcgagtctcgtaaggtagagagagcaaaatctttgaaatctgtaaaggatgtaagttgggttttgttgttttcaatttttgtttagttttttcttagttgttgtgtcttttcgtattatattttgtgttttaaatttttccccttcttgttttaggttatatccgattctgattttgaggatgaagtgcatgatgggggagagaagcctaaagttaaatccaaggtattattaccttgatttttatcattttattgagtttatttttacagcaactctttgttttttgtcaatgttttacccgtttatcatgacggtttatgttttgtgtcatttttttgtatttcttttatgtatttcttgttgatgtt

SEQ ID NO: 237970 - DNA, 1510 bp, Cannabis indica
ttaactttttaacccgttataaatagtctctgaactattgacagtattctaaattagctgtcaagttttgtcatacgtgacaaacaagatgatgacatgactgcttaaccaattatcacgtcagtgccacgtgtataattaaaattaaaaaaatatataaattatgtatttttaaaaaatgattaaactaaaaatcaattaatgattaagaaaattacgtacgtaaaattaaaaaaaattattttttcaaattaattacacatgtggcgttgatataattttgacgtacaactaactaagtaaccatgccattattttgatataatttttatccccataaaaattatatttttcattaatatttttagtaagatttttttttctcaggaaaagattggggtggctttgtctctgcacaaacttataagttgattagttttaacagtcgattagtttttattgtcaagttataagttgtgattatttttgtaagttagttagctaaacatgtcaactatattctaatctctttcaatattggagtactctcaatgttaatgtaagaaaattgtaagagacaaagagcttaagatcattgagagtgtaagtagtcaagttgagaatcatggtgttgagaattataatttggagttttaatcttttgtttgaaactctaagttgatcacaacattgtgtttgtaatttctcatccaatattattacaattaatcaacatatagtaaaatctctaaatacatttgggaccgaataaactatattttaattgagaggttattatactacatagaagcacaccagaaaaaaaaatatcaaaaaaacaccaaaatatatctaatataacaacaacaataataaataatttttaatgctatatcatcataaaaaattattatgagtaaataaaatatttatatatttattgcaatttaaaataaaattatttattctacataaataaatttattaactatatatatatttttaaaaaaagatataattattcttatattttttaatgtgggatttagaaaatgtataactaattataatttagaggttatttttatttataacttactcaaattaaaacgtcatttttttattttaaattagaggttattattgaatagagtatttttaaataaagatttaactatatttttttatgataagattttaataattaaataattaatgttatatgattgaaatctataataataataataataaaaataaataaacttcttctcctagaatcaaagaatcaagattggtataagataaagcacaaaaagaaaaataataaagatagttggaattaatttatttaattacttctttgcaagtttggcatttgtaccctaaccaacaaacactttggactttttccatgtacaaatcatttcaatgcactttattgaaacttatgcataccaaaactaaagaggaatcacatatagtaacaatccaacaaaataacaagaaa

SEQ ID NO: 237971 - DNA, 984 bp, Cannabis indica
atgagagcttttggttaagtgtgttttgatcccatttgagggttttgtataacaagtgatactgacttttgtaataggtataatatggacaataatatggatggcttctacattgctccagcttttatggacaaacttgttgttcacatcactaagaacttcttgaacttgcctaacattaaggtctgtttatctttaagtgctattgctgctaatattttaagagaatgtgaaatatttgggaagatattgacagattgttgtgattgcagactcctttgattttgggtatttggggaggcaaaggtcaggggaaaacattccaatgtgaacttgtctttgcaaaaatgggaatcaagtgagtacaaagtgttcttccaataactttggttatcggatttagaaatttcatgggtttttaagctaaggtattaagattcatacactgatataatttgaattcgaatgtattagtccaatcatgatgagtgctggtgaattggaaagtggaaatgctggtgagcctgcaaagttggtaaggcagaggtaccgtgaggcggcggacataatcaagaaagggaaaatgtgttgtctgttcattaacgatcttgatgcaggagctggtaggcttgggggaaccacacagtacacagttaacaaccaaatggtcaatgctacactcatgaacattgctgataaccccaccaatgtccaactccctggaatgtacaacaagcaggagaatcctcgtgtcccagtcattgtcacgggaaacgatttctccactctctatgctcctctcattcgcgatggccgaatggagaagttctactgggcacctactcgagaagacaggatcggtgtttgtactggtatcttcagaactgataagatccctagggaggacattgtcaagcttgttgacaaattcccagggcagtccattggtaagactttgcctttactcaacttaacagcattttt

SEQ ID NO: 237972 - DNA, 835 bp, Cannabis indica
tttttagtacatggagattctaacccctcccccctctcccacatgcatactcgctcaaccaattgaactagccaacaatagtattgttacacattaccttttgaagttgtaaaacttcgagacaacattgcttccttttctgcaatccctgccaggacattcatcattttaatatgaacaattatccattcatcttacatgatttgatttctccataacatgcaaaactaactagatttaaaactttcaaacatacatttataaatatagtcatacgtacgttcttgtgttattaatttatgcaatggttcaacaaatgaccgcaaacgattttgtaacgccttaagtcacagggacgtcaggtgtgtacttttcacaaaattacttttccatttaattatataattatatataaagtgtggataattaaaatttagtaattgaaacaaacacataattttttttatgggtaccaaaatatttgcatttagaatcaaaagtgcttttacaaagtacgtttatacctcaaaatgcaattaaaataagacatcctgactaccgagccgtggcaccgcgactgatatgtacattgctgctacgacctcaaactcatagctgctcaaccatacccattcgtttacctgcaccatttagtaccccgcgagtatagagacttcagcaagaaaagtgaataaatgcataataatataaaattcatttagtcacatgatagcaagatgtacataaattacaacacttcaagtattagcatgccaaattaatttcacacaatctcagtacttcataaagcacccttaccactcgttaaccacga

SEQ ID NO: 237973 - DNA, 1021 bp, Cannabis indica
tccataacatgacaaaactaactaaatttaaactttcaaacatacatttataaatacagtcatacgtacgttcttgtcttattaatttatgcaatggttcaacaaatgactgcaaacaattttgtaacgtcctaagtcatagggacgtcacgtgtgtacttttcgcaaaattacttttccatttaattatataattatatataaagtgtgggtaatttaaatttagtaattaaaacaaacacataattttttttttataaaagttaaatattaatatttatgggtaccaaaatatttacattgagaatcaaaagtgcttttacaaagtacgtttatacctcaaaatgcaattaaaataggacatcctgaccaccgggccgtggcaccgcgattgatatgtacattgctactataacctcaaactcatggctgctcagccttaccctttcgtttaccaccaacaatttaaaacccgcgaagtacagagactcagcaagaaaagtgaataaatccataataatataaaattcatttagtcacatgatagcaagatgtacataaattacaacacttcaagtattagcatgccaaattaatttcacacaatctcagtacttcataaagcacccttaccactcgttaaccacgagctacgtatgtcactatcgttgcccaatacagcaaacgataagtaagaaacttatatgcagtttcaggagtaattactcatgacggtaatgaccgtttctaaccctcggtcataaccgaggcttaacaaacacataaccaggatctcgatcataaccgagactataacaaacataatcgctaatcacttaaccctaagtgatacgtaacacttttcttaccccggtctagaaatcaggtgtgcgggccgacctgagtggaaacaaagttgggcgatcccggtcctatgttacgactgttgggttttatgccctaaataaaactctatttcaatgtaatccagtttattcaacatcaataaagaaacagaagt

SEQ ID NO: 237974 - DNA, 1371 bp, Cannabis indica
ctcgaaggaactgccaggacgtacatcgtcctgcccctcaatctcctggacctcagcatccccttcatgatcctcttccatctcgacggctggatcctgttcggcgctgagcaaagtggcgtgccatcattctatggctgggtacagggtttgaagaatgcccttcgctagaggaaggtgaactagaacaaagacgagggtgatcctcgtgtagaagttgaagcaggtcctggtcgattcgatgtccgttttcccaagactcacctgagttcatctacaaaagacaacgcagaagatgagtgtttggtcggaatatcgagcgataaacaagcaaatatgccgaccatgagtactcaatagattaaagaacgattatgtttgaagaaaagtcagaactcaagaagtcaaaattttctcgagatagagcaaaaaagttcatgaagcttagaataagcaagataaaagacagacgttacatagtttggaagcacattttatgactataaaaatgcacgaagacatgataaagaagaatcacagaggtttctgggcctagggtttcctaaacatttttctacagcaaagtagaggatgcaattgacatataaacatgcaaagataagcataaaggaaaccagagacttactcgaagatcagatgtctgggtgcgagcaacgtcaatccaacaagttgtttgttgtatgagagcacttcggcaacttcaaagtctagaatctctctttttcgctccaaagcttacttagcaaagaaaggtgatgaaaatgactttatgtgccaatgctatttggtatttataggcaagtcacgaaaagaggtaaccgtctcaaaggaaccttagacgcctcagcttccctccttaaaaacgaatatgggaaataaaaaataataaagtgcagccgtcagccgtggagagagaatgtcagatttcaaactattaagtgtcagagaatttattagtcgaaaaccgaagggacgcccaatcagcctcacatcgagtcttggacggtcgccctcgacacgtgtccccatccaaaagcagaaacagctcgaataaagtctacacgcaacttcggaagtcccgtacagacttgggtgcaaatgttatcccaatttttgcactctgacgtggcatcacatgaatggtgacacgtggaatccacttggaacatctgctcgggaagcatagtctgagcaggatgcctccctgccatgctcagagcaaggtattcagcaatccgcgcagagcaaccaacacttagcgcattcaacttttgcatcatgagtcatcagcacaatccctataactcagggatcaatttacgtggatatggcatacacacgatcccgcta

SEQ ID NO: 237975 - DNA, 1492 bp, Cannabis indica
aataataataataataaagattggaactacgttttacttgattcctataaaaggatacgtaggcaacttagttgctagcctaagacttagtgcagtcgctgataccgcaaaatggtataaaacataaatcttaaaattccataaaaggtcatacacctagaaatttttccaaattttcatatagcaaaggatccctgaaaagtggttatctactggaatccttatattaaaattctaaaataacgtattctaaactacaagtggcttgatctttcacaaagaagatatgtaggcagctcggttagccaaaattactgagttcagttgcaattccgaatttcccaattttttccaaaatttacctcaaagtttaatatcatcgtaattggaatcaaagggtgtttcatttaaataaaaggattgtaattaagagattattcttataatcttggatgggtcgaacttaaattaataaactcttatgctataaatttggcataggtaaaattatgttttgtatttatttttaatattctaaatgtaaaatttttgcataacataattttcggcacgcccggtgggacccattctctttttcatctccaattatgatgactattctacttttaatattatggtgttaatcatgtttatcgttttctggaaaaaatggcaccacaagtgacagtctatttccacaagttatcagtgacctcttttactcaaggaggcaaaaagaatcgctatctggcgacattctctatcaaatgggcacccatttcatgcagggtacccaaaccagttgagaatgtgaagatacctaaaccgattagaagagctagaagagaaaaaggtgtgaaggacgtccctaaggtccctaagactgcacatgccttaagaagcaaggcagcaaagggcttcaaaaaaaggcaagccggggcaatgaaaaggtccgcgacaaaggttgtcaagacaaaagggaggccaacgaagattggctaccccataatgatccaaaaggaatggggccatgaacgtatcttgattggttccattcctattttcttgcccactgttgcctcagtgatggttatttccgcgaagggaactcgggcaacacaaacttctcaaactcggagaggtaggaaggcaacaaaaggtaggagggggacaaaaacttctgttgggttttatgccctaaataaaacccatttcaatataatcagatttactagttaataaagatcagaaataatattttaatgttgcatggttcacatgatttatttcatgattactatttaatgtataaattctattaagtccagaacatatttatttgtacatgattatagtattgtcagcacagtggaatataatcatgtttatatgttcaaaagtttaattccatgatttgtcagttcactggatttagactggcatggtaatcagcgataggtatacttacacgttggataagtgttatgtcctt

SEQ ID NO: 237976 - DNA, 759 bp, Cannabis indica
ccaatggatggaaccgatccaatcaaatacatccattgaatcagatcggatcagatgactcaattcaattagattagatcggatgggtccaaatccatgagatgtgatctaataaacagccttacaaattactatttggattcaattttatgaactttcagctaaaaaataaatgtataccacacttatcactctattgaagatactgttacctccatcgaaaacgaatctttgcactttttttggacgtcaaattacatagaaatttagttggttgatatgaaattaaattaattatgaacagtttgaggaatcacaatgagctcatattgtggattgcttttattttgtgacccttccgataatgtaggggcaacatgtaagaaaggacccattaaaattcacaaaaagacaaatactaataatttagtaaacgtagagccaccaatataatagaaaggtgacttttgcctaataataaataaataagtaattttaaaccaattgaggctagttcaagtggccatagatgggtgtgtgagtgttggaggtcttgggttcaagtcccagtaaaacatgttgtaatatataagcgtttaaatacaaaaaaataaaagtaatttgtggcataaatatttaagtttaactctcagttgtaaataaatacctaactttaatttttgacgataataatacctaagttatatttttagaactctgtactgaccgttaaatattagaggaaattatgtagaatat

SEQ ID NO: 237977 - DNA, 2271 bp, Cannabis indica
aaattaacttatacaaataaagattccctctttgaataatttgctgtaattgttgtaatctattcttctaatcaaatttctgaagtgtcgagaccttaaactctcttcaaatcgtagcacttgcacacttcatcccgaagagtgactcacatgcaatctttctcccgaagagtgtttaacttacaatcttcctcttgaagagtgactcacttgcaatctttctcccgaagagtggctaacttgcaatcttcctcccgaagagtgactcacttgcactttttctcccaaaaagtaactcacgaacaagacttctcccgaagcttgatgaacaatatccaagatgtccaacctgcacattttcaacaagaaacaatacaaaataacacaataattaaacactaagaacttgttggactcaagttcttcacacaacaaagaaaacactctctaatttagaaagtaatttaggaaatgatataccaagtgagctaaccaataccagcaacctgagggtgtatttatacactttaaaaactctctaggtcgtggtcaaacaaccaagaaacaatcaggtaaataaatgaaaatcttcccaaataggaaagtcaaaatttgtttaaacagacagtcagtctgttcaaacaggtgcattgaacctggacagtttttcaacaaagttttcataaataaacatgacagctttgagaaccattacacacacagctgtacacaataggaggcgggaagggaggaacaatcctaatgcgatgagatgaagagccttaagacaaatgagagagatgatacggttctaatttttccttttatatatacaaaagtattagcggtgggccttattcttccccactgctaatactcaaacaatataataaaaaaatataattaattgtattagcaacgtaaggcccgctattaatacttttcaagtccgccgctaataatttttaaaattaaactcacaaattttctcgatcatttatatttataggtttttagtagcagaattcgcctctagtctgtttgctgctaatactttaatatactttttttttttaatttaaactttagtactgtcagatctcgtatttcgctgctaataactatagtattagaggcagatttggtctgccgctaattatttcgcctctaataatcaattttcttatagtgataaaggatattttgttctgctatgccccttctatttttatgtctttgtaattgtattgaatattgaaacaagtttacaaatgaggagaacaaagtccaagccttcgggagaaggtttctcaagcctttgagagaagatagttcaagtcttgcttcgagacgtacacagacctcaagaagattgaaggggtttgtattcttgaaaggttagcaaaaaaagagtatttttatgcattataagtcaaaatttttgtatttttgaaatcttactaataattttatttctgaacgtgagctcgtggattagtagtaatatacaaagattgctaatatcatgcattgtgtatttttattttctgcaatgtagttgttttttgattttttggacggtagttaatttgtattcaattaaatgattaaataaataataagttaataattgtaaattactgaatttcaatgttaataataaggggtgtatataaaaaaattaataggcattaataactgtataaattattccaaatcacatatttcaatttggtgtaagctactttgtgtagtgtggctatggtttgatggaaacctaacaacaagctaatctcagctacctttgaaaaaagttagaatttgcagtctccattttgatatctgttctacttctcatgtttttcaatttaattaatacatttatattgtagtttgattggttgacttgacactaaatgggcacatgcaaatagaaatttagatatatatatttatacttgcaaaaaactaatttattattgtaaatacatctagtatactataattactattgtagatagatacatgtttttcttctttcatgcatgttctattgaatatctagcccgaaagcactattaccaacaaagagatgagaactcatttaatttagtaggtaccaaatccatatgccaaacttttactttcggctaataaaatcactcacattatcttttatttatttattttcggagaattttattggttaaaccaaaaatttatacacaatgctactagcaaagttaggcaagaactcaatcatccacatta

SEQ ID NO: 237978 - DNA, 946 bp, Cannabis indica
ctattaaagaaaatactaaggcaaggatatttctggccgaccatggtggaagattcaaaggcctatgtaaagaaatgtgataaatgctagagattttcaaaaataccccatgcaccacccaaccagctaactcagatgtagagtccttggccttttgctatttgaggaatagacctgattggacaatcgcccgaaggtaagggcggggtacaatatgcagtggtcacagttgattattttacgaagtggacagaagccgagcccttggcaacaattacatctaaaaaagtattggactttgtggtgaagaatataatatgtttgttcgaactcccgcacaaaatcgtcttagacaatggcaaacagtttaacagccaattgttcacagatttctgtatgactcatggaatcataaaaagtttctccgaagtggcacaccctcaatcaaatggtcaggtcaaagcagtcaataagacactcaaagatactttgaaaaattgacttgaagaacctaaatggaactagttagaggaactaccagaagtattgtggtcatactacacaaccgaaaaaatagcaactggacaaacaccatttgctatggcctatggttatgaagctatgtttcccgtagaattagaacctttgtcccatgcatagaagattaacctacgatcaagaagctaatcatgctctcctagtagaatcacttgacgaaattgaagaaaaacgagcctcaacaaacctaaagttagtagcccatcaacaaaaggtggctcagtacttcaacaagcaagtgaaggcaaggaaattttatgtgggagatatggtcctcagaagagtattcctgaacacaaaagacaacatggctggtgtgctcggaccaaactgggaaggaccatatcaagtgctcgaagttctaaaattaagggcatacaaacttggg

SEQ ID NO: 237979 - DNA, 599 bp, Cannabis indica
gtccataaagcttaagatttcatatctggctattgcttccatgagctgatcaattcttggaagtggaaaatagtccttgggacacaccttattgaggtaggtgaaatcaatacatatattctcccttttttgtttagcttgggcactagtacgaggttagccacccaagccaggtagaaatcttcaatgatgaacttgtttgcgtgtagtctttctacctcttctttcagtacttgcacctgttctttgtctggtaggcttttcttttgctagatgggacgaaagtttgggtcaatgtttagggcgtgagaaatcacaatggggtgaatattgaccatatcctcatgtgaccaggcaaaaatgtttaggttttctcttagaaattttatcaaagctaattttatttcgagcaacaaacccttaccaattttgagtttcctagttgggataatagggtcaatttccacctcttccagctcttcaattggcccaatatttgtgtttgtctccccaagtcggggatcaatgtcttcatccccgccttgggcaatgctcttttccttgcctaaactctggtcggaggtattttccttcttgac

SEQ ID NO: 237980 - DNA, 860 bp, Cannabis indica
ataaaccaagaactgcgatcaaggggcaagccttggcagattttatccttgaatttcccaggacagaagtggcactcatagaggaccaaatcgacgttggtataaccaataaagagatgtggacattgtatgtcgacggagccccaaacaacgaaggttctagtggcaggatcttattaatcagtcctagaaattttaaggtacacactgctttacgttttgagttttctgcatctaacaatgaagccgagtatgaggctttaatcgcaggattgaagctcgctctcgagatgaaaatcgagtatctacaggcgtttagcgattcccaaatcgtggtatgccaggtgaatggagaatatctagcaagaggtgggagattggttaaatacttagccattatgtgcgagctcatgcataaattcaagaaagtagtcgtgtttcaagtaccgcgtgctcgaaatgcacacgcagacgcactggcccatttggcctcaactaaagaagccgaattgctcgatgtaatttcggtggatgtattggctcacccaactataaatcaagaagagatcatggaaatagataccactcaagaagtcacctggatgactccaatagtcgcatacctagaaaagggcgttttacccaatgacaaggtagaagcaagaaagctgcgacagcagccgcccgatatgtcatgtacgataaaaggttgtatcgcagaagttttagtcaaccgctactcaaatgcatcgacggtgaagagtgcgactacatactacgcgaggtacatgggggaatttgtggcaatcatacagggggtaactcccttgcattaaaaatcatgcgacaagggtattact

SEQ ID NO: 237981 - DNA, 1183 bp, Cannabis indica
ctctattccagcaaggggcatgagaagaactgaaacaaaaaatcgctcaactgtgtataaattctttatgtaatcccaatcacacataaataagtaatttcaatcttttaactcaacctcaaaagtgtgaagagtgcaagacacaaagctaaatataatccaaaagcataagcatgttttgtcaactaagaatgaaggataagaactactcaaaatttgtgtacaaacttgagaacaaaatgaaattacttagacaatgcaaacccccaaaaaaattttgatggagtcaaaacaacttgaatctagggccttggtgaaaatatcaaccaattattttccagtatcaacatattctaacagcaatgtttggttgtcaacaagttccctaataaaatgatgtcttatatcaatgtgttttattcgagaatattgaacatgatttttggaaatatttatggcgctagtattaccataaaaaaattattaaaatacccaattccaacccgtaatcaatcaacattttttttaactataacaattgaggacaacaactagtagtagctatgtactcagccttagcaatagacaaggaaatagaatttagtttcttactattatgccaagaaaccaaattatttccaagaaagaaacaacctccactagtacttttacaatcatctggaatatctgcccaatctgcatcactaaagcaagccaagctagaattagtgtcttttgaataccatattccaaaatcaagagtactattaacatatctaataatccttttaatagtagaaatatgagattccataggattactttgataatgagcacaaactcccacactataactaatatcaggacaactagcagttaaataaaataaactaccaatcattctatgataaagagtagtgtctacgtacctttactccaagttcatcttttgtcaatttccaagtgatgctcattggagtacttacctgtttagccgattcaaggacaaactttttgacaagattcttagcatacttactttgagacacgaatgttcctccttccatctgtctgaattaaagccacaaaaataatttaagttcaccaaccatagtcatcttaaattcatttttcatttgcttaacaacctgcactttatggttagatgtagaaccaaaaacta

SEQ ID NO: 237982 - DNA, 955 bp, Cannabis indica
agattcacattttgaaatctaaccatttgatttgaatttctttttttctagcttttgaagctgaacatcattgattttgcttttggtttgtaattgtgggtcttgtggataacctctgaatttgatatcaaactctgaatacagcaaattcaaaaagaaaggtttagactcttttatagttattactatattaatattattctttttatgagattactattaagaatacatatgtatatatacataatttcatctctggtaaaattgaaaacaaaagaatatgaactgggactaaggttatttgttatatatatgaccacttctcatttttagtttactctcaaactgatgtgaactactagaacaaagaatccaacactccttaatcaaaattagtaatagtttagtctcatagtatttgtcacctactacgtacctaacactcaattcccatcaatagaattttccgatcaatctactgaatgaaccaataactatgatgtttttactaaaatggtatgtaaaatggtcaaagcagcaataattaatttattagtttgcttcccatttatggctaacaaacattctttgtttacaatttttcctttttcttttttagactttttatttattatatgatatgaacaaggaaaagaaaataaaaacttgttttgttttgatttgatttgcacagaagaactctttcttgagatcaactgtagttaagccacatttctatgtttttatattttttttacttgttaatagcaattttttattatagactgtatagtgtggctcactatctttgcttttggattaaagtcatttattttacatatattcattatttttatgtttattttgttgagtctttaattttataaaaacacaacattaattctttgtgatgagttaattatcaagttaaaagtaatataaattaatatttctt

SEQ ID NO: 237983 - DNA, 1417 bp, Cannabis indica
tatcactttttattcccattttagagaactggcaaaaattacatataatgcaataatgtaagtgggaaaaaaagttcaaaagaaagaaaaatgaagtaccttacgaattactcgccactagtatggaggaactcagagtcttgaaaaaaagtctcatatcgaaaaagttagaaaaataaaaattaattcgaactgtacaaactacaaacgacactacataataatgaaacgacatagatatctaatagcaaatctaattattacacagttctttgtctgaaatgttgacgcgatgataaaacgacaataattttaccaaatcgacactcggtgataaaacgacaataacatcacaaaaactacacacataaaattgaagcgacacagaaatttgacagcatcatttttttttattatttattttaaaaagagttattagggacgaagccttttatatttacacactcaacaaattgcaaaactcattcagtcaaaaaattgcagtcgttatttgccacaaatcccttaatcttaagagttttttttttattattattttggccttaatctaagagttagtacttagtagcacttatgtcaccaattatattttatgcttaaaagaaaaaaaaaattagaaaattggataatgcaccattcttgagttcacccaatatttttattagttttgtcatttgtagaaattttgaggttgtttgagtctctttttaattatcagttgtggcaattgtgtttttaaaaatgagaatagaaaatagttttttgtcaatttaaaaatttaatagtgttttgtcaatattctacatcataccatggcatgaacctatcttaccttggactggatcccgggcctagacctggaccccagacaatgaacccaggttcgagtcctggtccgggttcaggtccaattttagcggtctgcattcggatttagttttttgcgtttgggtataggctcgagtaggggttcgggttcgggttgaagtctttggttcgagtcgtagtcaggtggggtccgggtcttggtcggggtctgggccaccatcgaactttcatcttcaacctttactcattttaacaataggaaggcatcggtccactaataaaaaaaccatgcccaaaactcagatctggtcgttttcgaccctaaatctaacatcagctcatagattggatctatggtggtcattgggtccgtgggttgttgggtctgtggtcacaatggtcgtggagagagggtaccaaggttgtggagagagggtaacaagtgtacatcattgcaatgattgatgatattttagccataactctctcaatattgattggaatcgaacgattcaatatgttttggaaattttaaaaaaagatccagaacttttattcacaatatttt

SEQ ID NO: 237984 - DNA, 857 bp, Cannabis indica
acagtagaaaatattatgattacatgcttcgaattatttaaagtgctatcataattagtacactgaatttacactaacatgataatcagtaataaggtttatttgcacttttggtaagtggtgtgtcttttccaagtaattaatcaaaataaacttgtaaatatggatgtatgaggtttccatcgggactggatcaatattgagaaatagaaaagttatcataatttacagttataactatttgtttaccgaaaattgacattggtgattggacagcaatgtttgacatgtgagaagaaggaaagaatttacggagttgagtggcctcgagtcatagtagtcgacctgggagggtcctagccctacccccaggttgactctaggaactccaaaatgggtgtttggatccaaccaagttgtttctgactcaccaaccttgagtattctgaaccaagaagtcaagaagaatccaagtctgaagcttgagaattgaaaaagggttgaaacggcctcgtaaaagtcaacccgggcacctagggtttcgcccagcccctagggtttcacctagtccctaggttgaaatcctagctagggttctagtttttgggcccgtcttagtgcaaatggctcaaactttgtacttagatatgaataagacctgttacgaacatgttagaggcacccgatcagaatcagaacacaacccgtttggagcacatatgcacctagtgcctgggtcacctggtaatgcacctagtgcccaagttgacatgttgtcaatctggggagcttccaaccacatcactgaagatgtatcccaagaattttatttgtcttcatctaaaatgaggaaacaa

SEQ ID NO: 237985 - DNA, 2118 bp, Cannabis indica
aacccccccccccccccaaaaaaaaaaaactccatattttcaaagtttatttgtaaattttcattttcattttttcggctctctctctttttgcgaccacgagccacaccggtcgtcccctcctctactctctctcatttttgtctctttccccaactctctcatggtagcataaaggtaagcacaacattctcttatttgttgtttaaatttttattagtcatgatttggtttgttgatattgatctgtgtatgtgttcgaaataaatccaaagcctgcaatgcaaagaaagtttcaaggatcgttaagtgaaaaacaattcgaaacttgtcaaaaaaaattttaacgaggatgaagacgagcacaacaacgatggaggaggataaagcttgtaagggttttggagcggatgcgatacatgcgagaagtggtttcgaggaggatgacgacaataatttttttttggcaatcgactatattcaattataacgataatttttcactgtcgcctattctacccagtattcacgacgctcatataggcgacggttttatagaccgttgggaattctttacccgacggtgtaaaaatatcaggaatttcgggttttttagtagtgtaggttaacttgtagttagatttattaacttgttaatattttggaataattttacaataaaaaataattattacagatttgacgtcggttgttagggtatatggcgtcggttattcactatgaaccgacgccataggataccattcagtgtcggttgttttagattttacagcgtcacttaaatcagcgtcggtagtgaatttcgccaaaaccgacgctgaaaggctttaaaagccgcctctaaagttcaaatttgtagtaggaaccttaaaggaaaatagttagtcacttaccacttgagctggctgaatatcaaaaatacaagcagattacatttatatatttattaccacttgatctaggcctcggttaaaacaataaagaaggtgaaatttaagataggatttattcatttttatataaaatgaataaatcctatcttaaattggatatttaagatacaaattggatatttttttaggtcaacccaagcttctaagtcttcctttgatatttcagctcaagtgtgtgtggttgatcgtagtgcttttgtttgtcatgaacaaaaagttgggtcctacactaactgtctcgacaagacttaacttagagacatatatagtgttagcttctaacacaaaaaaaatatgatctgaaaagaaaataaataagtttcttaaggaaaaccttcttgtaggcattactcagtacttctttctcacttgagtcacttctactccctggccaaaacaaattcaactacattcccacaaaataacagctacccgcgcgctacgaaaccgctccgaaagtaccgaagattaattaatcaaaggtatgcaccaaagacattatattagggcttggaatattcttttgtatatttgaatatttttaacatattattagttaactttaatacttctggaggtggagagtaatgtacgtaataaagattctacctaactttgcattttgtgtttgtcgtgacaagttagagcatctaatcaccatgttttttaaacacaaattttagctaaaataagaagtgagtcttacaaaaatgagctttaaccgtgaaaaaaatggatctctatacaatagagaatggacatagaactctctacatggaaaccctatatattattttgctaaattttgttaatattattttaataaaagtaatattaatttttttttattatttcaacaaattaatttatatttaataattttaaattataaaatatatatatttttttaatagaattataaaatattattaaaataattaaatgttaattaaagtaagaagcatagtagagcaagaataataaaaaatgactatataattttttagctattttaattaaaaattagataaaaaaatagagaatacaattgaaaatactcttacaacagtgtaaacctagtaatcatatatatgcatgcaaaatatcatagcattcctttgaaaaaaaaaaaaaagagaaagag

SEQ ID NO: 237986 - DNA, 606 bp, Cannabis indica
ctctaataccaaattgtaatgccataacaattaggcacgataagattgtccgataatcatatcctactcccgctaaaccaggattactagaaataagagctgaatttaaactttaaattacttacggaatgaaaataaaacttgtaattatttaaatttcagaaaccattccaaaaagattccttatgttttgggatcccttcaaaattttcacaaaatataacaagtcaattttacatgtcgacctaggcaacatatcccagaatacaaaatgcagcagctactagacccaacctgcgtggtctagtgtggtccaaacatgtacaatctactgctagccctcgaactcatggctgattacaaactaatttaccctttcctgcataataaagcacctgtaagccaagcccagcaatacagtataaataacaatataccatatattcacaattctaataaatactgataccaccgcatctactgtctatataacataaaactacgtgttgctttcacacgtctatttacaataaggccttagattcgttaatctcggttctgattaccgagtctaacttaataatgccttacctgcataattcttta

SEQ ID NO: 237987 - DNA, 587 bp, Cannabis indica
aactaaataaaactgtttaacctaatcccataaaggtgtagttgagtatttttcatactataataacatagaagttgaatatctgcagcggaaagggttaaagaaaaatatacccgcaaaaacctagaatgatgaccttatacttctttcagcttagtccaaaaatacgctaggtatctttaagttacaatgaaaacttctcattactaatcctaaacagagtccagttcatctttcagatacaagagtgctaattacagtatagttaaatgggtaaataaaaccaaaaggcaagcttaagccctagaaaacccttgaacccatcacctgcggatgaatatcttcctatttgatataccttgaagattttacggaatcgtaactttttgcaaatttattaatctagcttctattgtgagttgatagttgtatacaaaaagaaaatccactaatcagatagtaataaaattaagatctgcaatgctgtaatcttaaaattaaaaaaaaaaaataaggacataaaatcacctgagtagcataagttcgtctgaaatagggcctcttatctgaattgagctgacaaaaaa

SEQ ID NO: 237988 - DNA, 1064 bp, Cannabis indica
gactatttttccttaagatcccttctgagtggacatgatagaattttgggaacgctcttttggatgacatccatcattccatgagacttctttcggatagaaaaattagacttctgagaacacccttctagatgtcatctaacttttcataactagaacaattattggagatctttttatttggaggaactataccacaaattccacctagtttcttcaaattaaaatattgatattgatgaagaaagaatgcaaccatcatggctggtgttctagatatcttagtatcataacttctgatattgatcaagtttaagaaatgtttgaacttgtttactcttaagaccttagtcccaaattcagaaggattatcttttgatctgaccttctctaatttagccaaaccctctatattctctctaatctagtagagtcttatgtctatatgtttgctcttttcatgataaattggattcttgccaaaatggatggatgactgactatctgagtacacagtcactccaccttttagttgtttcaattcgaacaacattccaagaagccataacgcttcctcgaatgcttccacagtagccataaattccccttccttggtggaaagggcaaccatagactgtaagtgggccttccagcatatatagttccaatttgtcatgaaaacgaagtggtttattttctcgtatctctattcaaagcatagtcagcatctacgaatcctttcagctccaattctccttttacttttaccataaccctaagtgccatttacgtacctaaataaccatttaagggccttccactgttcaattctcgtattggacatgaaccgacttaggatgcttagatcatgagctatgtccagttttgtactcaccatcacatacattaagcatcttaaaaccactacattcctctttctctttttcactattcggacactattcctttgacagaaaaacactgtccgcctaaaggaacagatgtactcttgcatcttccatgttaaacttctgaataactttcttgatgtacccagactgctt

SEQ ID NO: 237989 - DNA, 1446 bp, Cannabis indica
gaagcctcagaaacaactggcactcgtaacaaactaccctttccaagccttgttcaacgagtgctcatggctgatcacccgcctctaacaatgcgtgactatcaagttcaaaatcccgttctcagtaagagttttctctcagttgttaataggtagccctcatcgaccactccttttacttcaaaggtgacaaaggcaagtctcctatgttcaaagggttatcagattctagctggcaggtacaaatgttttctgagtttaaatcttttgtcaaatgctataagaaggatcaaaagcgccagcttgcctttgaggcccccatgtgtaaaactgtttgcatcatcaagtctactgtactgcaaaatcattctggggattctttaactccatcaattgatatttctctgcctgagtttcatatagattcgtttggtgcatcatcatatgggtctgggagtaacgcacatgttcagggggagctgtctgtatctatcacagtctctagtctagtacaacaggatctacctcatacagctaacccgtctctagtaaccactgcaactcacttggtgttgtctaggccactttcccagggagagtctgacaaagaactagagcaatcagctcatgttcaatgaagggggagatgtttgtagtctcaagttttttttatatggatttatggttttctatgtttatgattccaaaaaaaattttttgtgccatagctctgtgttactggatatcttttgaggtcattagtctttatattttttttgtcattgaacataatctgtcaagggggagattgtaagtgtcattattttgacagattatattaatagtaagtcaagtcgtatctgatgtttccaatctgatataactgcataccagctttctgttaaagtctgtcagggtctgttatgttttaatggttggttttatttgttgattaggtcgtttaaagtattgcctataaatggctaattttgtctgtaaatgatttagctagctaattgatatttttggttagttcagttatatcgtgtgagttggtgtagtatcctgtattgctcgttgttgattttcaggtctgattgcatagcttgaagatggtgatctatagcagaaagatcagagcctgatgtaactgagttcagactgaagggagttcagtgtcatcttcgtcatcatatctgaagggattttagattgaagagaagtgtcgaagacgaactcagctgctgcacaagggattgtgttcatacaatcaagattcttgattgatgttggtaattcaatactaattgctgtaaagattgtattaaattcctaagagtgaactggaaattgtaatactgatcttttggatttagtagatgttattaccctggttcagggaacccaagcactagtcggctaagatgtgttctcagtgcagatgaa

SEQ ID NO: 237990 - DNA, 971 bp, Cannabis indica
aagactaacatttcatatataattataccaataaaatacatattgatataaaagatgtgtcattgtgtatattaagagctcctcatatacagggccggccaaagagtgggacagccggggcctaggcctcaccattttagagactcccaaaaaattaaaatatatatacacacaaaaaaaaaatataacatatgtattttaatttaataaatatcataaaaaagttagagtaaaagttgtaagtagggagtatgtaaatatggggaagcttgagtgctgggttcgattctccaattagtcttttacataccatataaggtatgataagagacagtccttgtttttattttcaaaacttgtaaaattcagaaactataacccacaaccacaacactaagaaacagggagcaatataattagagcattattatgggacactaaaatacttagcactactataagatgtcgttctataattagttagcggttctttaaaattttattaatttaaaataaatatgatctaatattgaattacactaaggtagcgtttagttggaggaaatgaaatgtaatggaatgaaaaagaaacaacttttattctattcctttatttgattttattttaaagtattagaatatcattcttattctaactatgttttcattcattccaattaaaccccgtttaatggggtgtttgttaggtgagtttgagttaaaaagaatagagttggagggagtaaacttagaaggaatgtgaatccatgcgtttgaggcgattaacattattaacattttaatttaaaaagtgagacctacttgaaaatacaaactacttatcattgaaatttaatttaaattttatgttccattctcaaatctaaacctcataccaaacaccctttaatagtgatattattccttacaaaagtactaggaaccataaataccttttagcatttctctat

SEQ ID NO: 237991 - DNA, 1558 bp, Cannabis indica
aaaaagatgagtgagtgaccccattattaatccaaaatatattcacagcgacatgaaaagttaaagatgatatctattgtttccttcatccaattaattcccttagctttagtttttactttcccataattgtgggaccatatatatgccctagtagctttcttttctttcattgtggtcaagaaatgttaaaatgtattagtggtgtcttgtaattttctcggtgtcatattgttattggtacaattaagtattgaatctcatataacttaaagataataacttttaagaaatattgctaaccaatcgtaatgctcttaaaggtcaccagcttgtccagtactactataaaatgtcataattgagtatcgatttctatatattaatttattttgaaaattattacgaaaactactaattattccatcttgcaataatataggtgttattggtgtctaataatgctaaagagcacatgaatagtgtctaacactatttaaaaataatgtaattgttattggtataatttaatattaagttatacatttttttaattaaataaattaataatataagaaaattctaaccactcgtaaaataacacctcatagcgatattaagtgctactgatatttaatgatatagtgtcactttttataatgaattaagactatgtgtacaataattattattaataattaattgattaatggccattgaaacaacatctcatgccttgaatatttagcattttggtacaagggaattgttttgagaattgatccgaaatcatattcaatttatagatttttgaaaaaagaattaaaaagataaaaatgtataaatattaattataatgttcatccatataaatgcataaataatattcgtcctactggcaaagctaaaatgtataaaatatataatgtatagaatcttattcccagatttgagaggaatttttctgacttgggatttaagggaatcaaactatcgctgttgtgttcatcaaacccccttcaaagctatccataacagattctatatataactttattatatatattatatgtaaagattttattgatgtagccctattgctcttttaatctcattttattatttatcatgaagtaatttatagtagtgttgtaataatttaacaatattgcatgcatatagttatatatttaatatatgtaaaattaaaaatatatatatatagaaaaaattcttagataaggatattattttccctcctaatattgcatggctcatttaatttctatatattttgtaataatgagacattataattcaatttttttccgttgtttttaagtattaaaattctgattaattaatttaaagtatgaaaaacataattcaaatagttagttagttgttattatgcttgtaattaattattttgaattttattttcaatatggtaaattattaattttttaaaaacatgtgagatgtgtacgttataatacctataatgtacaatgttattttttttttaaaaaaaaaaatagctataggatataatttt

SEQ ID NO: 237992 - DNA, 600 bp, Cannabis indica
ctacctccttcccaaatctcccttggccagaccacattgattctcctattttggatttctctcactcctcttcttcttagtgggcgtcaaggacgatgggatcaaggatcctccccgtctagatcatctctgacactgtatggtgacagaggaactcgtgactacaggaggttgggacgaagaagcttttgatctcgacgggcttgaggatgagacagttgtccggagttaggcttttgggctcggcaaggacaatttttttatctagtatttttttcatttgatttggagctttgtttgcttttgttggatttgaatttgtttgggttttagtttgattttgttggaattgaatttgatttgggttttattttgattttgttgggttgtgaatagaaaaataggttttgatggtggtggtggtggtttcagtggttgtggatggtggtgggtttggtggtgttgatagattgaaaaataagaacaacaaagaagaagaaggttgaaaatttgaagtgatggtgggtggtgttttggtggttgtgttatgatggtagtggtgggaagaaggtttctgggtagaagaagaaagaagaagaa

SEQ ID NO: 237993 - DNA, 974 bp, Cannabis indica
aatctggaatcccgatcacttattatatcttcgagtaacccaaagtacttcaccacatttttcataataagttcatttaccacatccgctggacacacatgaggcgcaggaatgaatatgccatacttcgagaagcgatccactaccactaagatagactgaaacccctttacttctggaaattccacaatgaaatccatgcttattgactgccatggtttctcagggattggcagaggttgaagcaatcctgcttcttgtcttctttctgtcttgtttgttggcatacaagacaggtcttcacatacacctctatgtcttactccattttcagccaaaagtaagacttcgatagtaaagccagcatcctagccacacccgggtgaccagcccacttagtgtcgtgggtttctttaagcaattcccttcttaaagtgccactgtttggtacaaataatctgccacccttagcataaagaagtccatcttcttcctagtaccgcaccagttctccatttcttgcttcctcaagaagcttcttgtaactaggttcgagcagtgactgctgcctcacccgattaaagaaagttgtactcacctgagtcaatgcaccaacaaaagcctgtacatctttttcggctaagtgcatcagccacttgatttgcttcccaggtctatgcacccatacaaaataaaattttaccaaatactcctgccaacaagtttgttttggggttagcttcttcttagatataaagtaggtgtgtgccacattatctgtcaccactgtaaattttgtccccaaaagatagtgcctccacacatctaaatagtgcactgccacagccatttccttctcatgggcagaatacctttgttcagcatcgtttaactttcaactttcaaaagctattggatgaccatcctgcactagtattccacccaaggcacgatccgatacatctgtctgtact

SEQ ID NO: 237994 - DNA, 555 bp, Cannabis indica
atggctttcttgtagaaatgaagttcctgaagcatgctcccattctcaaccgaaagcctaaggttggaagtgcaacaacttctcctgtcatcccccagaagaggaagagcgaggtcgtcccaactctagcggctgactcctcgaagaagcacctcaaaattacccaagacaaggggaagaaggttatgatcgaccctgctgttagggctcgcaacatcataactattcaggataagtttgtgagtgatgactttgtatccaaggtcgagggggttcctgctgaggatttgctggcgcgctctgcaaaattggcctcgcaattcatactatgttctcgagagctttcgtcgcaggcaccaaggaggtcgatctcctgagcaagcaaaactcacttcttcaggatggcgtgaataaattgaagttggacgtgacctcaaaggacaaagacatcgaggacatcgggaaggctaaggagcgggaaaagaaaaaagccaaactctttgaatcgcgagttgaggagcttactcgcgaccttgagagtgaaaaggagaatgg

SEQ ID NO: 237995 - DNA, 1191 bp, Cannabis indica
agcagcaatgatggtgaatccaagaactgggaaaatcagtgagaaaatctaccgtttcaatttttcatatgtatgagaactgttgtaacacgaaatcaaactttaagactatatatatagattccatattgttgtgtttaaagtccgaataatatatttgtgtatatatattatatacatagagaatttagtatttcacatagagaatttagtatttaatttgattaatatataaatatattggaaaggaaaaacattattctataattcctccacaagaaaactatacatatatagaatatgtatgtatgtatatattagcaaaatataggctatagaagttcaaaatcaaagttgtagaagttcaaaatcaatgatgaggtcagaagagagaaccacatgaccaaaaaacaacatatatatatatatatatatatatatatatataatgctacatatatatacattatggaaccttggagattctctaaaaaaaatgagagagagaatagaatttacagggtttctaagtgaagcaaactccccaagctagacggtatggaaccttggagattgttgtccgacagaacactacttagttcacacgagaatgttgtcattaattcttattattaagtcatatagagaatatcattcttatcttaataaaacagagataataataaaacaaagacccaatttatttgaatattactttttaataccttaaagcgtcaaataccatataccattttttattgattaactgttactcatatcaaatattagattcaaatatgtgaacaggattttaaaatggtacttgaaacttttaagtacccattagcatttacagtatatataacataccgtctgcaaatttattgtgcagaaattgtattaattggttgatacctgctagtctctgttatgctttcataggtgagtttttccttcgaaatacttcctctcctttataatttgatcttttagtaatcgatgtgggtttagtaattagtttatttttaaattttattttaaatcaagatatttttaattagtatatttttaaattttattttaaatcaagatatttgtaccacattttaataataaactattttatttttaatataaataaaaaaatactcataaatttctcataaatcaaaaattctattatatagccac

SEQ ID NO: 237996 - DNA, 6345 bp, Cannabis indica
cgtgcacttgcgtagtaattaataattttcgcaacaatgaaatggaataaaatagaaatgaaataattttcattctattattttgtttagttgattattaaagtattaaaatgtcattctaatagaatgatttttctaccattttggtagaatgactattctattttaaaatataaagaaagactgaatcaattttttttatacattttaaattttattctatttctatttctattcacattcacattctatgtttttattcttcccaaacaaagttacagttgtttatcagtcttgctattttaaaaaatgaataattacataagacattattttttgtaaaaaaaattatatttttacgtttggtttttcaaagaaacaacatgaaaacaacaagaaaactacataaaagtaacattaaaacaacaacaaaaaataatatatagataacaaaaaatcaacaataaattaacaagtatacaacataaaaagaccgtattttctgtaaataaaataaaaaaaatcgtaaaaatatttaaaattccgtaaaactgtatttttgtaatttttttttattatttttgtgtaattatgaaataatcctttttttaaaaaatgtatatcagccttatctaagaacctttttttaaaaaatatatatagtaatgacttttttatttatattgaagagtttttttttttttcaaattctgtaagttttagtcctaaactttaattagataaatggtattattacatttgtttttttttctttttcaaataactaaaaattggctttcaaaaaaagaatacaattaagaaaaatacacaagatcgaaaatgtgattcatatgctgtaatggagatcattttcatgccgttgaaacacattaaataaggtcggtactaaattttaatacaattgaatagctagacagacccattcaaaatttacctacacattattgatagggctgcaatttatatatattgtatttttttggtgtgaagttgtattaatatccatttttacccagcttattgagctagcttcactccttactaatctcaatttaataattttgttaagtctaagtgcaaataagactgctaattgtgttgttggtagttatttgcttctcttcggtttccatattcagtaagagtaatatttttttttttatctattgtaatgattgaagctctttcattaatatatatattgatttatccagctatttaatgatctcttctattttctcagctatatcttctctgctaacaccatctatggaagtttttggttcttgaagtttctcttattggtttcatcaggtgaaaggtatcaattattaattaagcaaattaatttcttccatagtactgttaaaaaaaaaaaaaataataataagaaaaccaatgaacacattgtatcgtctagacatgagtaagaacaaagaaaggaaagaaactaagacaaaagaattgtatgtcttcattgtactacaaaaatttttatttttagttataatgaaacttattatgactaattataattatcataaaaatttatgttgtgactaaaaggtccgtgactattagtcacaaaaattacagtttgttgtgactaaatgtgtttttattcacaatacttgttgtgactaaaacgaaattagtgaaaacttgtatctaaatactatattttagtcacaagtatatttttctttgtgactaaaagtcacatttaatcacaaaaaatttatgttgtgactaagattgtcactaaagataatttttttgtagtatattattataaagtacaagtatttataaatagttaaaattaacaatgagctaatctaactaactttggattaaaagctagcaatactgactgttggttgtggttacaagtttgtcatctgggagtggaagctgtgaatccagagagcatataccgagagcttagtgtggattcgaaaagccctatgtagaaggtcttaatagaaataaggagtaaaatacgctttataaaatttacaagtcaagcttatgcgagtttgcaaactcagcacacataagcactttctgttgaaagtgaaaccaatcatgtttaaagcttagagcttgttaggtgtattgagtcttcgtgacattgttgcaaaatacaaagaaagagaaggataaagaaagagaaacaaagagagaaagagggagaaaggttatggagacaaaacaattgtatattgattattgggaatcaattacactcttatatagaatgttacaatctaacaaactaacaggatgttagttgaatcaataaagagttaatagctacaattattaattaaaaaataattaatatgatagttagcactaaataaatcctaactagaattgattcccttaacacctttccgcaaactcacaattggagccatctataattgtgagtttggatctgaattttgaaaaaattctaacttgaaatggccatagtatatccatctgcaagctggtctagtgcaggaacatgctttactacaacttggtgattttgaaccttttcttgaacaaagtagaggcctaatttaatgtgttttgtacgagcatggagcgttggattttctatgagtaggacattaatgaggttgtcataccagaccacgaaaggttgagacaattttatgtgaagctcagtgaacaaggactaaagccaagccaattcagcaacagcattggcaagacttctagattcgtgctggacctagagatagtgggatgcttctgagacttccatgcaatgagattggacccaaaaaagatggtaaaactggcggacctttgtcatcaatgtcagtggcccaatccgcattacaaaaggctttgacttcataatttagatgtttgggaagctgaagaccatagtttagagtacccctaacatatcttagaatgcgttttacaaccaaccagtgtatttgtaatagtttctacatgaactgacatactttgttaacattgtatgaaagttcaaatcttttgatagttaggtattgtaatgcacctactattgattgatacatttatcgattttcaaagacttcactaccatgaggagagtgtttcaaaccactgaccataggagtgttgatgggcttagcatcttgcatattaaccttgcaaagtaagtctaagcatatttagcttgagataacaagagaccattgttgtttagagtaacctccatggcaagaaaatatttgaggtctccgagatctttgagggagaaagtctaatgtaagcatgagataagtccagtcaccacttcacaatcacttcctattactaaaatatcatcaacataaactaagataagagtaacagatttagtggtgtgatgtatgaacaaagaatgatcagactttggagatatgaatccaaatgatactagaaagttgtgtaacctttcaagccaggcccttggtgcctggttcagaccatatagggccttatgcaatttgcatactagattaggttgagatgtgtcttcaaagctaggagttgtgtcatatagacctcttcatgtaatactccatttaaaaattattgttgacatccagttgtcttacaagccatcctttgaaaagagtatgtattagaacaactcttattgttattggtttgagcctttggccaccaaccaagctttgtacctacttatagtcccttccttcaagtgggagaacaagagtgttataaggaatgttactaacaataatgttataaggaatgttactaactgaaaaataacaagcctatagttaagactaactaactcctaactaaaatttgattcctctaacagagcttctacctcttcttattccacaaaaatgaccttataatatatattcactaacaataatgttatttcaattaattttttatttcatatttatatctgtgattcattttatacatgtaggttggaccaaactttattaatttcttgacctcatgaattggacattgaattgggaagaaagggtcacaaagtacaagatgtctgcaggttcttgctcttatgaaattcgtattgatttgggagattcaaatgatgattttcttaaaataattacaacgaacacatcaacaacagacggagaaaagatgcattatgataagataggatggcttccacaaattttgcaaagagattataaatatttatttgagtgttgttatccaaaagagtttccaattggtcctatattttattatttgtatgaggccaaggttaaccgacacatgcaacttagagatgaattgaatgtgtgggaaataatgttcaatgataaatggtgcctcaagctgttattggcaaatgatttcatcaaatcatttagcaaggacaagaaagggactgagttactatcaaaaatcaagaacagcattgacaacaacaacttgaaagagagtatatttaacaatgtttatgatcccccagataaatgggtgagaataatcaaatttagtgatgattccttggccaagttacttttgttggatggatgtgcagttctacacttcatacacaactatgttcatagtgaagtaacaaagtttggtattgataatttgcaagcaacattgattcaagaggacttattcttgcttcaaaaccaaatcccatttgaagtaatcgaactgattttggattcgattgaggaagatttggctacaaaattgaaagttgacattctcaatttccttcacatcaatgatctcaagacaaaggagccagtaagacaggagtacagtaaggaacaatgtgataaaattcttattcataataaacatcataatgctcatcttcttcaacttctctacttctttatcaaatctggtgagagtattatcacacctcccaacaaatcattcactaaacttacaatcactacctttaaatatttgttggtgtgttgtttgatgcctttgatatgcatattactcccattttcggattcttttaagcttcgtttcaagccttattcagatgcttttatgtgtcgtattaggaatctgtttggtcagaaaacaaatattgtcaataacaaaaggtactttcgcaatgtaagagagcttaaatcagctggaatagattttaagccaagtgtccaatccataccttttggtaaatccatatctttcaagaatggaaagtttaacataaaagggcatcttaagcttcctcaaattacagtggataaatatacaaagggtaagcttatgaatttggtggcctatgagatgtgtcttcctcccaaagagtatccaatagcttcttttgttaaatttatggactttcttattgatggagaagaagatgttaaggaactaaggaagtcaagtgtacttagacacagactcagttgtgatgcagatgtggccaaactattcaatgatatgggatcaaaatgctatgaccattcgaaagacttttattgtaatgtgaaggagggtatagaaattcattgtaagagatgtcatgcgagttggatagctcaacttagtgagagatatttcagtagtccatggcccattattgctgtttcggctgctacaatcggtcttttgatgactggtgctcaaacttggtatgctatgaatcctaagagttaagtaataagggattcaaaaactataattatgcttatttatgcctctatagctagttggttgttgtggcctttggactttgttatgtgtttcttcaaatttattactttgtgtttgtattatggaaacttgatgtatatcatgaatgacatcatatttattattattgttatttttttattgacgagataagaataaataactattaacggatataattgacgaggcaatatgtttgcctcgggataaacatagtatataataagaacttgcaagactagacctcaaagatcttgcagctcattgactcacatacatgagcagtgtgaaaataattacattcaaccatctcactttcaacgcgaatagtagtcatctcactaatatcattataatatgagagtgctgcgagaagaagcaagtctacacttagcattttttcctctaaaaacgaataagaaagataactcatacttagcgagaaacaaccttattagtcagtataaccgtttaaagaataaaggcaaggagcagttaggtagttattagatattatcccatgtgcaaataaatgaaatatggtgaatgtcaacatttcattggcagttttaagtgaatcgatcccaataaaaataactgtcaacctatgcacctataaat

SEQ ID NO: 237997 - DNA, 1790 bp, Cannabis indica
ctctctctctctctctctctctctctctctctctcttcctctcttctacatgcccctagcaaggtagaagagacaaagtctccctcatctcacttacttgagatttgcttcttgattctcactattgtaatcttaagaaagctactccagaatccataatacttatggtctaagtggtattatctcttatatcaatacaaccaaaagaagagtagctcattacccgctaactaaggggactgaacgtctataaaataatgtgtccctttttatttacttgttcttattgtgtaaatgtgatgatatcagtcataaatacgactcttctattggatggccaaatctaaggtcaagaatttggtgctttcattgagagcactgtcgattgatctgatctatcaccatggctgtaacaaggagaactctacttcaactcctacctcatcgagtcttcctcaagaccctatgactgataatcccgatgtttgtgttctagccaccaatagaaactatataatctaatcaatgtggctaacctttccaactcgcaggcacaaaaaacttgaccaacacaactggtaaggtcgaccctccccacccgacaaatcccaatgatcagcctttactgcttaggccagatccaccattggcacctcatactaagggtttagccaatgtggatcaaccctcgggcaccacaactgactctggtccctagtactatgctggggaaacaaggccaggaattggcgagcctcgtgtggatttgggagaagattttgaattggctatacttagagagactgtctgcctagtcagcaaaactaaagaaccacgcagtgttggttgcgatacgttcacacaatagagaagcaaatttttgagattgatggatgaccaggagtacatcctctgatctcatcaagtagagctagactacgtaacagaggttaggatctaattagagatcctctccaagggagactagtaaacaaattaggcaggatctacagacaaatgatccaaccgagttctgtaggaaccattacagacctctcctgaagtagctgactctagcaaccaatggctttgagggtccaatagggatctctggctacacaacacctccgcttggccaacctttgggtggaaacacctaagaacacatcaactcaagaagtgaatacaatcacctcaggcagttagatccactaaactctagcaactggtgtgatctactcctatcaatacacatgctaaccaaccaattagggcagaatgggtggccaaacattgcccagaatagagctggccagccatgcactattgcttacggtagggctgtcagaccacgactagtttcccgaccctggggctgtccagccttgaacataccttttctcagggtatggctggccatgtcctggctaatctagggttgcagcaacatcaagaaaggtcaatcaaccaggctcctgcaacatcaaatccttatgtgcaagcacaaatggatcaaataaaagacatgataaagggcttggctggcccaaacccatcaggccttgaactagataggtaaggaggatcatcattctcgtcatacattagtgccttgcccttgcccaagtttaagatgtcagtattaaaaatgcatactgcgcgagaagatcctctagcacacatcaagtactttgagatgtagactaacctctaaaaagttaatagtgatgtacaatgttggatcttctcaaaaactttgtcagaaatagctcagcaatggtacttcaagc

SEQ ID NO: 237998 - DNA, 795 bp, Cannabis indica
aatatgaacccctataccaaactttcaaaaacatgagaattttaaaaagaaactcttgtcctcatacccaccagcaacaagggagagttgaaaggaaacataggcatgttgttgacatgggccttacacttcttgcccaagccaacatgcccttaaatttttggtgggaagcctttgcttctgctgcctacctcataaacaggcttcccacacctacaaacaacctactctctccctatgaaaagttgtttcatcaaaaaccagattataacatgctcaaggtattcggctgttcttgtttttccttattaagaccttatgaaaatcataaggtgtcttttaggtcctccaaatgtttgttcatcggatatagcatctcctcaaaagggtatcgacgtttacacccaagtggcaggatctatgtagcccgaagtgtcactttcaatgagcaagagtttccctattctcatctattttcaaacccctcaccccaatctccatctctgcctgttgtcattgactccacagcttatacttttccttcttttccttctaattctccaaataacaacattcaagaacatggtgttcagcatactcccatcctcagccccacagttacacctcctacccctcatattaccaatcctgacacttctgtgtcttttattaatcccataccagcatctcccaacataaattctgatgctgacagtcacacttcacaaaccaatatccatcttatgatcactagatctaagcatggaatctgtaagccaaaaacatatcttgcaa

SEQ ID NO: 237999 - DNA, 1410 bp, Cannabis indica
tatatatatatatattaagtcttaaaaaaaaagtctttctatcttggtgaatcatagcacctaaattaaaggatcatatgacatatataggagtttatagtaacttcaggattaagattagtttgtatataatcatcgattaatgtatttgataaatactacttgacattgcttttagccaacgacagtgagtcaaattaaagcgattagaaataattaaataacaataatgataataataataaagataaagcaaagaaaacactgaggttattatggaggttcaatctcgtgatagtggtaatagtctacttctctttttcttttgactcgtgagaagagaagcaagaagttcttgatctctctcgaaagctcttgcaatatcactgagtattttactattaaatctagatttctctcttgtgtgttatctctgaatgaaattcgtgtccctttaaatagtgagatgagtctactatttatagggattaattacatcaaattaatttctcaaaattaataataaaacgagaaatctatttactttatataattacaataagcaaaataggaaactaggtaggtttcatttcctcttcaatactacgaatctatctcataaatctagggatagtgtcgtgtcttgcgagcttaaggatatataagatatatctctaaaattatttaacttacatcccctggtcggtgcatgcgagccacttgcttgatggaagctggtcgggtgcctttgcatgctcagcttggatgtcccaacttttatttgtgacttcaagtatcaatttttcctatactactcattaggagtagaattgcctgttcaggttatgaaatatcctccacgtattaccctattagatgtcacgtcaccttgtatagaaatttatataacattttgcctctaaatttacgtaggatcttcttggtcgcacgtggacttactcggccacaaagttgatcggatgagtgatgtgtgtctggttttcacctttgatctgatgggactgatcggacatctcttcgatgtttgggacatttaataccgtcttaaaaattgtacctctaatcacatagtgatggttgcacaataccgcatgcataatatttatactgttgtaatgagtactaacgttccttttggggggaaaacccaaaaatttaaattttgaattaccctatttatccctccaaatgcttataaaaggggatttaagcttcattgaaattcttgtagccattttagttctcaaaaaaccagagcgataaatttttcccttttttcctcaaatctttgaagaaaatcctcttggaagcttaattgctgaaaacttctgagtaagttatcttttcttctcttttatgtaatttcttttaaattcatgcataattttt

SEQ ID NO: 238000 - DNA, 709 bp, Cannabis indica
cttatctatttatctttatatattcaataataataatatatattgacaataattaattcatttaaatttcttcaaattatgttagataatgaaagtatttttagaaaattaattaacttaagagagatatggactagttcagtcaattacatatttataacattaattaagtacaaaaaatgagttgaatgctcataagagtatatatacagattaagagatctagattgtatgattaaaggatgatcatagttctttttgaaaatgaggtgatcaaccttaatagaaactttaaaattttataaacaaccgcacacgaagcgcgatttgttttccagttatatatataagaaattaaaccctagagctaaccgtacatctctttttctcacagcccctcttgcgcctcctatctctctctctgaaatctcaacatttttttttgcttaacactcaaagactcagccttaggaatagatgatctgaactacattggccatgatcggtgtttctcgatataccagtatccaaacaaaggcctagaacagcctctctgctactcaaagcattggtcgccgccgttgtcccaagtggaccactatcagccgctattggcccaaccaaaaacccatttgactctggcgaaggtgctatttttgatgactagatctgagattgtttccatcggaacatttaggtaccgccctca

SEQ ID NO: 238001 - DNA, 465 bp, Cannabis indica
gttattttgcataaatctattgattttgtttggaaataaattttgtattgagttatatcacgctatttttatatgaactctttaaagacttttatgatgtgattcaccatggaaatatatattgtatatcattataatttggtctttgtattaggtactaaatgatgataatagtgttaatgaggaataacctcctcttgatgaaaatcctacaaataatggtactgataagggtaaggggaagggtactaaaaaaaatgggtagacctcctactctacctattcctaatcctaagaagaagggaaagcttgatgtttggcttcatttcactaaggaagacaatcctccccaagctacagaggataatgatgaagaacctcaacctcgtgttcctaagtgtatgtgcaattattgtgggagtgattttcattgtgacactaaaaaacatgggactcatcatctat

SEQ ID NO: 238002 - DNA, 970 bp, Cannabis indica
agtaatattttcattaatgattaattaaaataaatagactaaaatataattttttagttagaaaataaataattggtttatgaaatatctagatagttattttctaagtagactttgtggtatttttttaaatatatttaactgaacagaaaattaatatttaagttgattttattcaagacgcttaaatatttgatatttttcttaagagatttaattaaatatgataattatatttatattggaaattaatttattaattttagatgaacataaattagaataatttttccagttttattttaatttatgttaatgtaattcaaaaatatatttttaaatacattagatttcaaattatgattagagatatatatttataaaaaattaaatttgagttaaaaattaattatttaattaatttttggaccaacttaaattaagtaattttacataatatttattggaaaattaatactaaggatggaaaataaatttttatttagatctatccaggtttgtatataattttttaaatattaaatttaaatttatctaaattagtaattttaattaaattaatattaaaataaatagattaaaatacatatcaaatgaaaatacattcttttaaataatgagctttagtataaagatattcgatctccaatgttggtcttacatggttaatatttcaataggaccttgagacgttagacttcgttcctcatatggacggtcttacattgaaaatttaacaccgtaaagatctcgaaagataagtattttataagtttttttctgtattagactctcccctacggtgactacttagagataaatttacaagtatgaaacaatagtagaaactcataaaataagaataatcttgactctcgcctaccagaacaacgttagattcttattttgattgaataaaaggatgctaaaatagtgtccattttaaatg

SEQ ID NO: 238003 - DNA, 2721 bp, Cannabis indica
ctcacagacctgacgacactctcaagtgctgaacaaaacttatagagttgatcttgaggtaactacgattatttctttaatgagttaaacactgccaacccacgaagctttggataagtggaggagtgctcacacatgtaataactccctgagatccatgatcaagaaagccttacgggatttggtatggaaagtgaccaatgaaggcatttcttcgatcactcaggggaaaataagacataatatacaggagctatgcatgttacatgagcattcagaaaaaatcatacacgagagccatgtatgtcacatacactttggtatacaagagctaggtgttaccccggtatacgggagccatgggttgaagtgtgtcattcaggaattttgcacacctgagttagtatttctatagtttaataaaatattgacgttatcccaagtaactgagtttttaatcctgaatactagtgcgagtgctggtaagttcattgagttgaacaactgcacatatagactatttgcacgcttgagttaagcagtgttatgatataaacgcttgaggtcacacaagaatataatgaccaagtttataaatctaaagtgctagtgcaactattcctcctcgaattacaaaaatcaaaaagaaaagaaaaacatcatcaattacaaaaagctctctggaagcaagacgttgcatctagaagagatattctaattggttgaagaaaatcctttgagagtgggaagttttcccaattggggtattctttcagtggctaaactcctcctgagtatagaacgttgtacttagaatgggtttagtcgaatgtcttttttcttttttctcccttggagttttcttcttaaacctttaacaggggtctatgagttgaaattatcaaactggtttcttcaacaacctgtgatttcaccgtataaagatgatatggcgggtttttctacactactcttcgaccgtgattcatatcacttatgatcataaagtaaacttatgcttgagcaccaagaacacaagcaataactgactaacaatggtctatatctctcacaacaaatagcttcaacagatgaaacttcaaagttttcaccccagtcactaagaagtctaagagatcaactctgggggcaagagcagtcaagctcagacagtgtcaatgaaatttcaaacatcatggtgacaaaagtgatggttaataatcaagcatcacaaaatattttaatcataacaagccccaaaaggactgggtcactccctaaaagacccagagacatgcaagcagctcatgtatggttccaggagagttaacatcgctccatgtggtcaacatctctccctagtaaaatcaaattaccactcgcaatcgaaattgtccagtggtaaacatcattatgactaccttcatagtgatcggcaccaagtctcattggaaggtcaatacccagcgacctccgagccatctcacttatctaccacctatttgtcaagtttttgatagcagaccgtctccttggtaaccaaatagtaggatgcaaatgttacaatacatcattgacattcgccaaaaaaacctccttgattgttcaaagtgaatgagttataaagaatatgacaatgactaactaaaacctatttgtgtttgatgcttgactgatttatggatttttgaggatttttttaccacttttctattaaatttttgctgtataatttaattctatttaaatgtctgtgtatgataggttcaactatttttgctattgctatgtataatggtgtttcagatcttaagggtagagattggatttataatggtatttgggagcctgaggtaaagattgggtttataaccgagattgggtttttgcgttccaatatcttatgctcgatatgctctatgacgtacatttcgtaatcaccattgtattagtagttaaacacactacaagaaaaggcctttttatcggcgcagttcgtcaaatgcgccggtaaaagctgtcgacattaagcaaaaactgaaatcccatttgcatttatgctttacttttgccggcgcaataatgcaccggtattactatgttttgccggcgcaataatgaatatgggccggtaaaagtaaggaaatgaagcgccaacaggcgcgaaaagtttgtcgcctatcatttcatttattctggcgcttatatacttttaccggtgcatctatgccccagtaaaagtctcaaaaaaagagagggaaacttcccgcgtggattttcttggtaggtggggatacttttaccggcgcacatttgcgcaggcaaaagtattaaataaaacgcgtggattttgatgtggcaagtggggatacttttaccggcgcaattgtgcgcctgtaaaagttgtaaatgaaacgcacattttgacttaggtcaaaaatttaaaagaacttttaccggcgcagccaattgcgccggtaaaagtgtatatatgaatcagttcgaatgaagccccttcttccccattttcatttttccacttctgaaaaaaaaaatccctctcagccctcttctctcaatccctctccgattctctcaatccctcaatcaatctctctcaatctctaactcaatccctctcaatcctctcaatcactctctttttttcttcaaaaaaaccaccaccactaccgccacaaccaccgtcggtcaccaccacca

SEQ ID NO: 238004 - DNA, 768 bp, Cannabis indica
atagacacttttaatatataaagatatttatatttaaaatttttgtttctgaattatgactaatgtaacattgtaccttttgaatttttcatatggttagaaatagtttttaaattatttacagtgttgtaaagtgattcttttgtttaaattttgtcacgtgactgtttaaatgattgttattagtatcctgtacatatacaaaaattaaaaaataattctgtttttaaaagatcattaaaaaaaattaattaattataaaaaaaattatgtaaaactaaattattttttttcaaaataattatacatgtaccgctgacaagacgctaattacgtaataattatttaaacaaccacatcatcatattgtttaccaggtgtaagaaaatttgacataaggaccaattcgcagcacaatgaatagtttatgcactacttttaacggcttaaaaattttagtgagcacaatattacaaatatcataatttgaagacaaaaattttaaatagccttaaaaagtgataaaagtacccactactactactactattaattatcctataataccatatgaaacatattccaaccattattgaacttgaaaaaactctcaaacaaaataatctaaacttattaagtccttctcttctctcatacaactcttcaacttctctctcctccttacccatctctctctctctctctagatatatttctttcttgtttgaatatagtgtgagtacttatgatagtgtatatatatatata

SEQ ID NO: 238005 - DNA, 1470 bp, Cannabis indica
acaccttgttgatataggtagtacaaatcaatccatttaagcccttctttaactgtgtagtcccatacctacacagtctcagaatcatcacacttgacctaccctaggcggtgtgggattgtacagcttacccggtatttctccttacggatcacgggactactgactgttacaatatttcctcaacataaacacataaaacacattataaacatgtccttacaacactgataactttaattgataagtgacctccccaactctctcaataacctggaaaggtctaacatatctggggctaacttatccttaactccaaatcttctcacaccttttataagggtaagttttaagaagacatagtcatctagtaggggtgagcaaaaaatctaagaaactgacaaaactgagtacaccgaccgtccgaacatcaaaaaaaccaacaccgaaaaaattgaaaaccgaaaaaattgtctttggttaaaactgtctttgcacggtcagttttagtgtcaatggcaaaccgattgattaaaccgagaaccgaccgaacatatatattatacactatacatatgtatttataattttttttttgtacatatttaatatacaatttttattaaattagttttacttatcttttttatttaaagtctcaattattcaatgttttactttattataatttgatatatttacgtattctatacacacattcataaattaatacgagttttttaatataactcattactatattagtagtacaagtaatttgaacaaatttaaaaaagtttattttacattatttatttaactaagaaagtttaagaaagtttttgttcttaaataatatgatatttgatacaatactctaatttttttagtttttaaataattatagcaaattaaaagatttttttcaaaaaaaatgaagctcggtttggtcggtttaaatcgcccaaactgtggattaaacggttggtttttttttttactatttttatcaaggttcagttggttttcagattataaccatgaaaaccaaaaactgaattttggattttttttgtataaaaaatcgactaaactgaccgtttctcacccctatcatctagtttagcccaacacaatggtgatctgcatggtttcttaaataaatcctcatggggtcatgcctatactggcttagtaattgttataagtgaatttccatcaatgacatgtgttcttcccaaccacctctaaaatacaaaacgtaagaacaaaacatgctatatcatcttcaattgtttatttatctgaacatgatgagcgagaagtgaaacttagtttttaaagcttgttcaagtctttccaaaattttgtcttaaactaaagatctacatcaaaaataagggttgaaggtgttgtggacattgtcccacatagaataaatggtagagaattgagccatatataagaaca

SEQ ID NO: 238006 - DNA, 996 bp, Cannabis indica
ctggcataaaactctcaggttcaatccaatatttaggatctcttccaattgcccatgcatttacaagtatcttagttttcataggaatttcataaccattaatatcacacttttctctactttctcttggaaataacatggcagctgggggatgcaaccttaaagtttctttcacaactgattttaagtatgtcatctcattgattgaagattcatccacaaaccctttttcggcaaagacttctctaacctcgtcttgagcttttttcagcactcttggatttctcatcatttctgccatagccaactccatagttactgatgatgtatcactcccagctccaaatatgctctgaattttttttttttaaccaattaagaatgttaatttatcacgaaatttgataataatttttatataagcattttgcagcagcttggattattgcataaggcctccattttatgaggctcaattttatttattttcttattatgtaatgactcattttttattttctattatatatacgtaaataaaaagtttataattgaaagttttagaattttttttttcttaaaaaaagttggtaatagaattataatgcacatttagaacgtgtcttagaaaaaaaaaagatagaacgtatttgaaaaaagttagtaatgcacacgaattttgttttatttaaagggcctaattttaaacttttgttctaattaagcccccccgaaattcttgggccagtcctaggaataattacataagacactatattttgtaaaaaaaaattacacgtatatgtttatagaattatttttttttatatttttatggtttttcataaaaacaacacgaaaacaacaagaaaactacataaaagtaacatgaaaataacatctaaataatatcaaaacaacaataaaaaataataaacagatagcaaaaaatcaacaacaaattaacaagagtatataaaaagaccatattttttg

SEQ ID NO: 238007 - DNA, 1028 bp, Cannabis indica
ggggtatactgctacttggtcatgcctttcggaatgaagaacgctggtgcaacatatcaaagaatggtaaaccggatgctcaagggccttctagggcagaatatggaagtttatgtggacgacattctagtcaagtctaaagcgtgtgtaagccatgtagatgatcttacagaatgcttcgaagtagtccagagatatggaatgaaacttaatccgaagaagtgcactttcgggatcaagtcaggaaaattttaggggttcatcgtcagccaaaggggaatagaggcaaatccctaaaaaattcaagccttactgaacatgccttctcgtaagaagcacaaagacatgcaaatcttgacggaaaaggttgctgccttgagccgattcatttctcgatcaaccgacaagtacatccctttctttaacatcctaaagaaatgccaaaaatttgaatggactgaggaatgcaaggaggcattcggaaaactgaaagagcacatggccaaaccaccaattctatcaaagccagttcacggagaagacatgttattgtacctagccgtctccgagaatgctgtcagcgcagcactagttcgggaagaagaaaaagtccaacaccccgtgtactacgtcaacaagcgtatgataggggccgagatacggtatccattgatcgaaaaattagttttctgtcttctgatgccttcaagaaaattaagaccctacttccaagctcaccccattaaggtgctaacaaaccatccgcttcggcaagtcctactgaagccaaaagcatcagagagactcctcaaatgggcaatggaattaagccaattcgacatacactacgtaccacgcatctccataaaaggacaagccctagctaacttcataacagagtgcaatgaagcagagggtcgaacgaaaacggatccggagccgggatagctatgatatctccgaacgggcttcgactccaggcgaccctgcgttttgaatttctgacttctaataatgaagctgaatat

SEQ ID NO: 238008 - DNA, 519 bp, Cannabis indica
gtatcatcaactgatggttcaggaacttcaactgcttgaaatcttctttttaaagtctgagtctttctcaatatacttcttgtattcatcccgagtagtagcaccaacacactgcgccaaccaatacaagaattcttatgtaatccttaaacaaacgtagaaagttcttatatatatatatacatgtgcttaaaccttaaaaaagacaaaccttaaggacacctcttgcaagagcaggtttcaagatgttagcagcatcaagagcccctcctcctcctcttccagctccaataagagtgtgaagttcatcaatgaagaggattactgtccctttactattttcaatttcttgaacaatcttcatcaacctctcctcacaatcgccacgattagtagtacccgcaacaagtctacccatctccaatgaaaatacctgcatcatagcaattttctcaagaaaattagcatatttctgctcccattattgcgtttaaacaaactgtttataccttattgccc

SEQ ID NO: 238009 - DNA, 619 bp, Cannabis indica
  modified_base (525)..(525): a, c, t, g, unknown or other
tttcactttactttttctaaatttccccaaaaacttaaattttgggttatgtcaactaaataaactgaaactttttagcaaaaaataataaataaattggaactctaaattaactgtttacaattttttttttttaaaaaaaaactctaaattgttatgtggtcagtccaattgtaaaatatattagtatattaatttaaatttataaatgattatattaatgaaaaaggtaatgagatccatatatgctgtaacagtccagttgcaattagaaaattaatggaaacctactttgttaaatatatataaatatattaaactgaaattaaactcatctcgccatattaatatcatggaaagttcaaagtagctagtaatcctagctaggtagctgccacagtggaaaataaattatgttataataatataataacaataataatgttattgtaattacgatgaaacaatcatcaagatttaggtatggtccccgccaacattccttgagtaacactcccaaaaccnttaaatcgatcgctggctggtccgactgttttcccaatcttgaattttggtccctttcttgaggctaacttatcttacacatgtccaaaccccg

SEQ ID NO: 238010 - DNA, 1777 bp, Cannabis indica
gctaaactattgggaaggaagacctcgacccttcttcctctcccaagagcaagatgaaccacccaaccccccttccccttcctcaggcctcaatgatggcactacgaagtcaaagattggccttcttccttgacgaagacaacccagccaccgaacggaagacctaacccctctcctctccttgtagtcgctgaacggagctctcctccccctccgctgccactgtctcatccagctagacatagcatcccaccaccgcctcctccttgatctcgtctgtccattcactacacgaacaagagtagaagttttttttaaaagtctttcttttctgatttaaaacataaaattttggttttagaaataagagttgaccaggtcaatctggtaacctggtcaacccatgaacctgtggctcgcaacctagttaacctaccgtttcacgggcaagtacgagtactatttttcaaactcaggcaaaccttctttatgttcaaccctacttgacacttaacataagtttttggatggaaagtaaatataacaaatgtatttcaaatagtttttatgtaattatatctaatctatatatttatataatatctggagacatatggtgctaacatgttactctaaaattactccaaatacatctatttgttctcttcctagttttctctcttatataattttttattctcatataatctattctcctattttatatattttttaatctatattaaaaaaggctaaataaattaactccaaccttaaaccttctccaacacatccgtacctttactacttttgacttaaccaagtcaatagagtccaaaacaactctgttttgtctaaaacaaaactccttggatcgagaaccttctcgatcaattcccttaggttctagcttctcctcgaaaccctaacagagagtttcttgctcaaagaaattggatgctcgaacccaattcttaaacacaaaacacatacatacacgagattagatctagattgatcttatctttatcacacaaatatagaaaaacagagttagaaaaggttaaaaaaattaatttttcttgacgttcacccaaaatggatatgtccccgttgagctattccccaaattcggtagctcgatttcactatcaatcaactgttatgagttacaaggatgagattcaaagtcacatgtatgatattgactagtaatctctagatcaaattacatttattatgtttaatcccactctctctctctctatatatatatttactaactcaagtttgtttttgtgcatatatgagtctctctccttattctccaaagatctcagctcctggatcttgaagaatctcctcaaccttaactcgataaggctatgtagtaggtatatatagctataggtctctctctctttagtttgttagttacagaaattaattaggtgtggattgatggcctgtcataatccattctaactaacttttgttaggaattaagttgtagaaggccgaaggccactgtagtaatgttgtatatgtatttttctttgtatatatagaaggccgaaggccaatgtatatgtatttttccttgtatatgagtctctctccttcttttacaaagatctcagctcctggatcttgaagaatctcctcaaccttaacttgatgaggttgtgtagcaggtatagatagctgtaggtctctcttttcttagtttgttagttacagaaattagatatgtaaggattgataacttttcataatt

SEQ ID NO: 238011 - DNA, 2505 bp, Cannabis indica
ttattgtattttgtattttctaatatgttattactattttatattaattattacttttatgatgaattttaatttgagaactaaaatgtaaaataaatttttaaaacaaattaaaataagggttagaagaaaaaaaaaaaaaaactttagagtaaatttatgtagactcaaaatccaatactattaatggtgcaaattttagtacacactaatttagtgtataatttagtatactatttgagtaaatcgtctgaagattctacactaatttagtaaaatgaagcaccattaaagatgctctcaattcatgtcaatggccgcctattcgccatgattacatgcagaatcaataattttcccgtcgacacggcacatcgatgtcctccctctttcaaaaatctatattggatgcatcatcctcatgaaataatcccataaatagatagtaagaactaaaataagaaaaaactcctactaaattattttcatatctgagttttataacacctaaaaagcacaccagaactttctgaaggagcctaatgttacagtcggtcatggcagtaaattagtttataattttgaagcattaacatattattcaaccaacaaaagcatctaatgttcctcttttgtacatcatttcaaacacacccaaacaaaatctgtaataataaactaatcactgcagacaattcatgtttctttttatattaagagtgaatggagttgtactcatccccaagataacctatccgaatttctaccatatttcggttaaaaatgaacactaagaactcgacgagcattaaactagttacgccaattgtagcaatatttgattacaaaaatatggggggaaatagaagcaatgtgaatagttgatgagcataggaatatgatcatttgtaaaagtgaggcttcaaaacaccaacataagggagatgcctatatgattcagcaaagtccataccatatcccaccacaaaataatcaggacactgcccacgcacacaattgtaattaaacacaaacaaaactgtattcatcaataataatcatcttatatataaataaaaattcataaaagataagacacatttattaaatttcatgacatattgtaaataaattgttgcacgtgacagttgacacaacatatatttaacaaacagcatatatacctaacacaacttgcaattattttgttgtttacaaaattgaccggaaaggaaatcagtatcattttgtttacataatcaggataagtaatcggaatgacttaatttgactaaattgtaactgttagaacatataattaatttttatttatatatttttgaatgacatatttattttttttatttttaattaataaaaatataattaatataaagaaaattaaagaaaagaaaatgtattcattatgatgaaaatgaggggagaatttagtaaagaatgggaatcaataaaagatgccataagagaagagaaagaaacacattttagtaattaaaataacaccgcaaaaattctatctattctgtaaaagaatataaaatatatattttcttaaacaaaatatattgaaattaaaccatttacagaagatttataatccaaaataatatgttaaatcactaaatttataaaaaatttctaacagcactccagagtgagaatataaacataatcaataaattgttaaaataatttattttatttttttaaaaaaaaatgaagaaaataaattagctagtgaaaaagacagagaagagtaacctgaaaaccagagtaaaatttggcctgaccaacaagttgaagatgaatctttcttctagaaggtttatcaagaaatgtacacactgatacacacgaagctcctttcaatttcatgtgttcaatcacacactctaaggttcttcctgaatccactatatcttcaacctgtaacaaatcatcatcaattactattaattccatattttctcgacagagtttagtttttggggaattgttgttgtacctaccaagataacgtgctttccacacacatcgagtttcaaatcggatgagattctcggtttaccactggactcggttccacagccgtaggattcgacgcggatgaaatcaacggtgattgggagattgatttgcctgactaagtcggctaggaagagaaatgcaccagtggctacgcctacgaaggcagctggtggagaatcgaggaggtcagcggagatttgggccgcgagttccgtgactcggctggcgatctggttttggttccacagaatagtttcgatgtgggactccatctacggcgccggcgccgacgatgaatcagtcgaagttgcactctctctctctctaactaactcagtctctctaagctgagttgagagtgaaagaagaggtattataggtatttttggtttttgttagggtttttgtaattaatttttaggagcgtttatttatgggattattttataaatatat

SEQ ID NO: 238012 - DNA, 547 bp, Cannabis indica
atcctcaatcgttagtaggccgcctcttcaagtctcgttattatcctagaggctcttttttggatgctgaacttggttcgaatccaagcttcatatggcgaagtttgatggaggcacaaagcttggtaaaggagggttgtcgaattacattgggttcaggtatgggaactagtattatgaaggacccgtggctgttggatatgtcaaatccctacataacaactgctaatcaagcaattgttgatagaacagtggattctcttatggttatgggggaaaggagatgggatgttgacttggtacttgacatttttaacaagagagatgcagatttaattctaagcatgcctttgttttcttctattggctatgacaaatggcaatggtgttttgaaaaagatggcgagtattcggtcagttctgcttacaatcatatgcaagataaaaagtttcacaacgtagcagtgggcgaaactcagttttggaagcgtttttggaagacaaaagtgccaccgaaagcactgaatttagtttggagggctgtgac

SEQ ID NO: 238013 - DNA, 1831 bp, Cannabis indica
aatttcagttatataggcacactttatatagaatagatacgttaatgtagtcgaggctattttcgtcttatgaatgtggatagagccttacgtccccgatttgttaattattattatttttttttaaaaaaaaatattgaatcgtgcatattattatattatatagaatcagaaaaaaagatgttgtgttatatgttcctcactgtcgtggcaaacgaggactcttattatcgtcaaacatgttagctagctagttttggaagagaatcatatatatctataaaataatttatttgtgtataatgtatgtattgtataaaatacaatccataaatgaacgcggttttatattatagtagaacctctatccaagaatacatttgggaccaagtaaattatattctaattgagaggttataactaaatagagttacaacaagtaaaaaaaaattaaaaaactaaaaaatatcaacgtaacaataataacaataaataatcattaatactatatcataatagatatattttagagtaaatataatattcatacatgtattataatttaaaataaaattattaattttacataaataaatttacaaaatacatgtatatatttttattaagatgtaattattcttatatagaggtatactttggtaataagggacttaaaaaatatataactaattacaatttataagttattcttatatataactggcccaaattgggacttgatttttttataacaaatattagagattattcttgaataaaatattcttaaatagaggttatactgtagtttttattaatatagcggtgtatatatattaaaataataataaaaatcatagattgataaataattctagaaagtaattaaattattgctgattttataagtcacaactcacacagaatatatggaaatttccataacaggttttttagtatatatactttaatatattaatgcagggattttccttgtttctaacctccattaaataaaatggggcactatgtgagatggttaactaaaggaagagagagagaagaattttggtttttgaaataaaatatataagcgaaaaagaaaaagctaaattaaagtatagaaactgttgtttttgaaagcatacaaacaaagtagagaaagtaatgctaaaatatggtgtttatgaaaattaaaactgaaaataataagagaatgtatcttgcaagacataactactcgaaactccccattatggcattaaagacccaactaaccaatccattacattatctaaaaacccttttcaatttcttgaagcaagttatgcttagatcatgatgttttatgcacatatatatacatgtacatactttataaatataaaacattaatttctatgcaattatcgtttgtttgatatgtatacaaatgtgaaataattttctaatttattttagaaaattgtattgaattaattttatatattttaggtagagactacattatcttagattgtgttgttgagttaattattcaaattattattaattacgtacaatataaatgtgtgtgaatcattattcatataattaattttccatatactctatgaggccatatatgtaaagggaaatttcattttttagccttaataatacaacacatatcaaattttataccccttactaatttgtacaaaacaattccactatttttaaattctacccaaaataccccttacatttaattttcccactctctctttctctctctctctctttttccgtttctctctccgtctttccctctcctcttcgtccctaccca

SEQ ID NO: 238014 - DNA, 779 bp, Cannabis indica
aagatcttttagatgcccttgcccaaaactacagccccgagccagatatgccgaagcaccccagggtaagtgtaactccgagcaaacctactgtcgaagctctcgagaaccaggaggtggtccttatagacaaagaagaagaagtagtagttcttcatcttgacaggaagcgtaagggtgtcgtcaccgagccaaagccttcgaagaagatgaagagggctgacacccacgaccttagcactaatttgaggagtccttctaaagttgatgagtatcccgcacctcccaacaatattctaactcctgctcacccggacaaagaaagggttcaactccgcattgccaagcataattatactgtgggggaattatccaggggagacactgaagcggaggccccaaagaagaggctgagggaggcccaatatgggccttttcaaggcgaatatgctggggacattctgggacttaaatttggatcccttgacggactggtttaaacgcttcgtggggcctaatttggctttgttagcctcataaatggtgagtcattttttactgattttgacccaacttcccaccaagagatatgcggcatgcacttcttccaaccccgtataccagatcccaaaacatgagcattgccttgactgcagtaagtgaaaatcttctacgtctcttatatgcttttattttcacagttctaaccttatcttttatgattgctagattgtcgcagaggccgatcagctttctaagactttgattgatcaaggatt

SEQ ID NO: 238015 - DNA, 711 bp, Cannabis indica
tcagcagcactatgaacagtaaaaggatactttaacagtatgaaatgagcgtatctactcaatctatacaccactgtaccattacaatgtccatttcgagggaatagggcaatccttttataaaatctatagtcaattcatcctaaaccagcgagggtaatgctataagttgcaataaacccgtagaagaagtattcatagtcttctggcacacttcacattcttaaacctaatcagccaccatttttttcatgcccacccaataaaatcagaagcattcttacgaaaagttttattctcacctgaatgtccacccaaatgagagttgtggtattctcaaaaaatagtaggaataagtgagctatctttggacaacatcaaacgccctttgtacattaattttccatgctccaaagaaaactcagctgccctcgacttcccctgctgcaaatcagtaaccattcttgtcaaaaataaattttgttgcaccgctacccagttaataccttgaaaacaagaagatttgtaaagttaactagttggttaacccatgataatgcattagcaactttgtgtccctcccttagcttgtattgaatctcaaaattgtattctacgagcttagtcatctaatgttggtattatgggggtaacattacattgtttgagattaagttggggagaccgatttgcaaaaaaaaaaaaaaaaaa

SEQ ID NO: 238016 - DNA, 1248 bp, Cannabis indica
ccaaccgttctttagttttatcccttagacggttattgctgatgtggaaggttacatctcgcctgacatgagttttcccctttgtccatcttaaggaaaaatactaagtgttgggaagtagttcgtctcgtcatattcttttattgatatcaacaatgcgaggtgaccttctcgctatgtgtaatgtgaggcagttatgttgctacatttattctactcgagtggatgaatatctctttcttgtttgtatatttcgatgcaggcatacatctcattaatctcagctcaatagttattatccttgtctccctcttgaccatatagtcaatgagttttgaatattagttatcaaacctctacgtaataataacgagttatttagtatgcaattgaagatataatattattatatctttagagttgattgatattccgtttgtagaacacgtgtcaacttctggagtacagtcaaattttgggtataacagtttctataccacttggtggcttttctcacttggttttgacatgttgatgatgaaaaagtacttttggcaaaaattctcatccgcatttgatgtggccgaccactgccactctttgtgccacaaaggtggtagtggtcggctaggcttgttcctttgtgaaaaatagtttctttcacttgtgttgcactcctgggtgttgagggaacacattttgacaagtctcttttggtatttagtgagtggcgagaggtgccatcttcttgtggcagtgctctccaaaaaattggagagcactaccatcttcatgtggcagtggtcgcataggctatgttgcatgagattcttgtacaattttgactttatgttcaagccgaagtctttttatgcctaaataagttaagttcttgttgatttccttgtcggattgatatctctagggtaaaaacgctcgcgcgagctcataaatccaatatgggcacacttgggcgtgtgagtcccgacattggtcaatatttttgtgtctcctagacgtgctatgaggctctcaagaatgatgtcttaacttattgtcaaagtctcaagattgattttttttttttaattttcaaaatcgagtataataaatattattcaaaatatttatgatatataatttgaatatcataataaatatcaactaaaaatatgtaacaatttgtacctacttttaaatattttcaggtatataaatactttaaaattttaaatttagatttttttt

SEQ ID NO: 238017 - DNA, 889 bp, Cannabis indica
aaaaaaaaaaaaaaaaacgtcaccctgaggggtttgagaacatgcatggccgagcactaaccatttagccatgtcagtgctcgcaactggtaagttcttcaagtaaatatcacactaaactaaaaacaaatgaacaaagacaaacaaattaagccttaaaattttattcacaccacaccaccatgacttgcaagactcaatttttgtaaaactagattttcaatccaattgctccaacaactaaccttaacattcagattagaaaaaagaatatgactgataattgaaaataaataattaaaaatcaccatacatgcacgaatcaatccaaataatttcacaaaccaattataaataagcttgcatcatttaaccttctccactaattttaataacatgcacaaaatgttttctcaactatgttggatggccctccaaaagagtattagggacgtctgtgcagaccttgtatgtccacgcggctagaagattctgcctctagtctctatttagctcccaaataaatctaatgtacccctctgtattgatccggatgaggtagtggtgatgttgtacggtaggttttggagatcaactagatcctcccactcagaaaagctagaagaagatgaattttcacttgaagacgatggtgactttgcctggagtcttggttgatcttcaaagagtcttgggagggcacgtgggattagatacgggtcacccaaacgagcaacctaaagacaagaagttcacgcacgaaaaactatttccacgcagacttaggggcaaatgttagcccaatttctacacaggatgacgtggcattcaatagggtgacatgtcaaaaacatatgaagatcgagacgggctatacttgctcgatgtt

SEQ ID NO: 238018 - DNA, 1051 bp, Cannabis indica
agcacaatttctagaaaaatacacacaactcaattataatatccctaacttctttcttgaaaaactttctaatgcccccagcatcaagcgttgtagcaacacatgacaatcgtgagacttcataccagaaatcatgtcttcagtctcattgacattcttctctaaatttgaagcgaatccgtccgggaactgcacaaacttaataaatccgcaaaattcacatcgttcaggaagagtaagtgtgtaactagcatgcagtttcctcaaattcccattacggtcttcaaataaccacaactcacgacgtattttcaggtcctccaaatccaatcttgcgttgtctgtgtccttagacttgccctcgatacttaacaaagttccaagtacactgtcacacacatttttctcaatatgcatgcattacgtcaagattatgtcagagagaagtccttccaatactctagctcaaaaaatatactcttctttgaccaatttaactcagctacagaacgtttacgtttgactccaccaaattgcttgtattttccacgaaaacgaaattgtaactgctcaagctgagctaaaatatcatcccccgacaattgtggaggaggtggtcttttctcaatttttgcatcgtatgttttacttctacgccttggtttatccatttcaagaaacagtctgtgcccaacacaaccaatcttgctgcgtaatccaatggaaggagtgtgttcgttacaggtggggcacgccttgtaccctttggtgctccaaccagacatcattgcatacgctgggaagtcattaatggtccacagaatagcagctcgcagtgtgaacacagtcccgttgtaagcatctcgagcttggacacctgaatcccacaactctctcaattcatcaatcaatggtctcatgaaaacatccatgtcttttccaagggcagtgcaccctggcaccaaaagagacaacatcaacgactcaagtttcatgcacttccaaggggataagttgtacgggactaaaataacaggccacacactgtaag

SEQ ID NO: 238019 - DNA, 903 bp, Cannabis indica
aggaagcatcttgatgagttcaatcgaataatcttggacctgagtaacattagtgtcaagatagaagatgaagatcaagtaatattactgctcagcacattaccaaagagttatgaacattttgtggacacaattctttatggaaaggaatctttgtctatgatagaagtaaaatctgcactaaattccaaggaaattcagaaaagaaatgaagatagatcaaatggctatggtgaaggtttatttgtcagaggcagatcagaaaccagagaaaacaaaggtggatttcacaaatctaatcacaagaacaagcagtacaagggttcaaatcagtcacacaagtcaaagtccaattcaaaggcagggaaacaatgctactactgtaagaaagagggccatttcagggatgaatgcagggcactaaaagctaaactacaaagagacaaaagtaaagacagagggatgctggtgtggtaactgatggctatgaatcagctgatgttttggttgtatctagccaagaatcaggtgattcatggatacttgactcagggtgctcatttcacatgacaccaagaagagacctgttcaatagtttcaagaaattagatggtggatcagtcttattgggtgataataaggcatgcaagattgttggaataggaacagtgaggctaaagctacatgatgatcaaatcagaagcatacaggaagtcaggtatgttccagatttaaagagaaatttactttccattggtgaattgattgagaagggtcataccataaagattgatagttctttcaaagtcatgaaaggctctttaattgtcatgaaaggggaacttaagaatgggatttattatcttaaaggaaagaccatcagtggtgaaaagaccgcttagt

SEQ ID NO: 238020 - DNA, 1504 bp, Cannabis indica
gtatagtattgtgttagattatactgtatgttagtattatttaatacaatattgtgtttgatatagacttgtactaataggttgtgtaaaattataaattcttaacaataaactcgatctcaatccccaccatggcttagactcggacccaaatacggacccagaccctggacccgaaacatgccttaaacttgggacctggacccaaaccctagactcgaaccccagactcagactcgaactcggacccagacccagacccgaacccggactcaaacctcaaacccaaacttggcccctaacctggaccccaacaaagacttcaaacactggacccggatccgatcccggaccccaacaccgaccccaaacttggatctgggtcccaaacttggaacttgaaccggagtttgaggtctaaggtcctggttcaagttcgtgtccaggtcttggttcgggtccgtatttcaggtcgttgttcaggtccaggatccaggtctaggtccaaggtctagggttggggttggggccggaattaactccaaaccctttgtaaatattacaatataagttaataaattaaataatacgatctactaaacaagctttagaaatattaaataaaatttattgaaaaggaagatttgttatatttttatttttattttttatttgggaatttaaaaaattagaaataggaaaataaaagaaagaaaaagtatggagttaccatttttctaatcaaccaaaaaaaatcgcccaataattaattttttatacttatctagagaatttttttaatctatcaatttctatgttcgaataaaataaatctttatatattaaaagtgcttatctaacggcaatggttggtttaacggattttttttttttaattttcgttagttttaacaagccgtcttttccctgttacttctaatcgtgactaagttaaaagtctcatctaaccctaaactcttttaaaccaaacacaagcaaaccctgctctcacttctctttcttcacgatattataacaagcctccaattcaagaacaaggcttgaattgcataaagctttaaaaatctttatatattcctgaatcgtaaccatcggtgattgactctctttgccaatcatctggtaagcattatatttatattttttttttgtatatgtatagttatatgcatgttttatttttcatattgttcaaacccaattgggtcgttctgccattaaagcttctactcccaaagcataaaaatttggcttctctttcattgaggtatactgtaacacgacgtgttagaacttctatttctggcaatgtagggattccttggaatggggtgagatcttgccagaatttccgatattgccgagcttttcgatcaattctctgatgacgatactgtcgtttgagatgttcggtaactataagactatcttggagggtgttgcggcgactgctaagctcggcgacaatgggaataagagagtt

SEQ ID NO: 238021 - DNA, 933 bp, Cannabis indica
ttttttatcttcttcatcttcatcacaaatgaggaaataggtactttcgaagaagaaagaacacttctggggtgccaaaagcaaggcccagcgcctaggttgacattttgtcaacctgggacgaaatgtcaacctgggacgattccgatgatgttttttgagaactctttcgagcatcttctcatttttttagaaaagattgagattcaactatttacggggaccaagcaaaacttttgaagggccaaaagggggacccagctcccaggttgacatattgtcaacctaggctgtttttaatcaagttctcaaaatagtgtttcgggcattttttctatcataaaaaataatgaagatttaagaaaattcagggagaaaacaaaaaacccgagcccctaaaaataaggctcagcacccaggttgatctagttatgggcccatcgccgaggttgacaatcaacctggtgcactggtttcgatcatccaaatgcaaaatctgattcgatcaatgaatctgaaatggtcaaaaatagggtaggagacctcgtcctcaagttcaagaacattggaagtatcaaaatgacatcccaataactcgagaatgagtacccaacccccaggttgacaaatggcctggtgcactgggttcagcttatctgattctgattccgtgtcaaccatccatctagtttttcataataactaagatccataaagttagagaagttaaattcacaactttgcatttctcattttgaacatgggaaacccactcgaaaataaaaagtttcgagtctctcacttctatagaacaccaacatctccgagaattggtgaccagctttgtcagaacacggaaacagattaagtgatgtcaaaatatcacttaggtcaaagttcatgttgggttttatgccctaaataaaactcttt

SEQ ID NO: 238022 - DNA, 1900 bp, Cannabis indica
agtgtattcctctgcctcaggcgaaaagagtccgagctgacggccaaagtgtccttcctcctagactttttagaagactcagcctccaccatcttgcccttgtgcttctggtccagcgaggccgtgatctcaccttcctcctcctcctcctcgacctctccttcctcgtcgatcaagacgattttgcctaaggggacacttgaagatgacctccccggggtcaccgtctgggtgggcgccagaggaagagaagggtctgggctgtaggtttcggcaagagtcgccaagaggtcttccattggcctggctgcttcaaaaagaaataaacaaagtgttagaatggccataagaaagtatgcacatgaaaacaaaacggtaaagctagtcctaccctgactatctaactcagccctagcaaagtcttgagctacaatactggcttcatcatccccaagaaagctgtgtgaggggagaaaccagctggaagatagataagctgagtgatctagagggatgggtgcgggaggtacgaaacccatccgggaccggcctaaaaaatgacctaagtggagaaagtcttagcatgctggaggaacagctgggtaggagcggtacagagaagaggaggaatcctaacccactccgtgagaagctccaacggtccacggcttggaagctggaagagaagaagaagcgatcggtattcctttacattcttttgaaaatgaaaagggatcgggccctcattagaaggatgggcccggagagtgaaaaactcgtctttaaacttgtccccctttttggggacagatacaagttcacaaaaatataaaatttcagccgggctaggtgaaacccagcctttggctacataaaaaataaataagcccaagagcaggcgataagcttgtggaattagttggtaaggcgcgaggccgacaaaaaaaagaaagttaataaaataatcttgaagggggagcatggccccggacatgagatgggtctggctccaggccccaaaccccctgtagttgtgattaggcgtctcctaatcccgaggtaggcggtgaaagaccccagacacggatggcttaataccagccacggtcacaatcttctccagttggtgagcgcaaatcaaggtggagcgaagctcgtccacctcctagctgttggcacgggaagtgtagctctcttaggcaacagggcccttcatgacttcctccagggtggccagagtggccgcccccttcttagaagactttgttccagaggcaggagaagacattcttattctgaaaaataaaagaaggaatccagcagttaggccccaaaccaaaccctaatgttaaaaaagggaatgggggtcccttaactgctggaaagaggcccccttcggatgtttgccaaaaatggaaacccaaaggactttccttagcaaacaacgggtgcaaaaatcccaaaggcagcgaaagcagaggaaaagtgaaagaaaaaaaaacgtgcagaaggtggaaacaaaagtcgccccatgccctaaaaatgaaggaaaataacaaagacttgaataaggaagattacacacattacgcaacagattcagtcagagttacttcccaaaaattcagcattcaaccaagaaattctatcctatcgtgcaaacaaacagtagacaagcacaaagtatccagaaagcttacatgaaggatgagaactgggggtcggcgttgatctacggtataacgaggactgacaacggcggaggaagagcagcaagaaatctatggtgtttgaaattttttctctccaaagtgttcttgagaaaatatgacaaaacggtgaaagtaaccaaatgaaaggaaaaggctggcttttataggccagaacgggtgtgaagcag

SEQ ID NO: 238023 - DNA, 3754 bp, Cannabis indica
cccccaccaatccttttcctcaaacccgctttaacaacgtcccgtgcagcaaagatactactccaaacaaaacttggatttgacctaagctccgcagatagataatccccttgtggataatatctcgctttatagactttccccaccatagaatcatgacgaaaaaataatctccaaccttgcttaccaagcatagcaagattaaaatcccgcaaacaccgaaagcccataccacctttaaacttatgttttgtcattctatcccaattcatccagatgataccacttccactaccagaagagttgttagatttccaccaaaacctagccatcatcttctcaagttctttgcaagttccaactggaaataagaagacattcatagcgtatgagggaagtgattgaaccactgacttaatgagaatctctttcccagcccgagagagaaatttaccctcccaactattgatcctcttcctcatcttctctttaaggaagcccaagacagcatttttgttgcgacccacaatactagggagacccaaatacatgctatccaccccagcttcttgaatacgcatcaaactgcagatacgacttcttgtaaccgtactcgtattggaactgaagaaagctgaagatttatggagattaactttctgacccgaggcgtcttcaaaaaaacgaaggagagaaagaacatgattggcttcttcatcagtggcttgacaataaatgtaactatcatctgcaaaaagaagatgagatatggtaggtgcgcttctatccactttacaataggttagccatcgggacgactcataagaccttatcaaggatgagaacccttccgcacagacaatgaacaagtacggagataaaggacatccttggcggattcctctggttggagtaatcggccccaatttttggccactatgaataacatgatatataaccaagtttacgtagcttaaaaccaagccaatccatcgagtactgaatcccatcacccgtagtatggcctccaagaaaccccactcaacacggtcataagccttgctcatgtcaagtttaagtgccatgtatcccttctttccactagtcttccttttcagatagtgcatgacttcgaaagccaccatgatgttgtctgaaattaaccttcccgccacaaacgcactttgagtttctgagatagcaaagtttaggacattcttcattctattggcaactacttttgaggcaattttatagatgacattacaaagcgagattggtctaagatcacccatttgagaaggatttttcttcttcgggataagaacaatattagtgtcatttatggagtccgggaactggcccgaatcaaagaaatcccgaacaaacttgaccacatctaccccaactattccccaatgcttttggtaaaaagctggtgtcataccatcgggcctcgatgacttatcaggatgcatttgaaagagggcgtttctaacttcttcctcagaaattattctcaagagatcttcattctgctcacggctaacagttggccgaataccatccaagaccaatcccaagttaacactgcaagtagagaacaaatcatggaaatagctagtaataacattagccatgcccgactcccaattaacccactctccattgctatcttgaagacgggaaatactgttattcctctttctggaattagcaattgagtgaaaatacttactattcttatcacccgagtttagccagaattgcttagatctttgcttccaaaagatttctttttgagccaacacctctgccaacttatccttcccttctttgtgttgttggatagaaataggatctttgccccatttagaattacggatttgactcttgcattcacttatgcgctttcggaaattccctgttatgtcccgtccccatctccccaagacttcaccacaatgatgaattttctcttgaatagtgactaaacccgaacccctccaacaaccctcaacaagctgctcacacaaaggttcccgaagccaagcattctcaaaacgaaaagaatgaaaagaaacaagaggagtgttacctttaaagattagcaacaaagggaaatggtcatttgttgagaactccaagttgagtaatgacgaatgtggaaacattgatagccaagagttggtgacgagagctttgtcaagtctttcttcaatccactcaatactatttctccctttctcccaagtgaacgggtaaccaacaaggggcatgtccatcaagttgcaatcgtccaaggccttaagaaacccctcaatgagtcgatcggggtacttccttcctcctttcttctcaaaatgagacctcagattattcatatctcccaatagacaccaaggaagatgactatcatttttaagtgaacgaaaaagatcccaagtttgagaccggagttctctttttggctctccataaatgccagtgaaacgccaaggaggcagccccaccatttgaaccgtggcatctatatgatgaaaagagaagccttgaatgacaacttcactcgcttctttccaaagcagagcaagcccaccgctgtgaccacgagcttccaccacaaaacaactttcaaagcccatttgggctcttaaactttccaaactagacttattgcataatgtttcacaaagaaataacaaattgtgcttcttttgagacacaaggtcccttaagaattgtgtggcccgcaggttcccaagcccgcggcaattccagcttaacaactcattactcttggtgggcctggaaaccagagcccaccaacccattttttgaaagcctcaagccatcttgctccatatcatcttctgtagccgaaacttcactcatacgtgggcccccaaagtttcctaaagtggaatcaggcctccttctctttaagtcaaccattgtggtaatagtagagtcaaaaaagtttccattactattgacatttaaagtcaaatcttcctcaattattccttgtgtcatcttgctgatattacgcccatcttttggcacagtatcattaaatttatcattgccatgattcttgcctatcaactccccaataatctccactgatctaggaccagaattaacaccctgtgcagagctgcttccctgagtttcacgcaccgccgcaccagacctgagccactgtgctccaaaggtcgactgtctcctctgcgtctgagccttctgctccaatccgtaaggcttctcatgcaggtgtaacggcttcaagaacaacctgggacagaacttctccgagtgcccgattatcccgcatatgaaacaaaaagttgggattttttcatacttgaaattagcccaataccaagaaaggttgtcgatacttatcttcattcgtcgtttgataggtttattaacattcagtcggactctcacgcgaagataatcccgccaaactcccacaaaattattaggatccgattcaatgaacgtaccaataaagtttccaagagccatcacaacactaagagtcatatttcccatttgtaagttatgtatttagcacccacatatcaagattgtttatttcgaccagccttgggttatctccttccttcaacctagtgaaaatgaaaggtgtacgatcgtatgtccacggactcccatcaattaccctttgtatatcaattgcatgatagaattgaaaaagaaacaagttcgggttaagttcctt

SEQ ID NO: 238024 - DNA, 997 bp, Cannabis indica
tgtacctcaatagatgacaaagcaactaccttttgtaggttagattttcagctaacacatccatctagaactgtgaatgcataaccagtgatggatctccttgtgtctatgcttccagcatattcagaatctacatatccattcacttcaacctcttccttagacttgttgtcatagacaagtcccccatccattgagccttatagatacctaagtatctatttcactatagactagtgttcttttcctagatttgttatgaatctgctaaccatacttagagcataagccaaatcaggccttgttcacaccatgcagtacatgagactaccaacacaagatgcataaggaactacatcaatgtacatcttgtcttcttctgttttgggtgattgactttgtgtcaggggtgtgcttactgcttttgcttcactcatgcaaaacttgtcaatcattttttgtatgtagcttctttgtgagagtgataaactttctggactgtctgtctttatgtcaatcccaagtatcctccttgcctcacctaaatctttcatttcaaacttagcattcaagctctgttttggatcatctatggcctttcttttgttaccaatgatgagaatatcatcaacatataacagtaaccaaattggttcattgttgttctacacacaaggatcatagtcactcttgttatttaagacatcctgtaaaatttagaaaaatttaatacgccgaaaataatgcacttctttaaaagtggtgcactgatatactcctacctgtttcggcattcaggagacttgtttagtctttttttttatggtcatatacattatagttatttaaaacatccctgcaaaattttgaaaaatttaaaaaaatttaacacgccgaaaataaaattcaaactttctgtcgcgtgactcttttatttagagggatacattgtaaagcaccttataattttttttttttgtgtgtaaatttaaatgtg

SEQ ID NO: 238025 - DNA, 821 bp, Cannabis indica
ggcccagcgcccaagttaacatttggcgctagccttgcactcaagttgacattttgtagacttggcccatttaaaatggagttttttaggaattctttcaagcatcttcttcatcttcaaaaaatattgatattcaactatttttagggaccaaacagaatttttgaaggggcgaaactaggacccatcgcccagattgatatttcctcaacctgggctattttcgatcaagttcaaaaaaagtgtttcgggcattttttttgttataaaaaataatgaagattcaagtaaacttggggagaaaatcacaaactgaagtccctagaaaaaggcctagcgctctggttgacttgggactgggcccagcacccaggttgacaatctacctgggacgctaccttcaattgctcaaatgccaaatctgaagtgaccattgaatccaacatggtaaaaaataggggaagacaccctgtcttcaagtttataagccttagaagtataaaaaacagaatcttgagagctggattgaaagggcccagcgcccaggttaacaaatggcttggttcgatgggttctgcttatccgaatctgatgtcgttttgaccgttcgtctagtttttcacaaatacaatgatacatgaagttatagaaatcaaatttacaactttgcatttctcatttccagcactcctgaaaataatgagtttcgagtctcccatatacgcaaaacagtaacatctccgagaactagtgaccagcttcgccaaaacataaaaatggactaagtggtggcaaattatcacttagaattaataaaaaat

SEQ ID NO: 238026 - DNA, 1298 bp, Cannabis indica
tcaagggttataaattgtggtgcctagaagatggacacaagaagtgtttcattagcagagatgtggtgtttaaagagcatgaaatggcaatgaaattttccaacattgatacctgtcaagaaaagcaaagtgttgaaattcaatcaggccaaaatgatgcaaaaattgcagatcaggtggatacatctgcacacacagagaacacagcactgatgaagagctaaggcaagaacaagtgtcttctgagcttcaagattatcaactggtcagagatagagttagaagagatgtaaggccaccagaaagactaggttatgctgactgcgttgcttttgcacttgcaggagctgaagaaattgaaaatagtgaacctaccacctatgctgaagctgtcactggaaagaatagaaagaaatggcttggtgccattaatgatgaaatgagttcacttgaaagaaataagacatggattcgagtacctagacctaaaggacaaaggatcataggctgcaaatggatttttagacacaaagaagggtcgcctggtgaataagttagatacaaagcaaggttagttgctaaggggtttaatcagagagaaggtattgactacaatgatatcttctctccagtggtaaaacaaacttctattagaatcatgatggcaaaggtggctatgtttgatcttgaaatggatcaaatggatgtaaagacagcatttttacatggaaatctagaagagaaaatctacatggaagaacctgagggattcaagaacaaggaggctgaccaagtgtgtttacttcagaaatctctatatggcctgaaacgggcaccgaggcaatggaacctaagattccatgaattcatgttgcaaattggatactcaagaagtgagtatgacccttgtgtttactacaacaagacacctatctggtattactttatgtggatgacatcttgataattggaaaggacagaaaggctatagacatgctgaaagaacaactaagctctgaattcgaaatgaagaaccttggtgaagctaaaaggatactcgggatagatatcaagagacaaagacctggctctgttttcttgtctcagaaaggttacattcaaaaaataattaacaagttttgcatgagtgaggccaagacagtcactactcctcttgcctcacacttcaaacttactcaaaatcaagcaccagacaatgaagaagacatgttatacatggacactgtaccctatgcttcttgtgttgggagtctaatgtattgtatggtctgtactag

SEQ ID NO: 238027 - DNA, 2864 bp, Cannabis indica
aaaaataaatatctataaaaatctctttgtttctaggcaaatatcccacagacattgggaaagttgttatttttgattgaggatttgccaatttgaaatggagtgatgggatgtctcatattggctagaattgcatgaatttggtgacaattataaaaaacatgtgtttggagtgtcaatgctcgcatacaatgtcacatgggctgtggcagtgtcctccaacaacctttcttaaccacattactcaattcccaaatataatatactagactgacttgtgagccgattttggacccgattacatcagaattgagctatggctgtgagacacacttagatctttcttgaaattatatttccaatacaagttggacaaggtcatttgaataaaaattgagagagttatgtctattttactgaaggtagtttatgctgagctagaccagttgctagcactgacatggccaaatggcagtgcttgcccgtgcatgttcacggacccctcggggtgtgttttgacattttttttatggcgagtcatattttgggggtctcgggatccaaaaatctcatttcgacgtctgaaatcctaacgggagaccactgccactaattagagccaaagaatggaagtagtcggtcatggcttatgagatgccatgggtggtatttctcacttgtatttgatacatggatgttgaaaaaaaaaaatttgccaataaatcccctttccttgtgtagtagtcgactactgtcattccagtgtggcagtgcccatcaagtttgatgggcactgccatttccttatggcagtggtcggatagaaccttataaagccttgggtgacttttctcaattttatttgatacataaatgttgaaatacaacttggccaatgaaacccttttcttatgcaagggtcgaccactgccactccattgtggcaatgcccatcaaaattggtgggcactgccatttccttatggaagtggttggccaaatagtttcttaaccacttggtggcttctttcacttggttttaagcattattcgtgatatcatggtgaatttattattttgcttggtcaatctctctcatttatttatatctcatatccatatgttttaggtcatattgtgttaggttctttgactttcttctttgatgttgtagtagatactttagcattttttttttttgcaatgaagagtctatgttgcattttttgttgccatttagggggagcttttagttaaaattttaattttcttagggggtgcatttgttttaggaccatggtttttttagcatggattatgctcaatgaaaagggataaatatttatcctttgtgtaaagtgttgtgtttgttgtttggttgtttaacgtctttaacatcttttttttttacatttgtttagactctgttatattttgatggttgtttttttcttttttttttgtactggtattgttgtcattgaccgaaatttgcaaggggagattgtaagaactaatatttttttgtagttacaaattagggccagttgcgtttggagttcgtggtgttttgtctggggtttataccgttagtgatagtccacgtcaataaagatattttggattttaattattctgatggtaacaactgtctattttggggttcatggtttagctgggtataaacacaacttcttgttattgtgttgactaatctttttgatcggagattacggattacatttctttcttcttgtttcgtctttgtgttccatagcaggtttgaatcttgagtggtgttaatccaaaggtggcgatcagagtttgaagatgttgagttcaggctaaagggatttcagttatgtcttcatcactagatccaaagggagttcagattgaagaaaattgttgaagaaagctcatcattcacacaaggggatgttgtgtctccaaccaagggacttagttggtttgggtatagattctctgtattttctaaaagagtgtattgtttacaatattctttaggtgttgctatttttaagatacatctttgaatatagtgaaagttattaccctggttcgaggaacccaagcactagccggctagaatgagtttctgaggaagatgaagcttataaatttctagtgttgaatcttttattttgtttttatattcaagcataaatcaagataaaattgatccaaatatgaaaaagataagttagacaaaaacttggggtttacaccttccttgaccacaagtgttgcataatgaagccaattaccttcattgtcagcttgagacatcatttgataccataaaacccatgattgatttttcaaattagaggtcagaacctcaacaacatccactctagaatggcgagcgctctgcccaggtgaaattcgcacatccagctagaaaatagaactccaacgcaccctgaaaaaatctatcttcaacgctgatctcctcttccccttttgtatcctattgtttctggtttgaatggagctctacaaggactgtcgtagacaacgaagactgaattgcatacttcaaagaatccaaaataatgttcggtgaatccgtcccatgcttcggtaagtcacgcgtaggcttcagagagggttctttcttctttgctattcaaagagagagaaccattttatatgcctctgttataaaatagtcttttattatatgttgggatcccataaaatttattctcaaaatattacaagttatttcatacaggtcgacctaagcgacaaaatagaatttctatacaattacctgctgaacccaaccctcgtgatctagcttgctcagaacatgtacaagtcatcttcaaaaccct

SEQ ID NO: 238028 - DNA, 999 bp, Cannabis indica
cgactagatccagtaagacgtttcaagttgccatcgatttgacaaagtttaagtgaacaaggtacctggtgaccctaaaatacgatgaaccatgaagatgaggatgccacgtggaaatcccagggctcaacttaggcttagcatcagtgtgtgcgtacaggttaacatttgtgtgccatctcgcatcagttttggttcctatcaacttctcatgagcaatctgcttagccactatttgaaaatacatgagagacatgcctcagctaagttttagacattggatatgagtctacttgaaatgtcactcaggctcccaagttgacatatagtcgatctagtcgcaccgtggctagagtctaggtttccagtgacatacgtggaccccgattcttcaaatacatcaaggaacaatgcaaggacatgatatttcatcaacaatatcctagaggagcccatccataactatgggtgcccaggttgacatttcaacacctgggcaccgatttcgtttcgctaatttatgcccgtgaaattttgataaaattgaaattcattgaccacttttcaccaaaaagaagattaagcatcaacaaaaccgatttcgaagatatcatgcccacctgggcacccaatgcatgtcccgtggcaattatgggcacccaagttgacgtatctcgaccgagggcactcaagatttctttctagagaagtttttttagtcatttcccttattttcatccacgataaagatacaagtgcttttaggaagaaaatgaagccatctaggcccaagatgaaaagttggattcctaggttgacatcaccccaccccgtcactgggcacccataaccaccctgttggtgattctgtcgatccaattgcaattctatctcagccattcttcttgtttttctccaaaaacaagatatgagacttggaattaggagaaaatattgttcaagtagtgagttacctcaggcatcactaggcgtcagtgt

SEQ ID NO: 238029 - DNA, 979 bp, Cannabis indica
acctactcctcgcttccttgtagaacaggcctttatagaataaaagtataaaatttcaagtggggtcgggccctcccacttgagaaggtgatataaagactttaaattggcaaaaattccatatgaatttgatgcctagataattgtcgaattccttgaagtaatctttaagaggtagtacagctccaactcttatatgctcaaggctctaagcgcctatcctagatggcttactggtactacagtctttttctcaaatcactcgttcaggagaaaaacaactgaattcccctacaacgacaaatttgacttagcatccttgttcatatttaatacaacatgattttgatacttcgccaacataagatcctatagatttgactctagactcaatcaattcagcctcaaaggtgactgtagggtcttaaggagtctttgatttgcgtgctttctaagccataattttaaaatctaagtcaccctatgaaaaagaaacagtgaatggaggtaaaaacaatggtctcgctaagggaatatcaattaattttgatgattcaggccaagctgcttctcgcaagtagtgacgtttaccctcaattatctcttgcaaaaattacctatagcgactagaaaattcatcttggctaacttttacgaggtgatccctaattttctcatcatttgccttaagaatggatttgggtctctgaatttcggttgtaaattttatggaagaaatatgatgacaaactgattctaagaattctgggattgtgatctctaaaaagaattgggacacaattaaaacaaataatatcccaatttttggaataacagagcacaagtaaaacccaaaaatttacgaaccgtataacctaagattttctacccctaaagttatccaagcaaatagaataaaaatcacccatacaacataacaatgcagatgaggaaacacaaactaaggaaaagaaattat

SEQ ID NO: 238030 - DNA, 1342 bp, Cannabis indica
aatctcatcagcactaggagtaccaacaaggtcattcaactcctcttgagagagtcgctcatgaatcaactgagagcaattgtaatccagagaagatgtagcctccgtaaagatacctttgaagaaatcaataaactccctcccaataacctctcggccagaaatccaaacattatccttgttcataatactctcgatggcgtttcgccggcctttaatagcagccgaaagaaagaaaaacttagaacacttatccccatctttgagccaagaaatcctggccctttgtttccaatagatcgcttttctttctcttgactcattaaggtcccggcggaccacccgctcctgattccagtcccgagacccagccgggagtctctgcagaaagtcaagcttctgttcaagctctttaatagtcacatcgagcttaccaaattgagatctattccaattcaggagagccaccctggtggcgccaacctttttgaaaattcttgccggagcccaggcatggttaaccgagttccaagcgttggccaccaccagattgcttcttgcatcacgagtccatccttcctcaaattaaggaccttttaaacttggtcgccggaccatccgacataaggcataaaggcctatggtcagaattactagtctgggacgagcaaaggatagctcttgggaataaattgagccaagctccttcactaaacctttatccaaagcagatttcacatgctgcctcccagaccgatggttatcccagatcaagttgtccccttggattggcatgttaataagacccctggtgtccaaaaggttagagatgatcgggataaaagggtcccggccagaagagccttccctttcagaggcattaagaacaaaatttgtatcacccaaaataagccaaggccccccgaatctatctcccagtttcaaaaactcagaccagaattttttcttagcatgaaggtaagggggaccataaacacacgaaagaagccaagggtgggaagcgggatccgaatacactatccccgatatatgattacaagaacacgaaatacattcaaaaataaacccagccttccaagccaagataataccacccgcattgcctctagacgaaacacaggcattaaaataaaaatggagggatttaagagtacgtaccagaggattagcatccaccttaagctcggtaagaaagaaaaaatcaggagctcgagaccagatgagggacttcaattcccgaactgtagaggtctgccctaaccctctacagttccaggcaatgcctctcatggctcctgtggaggagattccacattctcct

SEQ ID NO: 238031 - DNA, 1007 bp, Cannabis indica
aacggatgactttataacaataaagtcccatcttggttaggaagcttgtatgctcttggtcagggacatgcatttttatctggttatatccagagtatgagtccatgaacgacataagctcgtgtccagtagttgcatccactaattggtcaatcttgggtagtggaaagcaatcctttggacacgacttattcaaatttgaaaagtcaatacaagttctccaatttccatttgattttgggacgagaacagggttggatagccacgagggataaaatgccttgcgtataaagtcattaaccaacaacttatccacttcctgcttgagtgccctttgtctctcagaatccaagggtcgtctcttctgtctcttggctgggtaatttgggtcgacattaaagtggtggtagataatcttagggtcaatccctatcatatctgcgtggctccaagcgaagtgatcctagtttgccttaaaaaaacttgttagtttctatttcaattgttcatccaggttcttcccaatgaatacacactttgtgggatttcttggatttagaacaaccacttccaattcctcaataggtttcaataaattcctttcatcttgaatctgaggatcaagatcctcactcttcttctcaccttcttcagttacgactgccattagctggtgaccggccattctattctgcagctctatgcggtagcatttgtgagccagcatttggtcacctcgcactactcccacacctatcggtgtttgaaacttcagggataattaattgaactaattgcccctagtccaattaacactggtcgacccagcaatatgttgtaagccgacaacaagtcgacaactaaaaagtgttgcattattgtggtggataaaggtgctttgcccactattaatgggagcttaattattccttgactggtaacgttgtcacctgtaaatccacacagatttaccatgcaaggttttaatttggctttttcaagtccca

SEQ ID NO: 238032 - DNA, 622 bp, Cannabis indica
attaggccaaacatgagtttaaactgtatatacttgtcttgaagtgagattaactcgtgactcatgtgtgttatgtacgttgtacatataataataataataataataagtaaaggaaattaaatatattttgtgaaattaaattggtaggtgaattgaacatgacggtggacacccatttactagacaagcagacatggggtagctctgacggcggcgtcaatgtcattatctttagatgtaaaattataacataaaaaactttttcaaagaactaataataacaaaagagactttacaaaataaatatctatattttcaactccaacaatcatcctattttattattttgattttgtgtacataatacatatatatattttaatttatactattttttatatggttttatgttgaaaggtgtctctcgactttgtcatatgggaatgtacctccggagttagctgaggcacttgaagtttgtgaggctctaagctggataaaagataaacaatggccacaggtgactttagagaccgattgtttggtggtggtacaagcaattcgtaatccaactcatatgacccctttttttggtaatgtaataaaagagtgtcaaaat

SEQ ID NO: 238033 - DNA, 871 bp, Cannabis indica
aaaacgcaaatgagccttgaggcattttttttcttcttgtaaggcgaggcgtaagcctcgaggcgtaggaggcgtaagcctcaaaaattaatggaatcaatacttttagagcacttaaaaatgaataaacggtcacataaattacacacaccataaaatatctcataaaaataataacataaaatgtctcataaaattcaaacatacgaaaagatatatctcataaaaatcaaactaaaacaaagataattatatttttagaattagaatcctaaattctactatcctagaacacagctgcacaaagcagcgattttttttttgttggttgaagaaattagcagctgcacagctgctgtgaagaagagagagagataggaagaagatagaatcaggggtttttatttttaagttttattttggcttacttaaatattttattagacttttttattaatgtttatgggatatttttaaggattataaggttgggcagcagaaaaataaaataacaatttgggcctttttttcagggctcaaatagcccatttcacattcaaaatttgaggcgcacgcctcttacccctcaacgcctcacgcctcatttcagcgcctcacccattaaggcgtaggcctcttttctcctcagcaaggcgcacgccttggtgcactctttaaacgcctcaacttgaggcacgcctcaaaaacgcctttttggtaatagagcacgatatatatttttttttcctgtgtttctgttgtcaaatttttaattggagtttgtttacagtttttatatcgctttttatgttctctgtttctggcagaaaaaagatatctctatgttgcaaaggattgagatgaaactatt

SEQ ID NO: 238034 - DNA, 514 bp, Cannabis indica
gacacacgaatacaacaggtccacacgagaagacaacgagtcgagttaaggttgagatttcttgacacaaaatatataaagatcaggttaggattgaccaattaacatatcaacttgcataacacgaacacgaatataaaacgataaacaccaattgtcatccctagaaatagaggtactcccaaatcccaattttcccaatagttgttttatttatgggttaagcaattaatactacttaattactttagatcacttgccaaaataaaaaaaaaaatcaactaatctatcatctatcatctattccataaagaatgcacttaactcttttttgtctctttgtgaatttttttctttttctctctttcctaattaattagaagaaaaatgaggtctacagaacacttttagattacatagacaattatgaaagagcattattattggaccccattagtggttagtacattctacttttctagacatgttactttgtgattggttagtgatactc

SEQ ID NO: 238035 - DNA, 1671 bp, Cannabis indica
cctatttataaggcttaacaaatgagtaagagcgttttatactaaggtacagccattgtaccacatataggggtgttcattggatcacatcaaatgtttttaggcctatccagatccaatccaattatatattggatgttaaattttaccatccaattcgacaattaattttagtcatccaatctatccaacatccattggatgttggattggatcggtcttatccattggatgtattttatatatatttattggtttaatttgaatttattcaatattttagactaatattttttggatcgaatcggatcgatccaatattttaggtctaatatgtattagattagactggatccatccaatctaagaaaaaaagagtaaaaatttaatgttaatttttatgtatacatatatattttacgtataacattataaaatctaattactcatccaaactaaacgaaaatgataattagtttaattggatgttggatgtattgaattttaaacactccatccaacattcgatccgatccaattggatattcaaaaataacatccaatcagatccgatcacaattgaatatccaatgtttggcagtcgattgtgattggatcggtcagttgtcattggattgaatcgatttatacacacccctaaccacatacactaagtaccacattgcacgagtgttggtaggatttgtttcgtaccctgagtaccactaagtgatatatcacacacaccctgtactttctcgtacttgtgctagtaacaccgtaatgtactctttaaacaatatagattataccaatgcactctgtaccatttccgtacaagtgttggtagtgtactaatcataacaagcatgcacatatatttcacacatacatatattcgcatatgtatcacatgttccacactattcttacctcatttttgaattcaagtgagttggccgacctgaacggaaagtctcgtactgaatggatgccctaatcacataacataactgggtaaatcacacgtcaaatcctaatctgggaaacccgaatctccaacttaaggttctgttattactaattggaactacaatatcctaagaaacagggaatcacccaaccaagacactgaaatggacacgaatcgaggaaatgaattgttcggggaatctaccaaaaccagttttgcaggtcctgacaaactggttaaccagtttgcaccaggtttccccaaacaattcccaacctactcaaaacatgtccaaatcccaccaaactttcgagaacacctataatgaccttccacaatatattccaagcaacagaattcagaaaaatatccagaaaccaaacatgccattgttgagtcaagtgaactcaaacttgctcaacccaagaattaagctctaaaaccaggtaattcagacctagaacaaccccaatattcattagaaaacaaacaagcacaaacccttacacaaacagaagcaaaatcacaatttcaatatgcttaagctaactaacaacttaaaaaacttcaaaaaaggagatctagaactcttacctttaaatttctctacttgatttcagtcaaaaaccctccaaaaatcaaagaaaagtagctaaaagcttcaagttggtacaaggaaaagctacgaagagagagag

SEQ ID NO: 238036 - DNA, 559 bp, Cannabis indica
agtccgcggcaaagaaagctcttcgagctttggttcacagagaagatccggatgttctgtttcttatggagactaaggttaatagtttgcgtatgaatggtatttggcgcggtttgggttttggtggagcggcggtctcggatgctcttggttcggccgggggtacttgtctttgttggaaggttggtgtggatgttcaaattcttgcagttgaccccggggttactttggccttgtttgctaatgttctccatggcccgaattggtatggcctcttcgtttatgggccccctactccggcggcaagaaaggaattttgggaggaaagaacgattgagattcttgctctgaggcacccttggctcttggtgggtgatcttaattcgattcttagccaagaggagaagtttggtggtcgtgttgtggaggagtccgatggccaggacttgaatgattttctagctatgacaggtggggtggatttgggctgtgctggtaatttctttacctggtctaatggtcgccgcttcaacgagttgattagggagaggttggatcg

SEQ ID NO: 238037 - DNA, 611 bp, Cannabis indica
gatggaatatgactctcgggttgggactgagagtgtatagtggtaggagtgagagaagacacaagtaagggtggaagagtagtaacaggtgcaggtgaatgagtagatggagtgggtcgaacaggtggagttgcaggaagtgaactaagttgagaggcagcaaactgagacaaaactgtaggatgaacaggaggtatagatgaagaagatgtggttgaaacagcggaagtaagagcagcttgagcataaggaaatatggtttcatcaaaaacaacatctcttgaaatatagagcctgccatccttggaaagacacttgtaccctttatgtgaaagactgtatcctagaaaaacacaaggtgtagacctgtaactaagtttgactttgttataaggcctaagattaggatagcaaaggcacccaaatactctaagcatagtgtaatcgggtttagtatgaaataggagttctagaggagtactatagttgagttttggtgtaggcatcctatttattaaaaagacagcagtcctataggcctcatcccaatattttaatggcaaggatgcatgtgcaagaagggttaacccactctccactatgtgtctatg

SEQ ID NO: 238038 - DNA, 787 bp, Cannabis indica
aggttaaactggaagtccattgacaacgctcttgattggttcggcttccctctgaaatttcgtaaatgggttactcaatgcatctccaccacttcgctgaatgtatgccttaatggtggaacagtgggaaagattataccctcttgtgggcttcgccagggtgaccccctctccccctacctcttcatttgtgctgctgaaattctgtcaagacttttggaagaaggcttgaggaagggagacttcaagggcgttaagttaagcaggggagggccggtcctctcgcacttattctttgctgatgacttaattctggttggccgggccaatgtgatggaagccaaaggcttttggaattgtttggaaaagttttgttcctggtcaggtcaacaggtgaacaagctcaaaacgtcaatctttttcagcaagaatactcccaacggaatgaaaagaggcattaaggatgtgttgggtattggctctcaggaaggtgtcattaaatatctgggtctgcctctgtttagatctagacagaaggatgcagatttcaacttcatccttgatagactaacatccaaattacatggatggaaagcaaaaacgctttccaaggcagggcgtgcgaccctgattaaatctgttggtctatcgctaccaatgtatgcaatgcaaaccaccaaactttctgatcgtatggttaaaagaatagatggtcttgtcagagatttttggtggggatttgagaaaggaaaccatggcatgcatctaagagcttgggataaacttt

SEQ ID NO: 238039 - DNA, 832 bp, Cannabis indica
acacacatgttagaaataagtaaagagaagaactccccctacaagcatgcataacttatagcaaacataaaaatgaaactaaaacttaactccccctcaaaataagaaggttcagagttacacaaaacaagatttttgagtatctactctttccttttgtgtctttcaaagctgctaaagttctaaaaacactaaagaaaaaaaacaaatatgacaaacctaagactaaagaaagtatcaatgttcttagaaatggagacaaaaaattaaaggacaaaaaaaattgatattcaaacacctttggaactatagttttgagagagaatacatgtaatttttgaaatatacaaaaaaagaagagaagagagtagttttgacaatgaaaacttagattaattctctcttctcatcactttctttatataggcttctcttaggcagtgacggactaagaatttttactttgtggggacttatttattattaaaaaatatttatacttatattataatcactcttactagatttatttgattttgtgggggcttttctactattttaatctatacttatcaaattaaaaaaattacatttaattttttaaaaggcaatatttttgttagtgtgggctatagcccccatatcaacactactagatccgtccctgctcttagggctggattagatgaaatttggcttaaaatagagacatgggctgatataatacatttaatacaatacttaaaagatcattaattaattcagtttaaattatttcaaccaataaaataattaaaactaaacgaattatgggtttttatatgtcacccta

SEQ ID NO: 238040 - DNA, 1214 bp, Cannabis indica
acttgttcaattggttttggtacaaaagattattatctagtatgaagtattgtcattaactttgctagatgacatttatatgtatactacatatatgaaaattcttagggcatttcttgtttttggtacttagagaaattataaatgttagacataaccatatgacagcgtacattatggttctgaatattttacagtaccaaaaatagatttcaaactgtcaattgacacacttatacttttttttatatatgtagatattggagaatattgttctgcagggattaaatgtaaaaatattgagccatatgtaagaacatgggctactttactcttgaccaattggttttaagatggaatttcatgtttctcaacagtaggcaacatactattttgaactttattttcgactctgttaattattcaaaatttatatgaaaaaaattgaaatgtaattcttttagataacggaaataagaacgtttaggggcaaaaataatgctcttacttaaaaagttccctatatataattttgggaattaaactttaaagtatgagtcttttccatttttttcttgcaaatatcagcctactttcttatgagttaatctggttctagttactttgctttatgatgagacctgtttcagttaggtttaagatgttgaatgtcttatttatgttatgtttatatgacagaacttgaaagaaagaggagcaacttcaatagcacaggaaggaaattcgcgagagatgcagtacgacttagagtcttacgttcatcaaccattatctccccctgatagatacccagtgcccgacactggatcgcatgatgcagatggtggtgctttaccctttcactttcgggatctatcacttgaagagacgaaagattttattgttgtaactcgaaatagtgttgaactgctgtcgactattttgaatagtgaaactgagccaaaacccttgaaggtatttctttttcagcctcttcagcataattcgataagaatatgatgctaagagaaactcttcgatgattgcaggaagaacttacgctgagcatgctggaaaagtgcaaggagtctcagcctgtgattaaaggaatcatagaaagaaccaccgacgatgaaggattgctattcgaagctttgtatcttcacgatgaacttcagcaaataatttccaagtacgaagcattagaagcatct

SEQ ID NO: 238041 - DNA, 670 bp, Cannabis indica
aaaaaaaaacagtaaaaataaaaaaattgacttcaatgattgaaatagtaaatacaaattttattgatagagattaaaaaaaaattaaaatactaaaatgtgattatgcttttattgcgatttgatcccaattatgctataaaacttaactattatgttaaaacttgtatcatatttataaatatcacttttaattagaaatatatattttgactaattaaaatacatggatccgctcttgaattcaggtagttttgctgttaaaaaaataagtttatgggatttagtgttacaaatcatatagctcaaagaattttgccgctaatatgccaaataaaaattaatacaaataatttttcgagaggcatggtttttttttattattatttaatcgtttatatattagaattatgttttacatggtactcgaaccaggacctccaacacacacttacccacttgagctagtctcaagtggtgtttggggagcatggtttagtatataaataatcatagattagtaaaattgaatgaaattagataaaaatacttagaataaaaaactttaacgattgaaaaattcaaaaaaggtcaaatatctaagccttttatttatttattcatatgcccgtaagcttaaaaaaaagaaaaaaaccttcgaagtttgagc

SEQ ID NO: 238042 - DNA, 1103 bp, Cannabis indica
caggcgatgtgggattgcacaacttacctggtatttccctttacggatcacgggactactgactgtcacactcaggacccggatccgaactcgagacctagacctagactcaagacccggacccggactcgggactcggacctggaacccagacccggacttgggaccttgacctaaatcagggacccggacccaaactcgggacccagacccagaccccggacccaaacccggatcttgacccgagaccaggacccaaacttgaacccgagacctagacccagacccggacgcgagacccagatcgggacctagacttggacccgggatcggacccagacccagacttgagaactgcgacccgagacccggacccgaactcagacccgaaccaagacttgggactcggacctagacccggacttagacttggaacctaaacctgaacttggacctaggagccagacctgagcccggatccgcacccggacccggatctggacctagacccacgacccggaccctagacccgagacccacgacctagacccgggtcccgagactcgtgacccaggacttgaacccgaactcgtagtctgtgttgggtcgagtatattgaaaatataatataactttacacaatctattaatacaagtcaatatcaaatatagtattatattaaataatgctaatacaatacaatacaataaagcatactaacgagtccaaaaagtacaaaggtagaatgacttgggcaatcaatttaaattagttaattttaatgttcgaaaaaaataaattaaggttaaatttcttaaaaaaatatatatgagataatccaaacctcattttgtgataatttatttgttaaattgagatcttagtcaaattgatcaactaatttgtctctgaacttaataagccggccttactcagttactccatttgtacttattatagtaaactatatatactatgcataattggtaattaaaattagttatttatggaaataaataattgattctaaaaatattatatagctaactaattaattattagtcgtcgttagacaaaggtgttaacatagttcactaatcat

SEQ ID NO: 238043 - DNA, 1042 bp, Cannabis indica
aatgttttctaattggtgctttatagcgaataatgcctggcataaaggaggtcgaatagttgtggcttggaatcccctgagttttatggtggatattttgtggtgctctagcccattaatacatctgtctattactactgtggacaaaaggaataagtttcttgtcacttttgtctatggttttaataaggaagaagagaggagaagactttgggatgaactagttgggctaaaaacgaatgacccttggattgtgcttggtgattttaatgatattttagagaagggtgaaaggattggcaaataggcacattatagtcctactgcttttaaaaattgtgtattggattgtcaattggaggatgtgaaatttggtggaagctactttacatggagtaacaagaaacaaggggatgataggattttttcaaagatagatagagttttggcgaatcaaagctggctaggaatgtatccatatgctgaagcaatttttactgcagaagggttatttgatcacactcccgcaatattgacggtgtatccttcgcctccaagtggtaggaagccatttaaatattttcgaatgtggtctagttaccttcaatatcatgagcaaattgctgaagtatggtccaaaccagtcattggtaccaaaatgtttcaaatagtaaagaagttacgaagccttaaaccggtgctgactgcaatcaacaaatagggattttccaatgtatatagtgatgagttgaaggctaaagattggatgattaaatgtcaaaagaatctagcaaatgatcctctaaactctgaattgcaaaatcaagagaaagaggctcgggaatttatgcagagaaacataaggtgttgtcatctttctgcaacaaaaagctaaggctaatggttaaagaaggtgatctaacactgcttttttccacttaagtattagagaaagaagaaagcaaaaaataggaattctctctaattgttgatgctagaggggaaagaaagttgaggagtcaaagataagatcaactccagc

SEQ ID NO: 238044 - DNA, 869 bp, Cannabis indica
ccacaaaatcctccaatttttgcagctctgttaattattgggaattagatttgtatttgttctatcagagaaggcggcattagatttagatttgtctttgtctctgtgtttgtccctaatagcaaagtttaaaactgcggggctattgcgcgccttgaggcgcccctcgctttgaggtggaaaaaattctccctattgcccacccctcagtagggggaagaaaggcgtacgcctcagccgtgtgaggtgtggctcgaagtggcctgaggtgtgaaaatttggtgagggcctcagaaaacacaattttttggggctttttaaccaaaatgatgttactaacttaaaatagaccagtaaagttcttatttagtttaaaaaagcccaagaaaacttaagtttaaaaaagtcaaataaaactcaaacaaataaagtccaataaaaacacaatacacataatatatcatttagggtgttttagtaatccaaccgttctccccaattccccctcatctctcagtcgacttcttcacggatagaacaaaaacaaaataaaaatggatgctgaaatttctagaatagtagaatctacgattttaattaatgaaataaaaattatccttatttatgtttgagttttattagacatgtatgttatgtttgagttttatgagatattttgtttcccctattctccctgatcctcagttgacttcacgaacaggataaaaacgaaaaaaaaaatggatgctgaaatttttagaatagtagaatctacgattctagttctgaaaccaaagttatctttatttaagtttgagttttatgagaaatttatgttatgtttgtgttttatgagacatttcatttat

SEQ ID NO: 238045 - DNA, 1009 bp, Cannabis indica
aatacaactacataggcacacccatatattcccatacccacatggccatatattttaaggtagtaattatttgaagaggtgatatattattgttagtgtaatttaatatgaaattttatatattttaatttaataaatagtataaaaaattaataacaacccataacgcaccacactcaatagtaattagtaaagccattaaatttttcttagggacaaaaaaaattgtaaaaaaaaggcaacattgaaaaaaaatatataatatttattagagagtaaaaaatgtaaattttgtaaggataaaaagaaactgaggataaaattaaaaaaaaaaacaaacattatagggataaaatacgattatataggactaaaatgaataagaataattttataggggcaaatgtaaaaatagttaaagttttatacatcaaaatctaatttataagagattgagtggcccacatgaccccatgtggcgtgagcaattccgacactactttggaaaatatgtatgtaaaataaaatatgcatttgcattgtattgtaaattctcaataatatgttaattaatatattgaactataacctttagtaagtttttttccttaaacttttctttgcggcataaaatacttcttgaactttgaaaattattgcaaatattcttttgtagttgcatttagctcatttatttaaacaatttattgatatattactaatgctaatctattctagttcaacaaagtctaataataaattatgaaaatatgtaattatatacgttcttaaaattagtagcttaaaattatatacattctttcatagtatgtaattagtacatttaatgataataaattaaattttaagtaacttaaaattattaaataaattattatcctataattatacatataattcataatcacataaataaattattttaaaaataaacaaaatttaactaaaagaaaatatttacaacaataactataatttttttttttgg

SEQ ID NO: 238046 - DNA, 779 bp, Cannabis indica
ttagagatatgctcatgaagattaatatccatccatcatctaatataggcaatggcttttctatgttgaactttccattcatcatcatctaacttagatggcttctcactacctttaataggtttatacaaatctgtacaattagaacaaatcttccatcaattgcttccaaccagaatattttgataagttcaatttcatcattccatccgggtcatccatttttcaacacacaagaattcaacaccaatcaatcttggctctgataccacttgttaggaaaacttcttgcaattaaccacaatattttcccactttgtatgtcaaaaatgggatacttatcaaataccacaataagaaattattaaatatcaaccaaagcaccacaaacaatataaaatacacaagtcaagcataaaagtgagataccaagatctttacgtggaaaccctatgcggaaaaaaaaaccacgggaccgtagtctgctcaaatcatccactatcaccaaagttcaatcttgggattacaaagttcttctctagtaaaactagaggctcacaataacatcatgagtaaacaatcttggaacatcaatacaatcatcatcttcatctcaaagatgaatacaccaataaaaaaagtttaggtctcaccaagtgggtataatagaagagcaccttagagaggacaatcgtcaaaatggaactggtagatttaaagagcaccttgcaagggttcaccacctaaaatttaaggtaaaatggatgagaatcaaccac

SEQ ID NO: 238047 - DNA, 501 bp, Cannabis indica
tgatttcttcagtaaggaaaagaatgttctatgagtggtgactattatatattgattgaaaggcatagtaagcatcttcaacgacatgtaatttaaaatgaaatggctcaaggaggaggaataaaggaaactatgaatatgaacgtgaatgatatgataatgataatgccataatggtaatggaatggatgatttgtttaaatgagtttgtcattgcacttccaatttcagctactatagacatcacatgaatgacttgctctctaaagtgagttaaaaagcatcttgaatattgaaaactataaaaatgttgtattgctattaacattcagaaaaaacatgtaactctttttttttatagaaaaaaaatatattgatgtataccatgtaactctagtgatactgcataaggtgaactaaattaatttggcacatatatacaaaacaaaatattgatatatgaaaattgaaaattgacttaactagtttaaaagatgtaat

SEQ ID NO: 238048 - DNA, 1221 bp, Cannabis indica
gatctccttgccctgaacccctacacaaccgttttactgctatgtcttgtccattgggaagtctcccctgaattacaccacagttttgaaaattttacacgtgtgacggccatttaatgctagacagtgactataatagttatctacttgaatttttacctgataaaccgcaccaaaaccaccttgtccgagcttgttatcctcagaaaactgatctgtcgcaacgttaatggtttcaaaatcgtacagcaacgactccgcactttcaatttcatcaactggttcgtatgtttttatagcttcatgcatcagaaacgaactaataagttatatgcttcatgagctcatgagaatatatcataatctgtttgtgaaaagtttaagaaattagccctgttattctatttcgcctagacaataggtgtaacgaaatctgatagatttctattgttaatagactgacatttctatagagttatcataaaattaagatatgctccaaaacagagcataaaatatataggtaaagccttttcctaactagaagagtattaattgattttgtcaccacgtaccttgtacatttttctttgacttccttaatctcaaacacacaaggaagaagatgattagtaccacaccggaaaccgtggccacaacagcaatgatcatatttctagacttgtcggtgctcttttgtcctgcaaaacgataaaatttgctctgttaaccgtgtaactcaaacattaaaataatgaaagggaccttcaatctcataattaagtaccaagtcctttcaagctctgttaccttctgtaacattgtttatggtgttattagtcggcgcgggcgtgggcgccgtctggaatggaggtcgcggatcatatggagatccatagaagaggtatttctcataccttacactacaagtggggccaacaactctgcctcctactttcccagaacaacaattgggaataagactgtacacgtagtccaagcagttgatacattgttgctggggcaagtctggggtacactgaacaagtgcataaatggttaaaaagtccggagcctttgtttgtcccgtggcgtacttacgaagagagcctccagaagctgcttcgtttttcaagccatctaatagggtcctaagatcatcaaagtactcttgaacgttagaagatgacacgttcttggggttccacaagtagtttaatg

SEQ ID NO: 238049 - DNA, 821 bp, Cannabis indica
gtatgataagaccttgcaatacaatacaaactttacagccaaaccaaagagatgaatagcccacacatattaaaagttcaaaatcaactaaaacagatagaattatacatggaaaaagtcattaaaacagagaaatagatgtaaaataataaaataaaattgggcagatgttggagtccagggatcaatcactctgttatcacgcgagatgcctatctagtgatatgtgttaattaactggacctgaccaagttaatttcggtccaaagaatatgtatattttgggcaatcatgctactctttttgaattaatcaatcaagccttaggctgcaaaagaaaatcaaaaatatattttcacactagtgataaactagaacgcagaggaggagatggaggttgtccctactccctagtcctttaactacactcacattgctggaaaatgaaaaggaaaatctagactaatagctttgatgatggagaaggaaattctacgagaaagaagctgggatttgtgggcagtgctataatttcttctattggttttggatggaggtcattgttcatgtcaagaaggagctaaggactaaaatcttttttgttcttatggatcaccttaccgataccatgggaaacgtctatcttgaagctatgacatattaaccccaaacctgataatgccatattaatctactttcataattaagccaacgagacatttcaagctagtatacctttctaagctagagtccaaactagcttcataatctttttcttaaccaacttaagcacacatacgatattaattgtatagtgtaat

SEQ ID NO: 238050 - DNA, 1262 bp, Cannabis indica
gattggcagaaggctttgatgaatgatctccaatagtgtagtgtctttccaatcggctttcgtgagtgagaagaagagactgaatggattcaaatgatagatcatcaacgaggctggtgacatgaacgacaacgggatcgtattctggacccaatccattgagaagatgcatgatgagatcactgtcatcaatcggatggccagccgtggacagtgtatcgccaagaaccttgactttgtcgaagtaatctgcaatggataaatttcctttctgaatcaacgagagttgagatttgatttgtagaagtcgtgctttggactgagaggcaaaccgttgttccaaggctctccagagtgtatgagaagtaaagtggttggccagagatccaagaatggattctgccattgatgaccgaagccagctgagaagaagctgatcctttcttttccaggcgatgaattcttgattgagagcaccggtgaccaatctttcaggaggagcaacaccggtgaataacagatcgtcaagtccatggccaattacagtgggaaccacctgagatttccaggcgaggaagttggtgcggtcgagtttgacagtgagagaagagttgagagaattctggaaaggattccagtgttgttggggaaggacattgccggagctttgtccttgattttgagtagcagaacgtggtgggttttcaagaattgaaggatccatatgagacttgcgtcaatggcttcctgataccatgagagaacctatcaatactaagcacacaacagatgacaatgtaaagcaaagtctctaaggcttgtaaaggttaaagccaaagagaagaaaccatttcactatttatagagtgtcagatacagagggaatgaaataacaaactaaagaaacagaacaagtgtgtaactgaattagttacagttaagcacaaacagtaaaaactgaattaactaattaactgaaaaaggtagttggttaacaatatatataatatatatattgttattcatgtgtaacattatttaatctatatttttatcctttgtattatttgtcattgaattgtaattttgttggtttaatatttctattggagcacaacaattttctaacagtaggattaaatttaaagagaagaatgtaacatataaaaaaatatatattttcattctataatgaaacaaaacaatcctgggtctgaaaacctaagagtcaattcgtcatactaacctaacttattgctatc

SEQ ID NO: 238051 - DNA, 490 bp, Cannabis indica
tttatttagggcacaaaacccaatagagacatggtgcgaaaagcattggccatctcaactgcctctggaccaaaaacaacgaagtcgaatgacagcttggtcagggttgtgtagatgtaatcagtaacaacctgatcataagccttctttgcattttctattttggtctcaagatcacgagcaaggttagcattatctccttctaacttcttagccttctcctttgcttgatctttagctttgccaagatcgtcaacctctttttctttggcaacaatgcccaactttgccttcctcatgctttcttgaaaagttgcgtttttcttctttagaagatcgaagtcttcgagacccacgatagaagcccgcgagtaaacgatcatgaattgcaaggccagttcgaccaagcaagacattaggtcctcgaaaggagctccctcaacttttgcaacaaagtcatcactcacaaacttttcctgcagggtcacga

SEQ ID NO: 238052 - DNA, 690 bp, Cannabis indica
ttaattttaattagaggaagtttcttctcaaattcagtacttaaatctttagaaacatcgttcgttgcatccttattgggggaatcaaatttccatctgaacaaaaaacaaaaaataaacggaaaccaattttatcttacaataacaatgaacattgtgaaaactaaataagatcaattttgtcacgcaataacaatgaagattatgaaaataaaatataaatgaaaaacattgaagataactaaaactgatttcttcagttaactaaatgaaaacgaacacacacataataaaatacaaaaatacaaaagaaaaactctaaaaatataattaaaacatcatacaatgcacaacaatattcgaaaaataaaatataagtgtgaaaaccagtttcgaacctaaaaacaaaataacaaaaagaaacttaaaatcaaaatatacaataacatcataaaacagagcaaccccattacaaaactgtaacaccctcactagcctaggagtgttaacgtgattttaaacttgttgtgcagctaggttaatgaaaatcgtgatcaattaaaaatttgcttatttaattaaaacttataatattatatacaaaatatttcgggatcccgtttacaaaatactttacaaaagttcgctaatcatttacaaaatatttgtcgcccaccgactaacaacaaa

SEQ ID NO: 238053 - DNA, 1451 bp, Cannabis indica
aaagtaagtatgcattttttttttctttctaaatatctttttcacatctcatgataaagagtcctcatcactttttgggattttgggtggccatcaatatcataataatactacatctaaagaaattgattattagttggttgtccgattatatataaataaaaattattttgaccatcaattgtttaccttcactctctaaacaacttgttccttaaaatgttaaagtatatcaccataatataagtagttccctgaaaataatgtactcacttctacacccaactaacggataagagcttggttctccaagccaacaatattttctgttgcaggatcaagcgtaagtggcaatggtcgctgatttccccgccttcaagtttctaatggtatattactagcaacaacacgaccttttcttttgggcgatggagctgcctcgcaagttgagagtaccgtactaggatctgatggatctaaaccaccaccatctccgccgtgataagaagctatatcgactgacattatgactctttaaatgtaagattctatgactaaattagtacggatgtaaattaacaaaaacatataattagtttgaattaaaattcacatcatcaaattcaccatttacaaaattattacagaatgtttaaaacatatgtaaactaatagtcactatcacacttatctttcttagaaataatatcgtcttgacatcgatcaactagcagctcgtcaccttcatcatctattatatcatcaacgtcgtcatctacaacattttagtaatatcccaataagtctaatggtaagtaattatgatttataattatattatgaattaatcagacaataagtgggattatgatcctactaatctagtccaacataaatttcaatccccaataagtgagtaaataagcgtaatttataaattacgtagatttatgtagcatgtgtgaataaaaatattttcaggtttggcgaccttggagactcaatcgggggccaaaaatgtcataacgagtttaattattacttttgatgggaatattgtgataagttgatagtgtaagttttggtgtaattaggagtatgtagaatttaacttagcgtcctaaagtatagatttttaaatggctaagaaataataagataattatgaataataaaatttttactaatattattgataattatattattattattattattattattattattattattaatattatattattattattaatatattattatattatatataaaaccacgttaatagttaacagtatatatatatatataagttacaagtttataaactacgaatacgaaacgtaaccctcgtcctcctctttcgacgaaactctctccctcctatattcattttctttgatttttaactcaaaacctagcgatctaagctatggtagtag

SEQ ID NO: 238054 - DNA, 807 bp, Cannabis indica
tattttgtagtcgctgtgcgacttggtttatatgtattttggaatattaaatttaaaagtttgaaaacgtgatgtcggcacttgtaaatattttaatataatataaagtttaatatttattacaaaagttttaatttgacacgtttttcaagaaaattctttgattagcaaagattgcgctgtaattgaaaaaatattgtagcgtgccttagcatttgtgcgttacagtatttatgtatattgctatataaagtttgacccaaataaattgatcattttagtaattgtgggtcattgggtattaaagtgtcatgggctaaatgtgtagataccctaagagatatttctaatttattgaggggctaaattagaaatatttaaaatttataacctacctatgaggttataaattggtagtggtcctcgtgaaacaagagccaatttctattctcatcttttcccatcaagagagaaaattagaaaaccttaagtcttgttttcttggaagatcattacccaaaatcaccacaaatattatctctagaagattgattaagattatcactatctatggattcaggtacgctttcactatttggcttcttctcttttgattaataaaggtattctttagatttatggttatacacttacaattatatgtaatatatttatctataaaatttaatattgttattgagaattttatgagtgataatgaaactaacattttcctcatcgatggtaacctatcttaacgaaaattgatggttaaaactgaaaggttttttaatggagcttaagctt

SEQ ID NO: 238055 - DNA, 1295 bp, Cannabis indica
tgggcaattcttgttgtaaatatctattgaagcagctaatttagcaattgcagaatataacaaacttgaggtactcttgtttgcttcattaatatataataatgaatttactatttgtttgtaataatatttatatatgtgcagggtgctaatttagagcttagggagattataaatgtgctaagtaagatggttggaggattatattttgctcttacgttgcaatgtacggatggaaagtactacgaagttaaggtgttaaaattgggtcccaaaattgatttagaaatgtttaggcctgctaaacattatccaaggccaacaactacaaaaccaactacatcagaagaaaaagaagaggaagaagaagcagcctccgaccagaacaaaggctgtgttggaagcgtttgttagttatttcgattaatattttcttcttcatttgttagttatcactttgatttttttttttcatctttcaattagtttttgttaaactgggtggtaatagtttaggagacacgaattgagttgaagaataatactacttaaactttgaattcataatccaaatcgttatcaacatcggcttgaaatgtattaaacttaataacaagggagaaatgagaaaaaaggagaaagacacgagttcaaacctaagacctttaagatattaattgattgtaatattattactttacactaaaaaaaaaaattaccaccatatataaggaacgatagtggcaaaacttttgatgtagtttgttttgttgcacaaaaatttcggcaaaaaatgattttgtgatatttttacattattttttgctatttttgtcatttaatgttcacttaataatttattaagaaaatataaaataataataatgcaaagataaatataaaatttaataataaaataatataaaaataagtaaattagcatgttaatcaaaatttaataataaaatattaaaaatagcacaattataaatataaaagtatagtatttattgtgatgcaaatttaaaagtgaccaatttttcatgattttgaattttgatcttttttttttgaaaacaatgacgaatatcattgataactaaatattgtcatacaggctaaatgactatatacaacccaaagaataaaataatagaaagtcatctagccagacaagttgttaatccatttgaagagcatgcccaactaatccatgtgcagccacaatggccgaccaatgtacatagatcagggacactccaggataactgaataacaaacttgttacattctct

SEQ ID NO: 238056 - DNA, 895 bp, Cannabis indica
agggcataaaatcccaacagttggcgtgtgagagagagagagccctaatgggcgtgtacaatagagagaaagagagagaagagagagacttagatctgtttggaggctaagtgatttagaggcaacctagagaacttaggttttcatctagaggttaagaggcctaaaccctaggtttacaacttaaatcccttgaaaataggatagttagctagatatttacataagatcaaaattctctaagattctagatgcttctcaacctgtctgttgggcttttagggcccaattctcagcccattcttgatatgcacatgtaggagagtcttgtgggacctacaatgcaattcttggtcggccatggccttgtgctggccaggttggctggccatgatgttgtttcctggcctgaccggccatagggtcggccaaagatgcctggccagctcccgaaagcgagctcgactatcacttgatccctgtttgagtgtcggggtcttcgttggctcggatgctgacttggtcttccttttagtgagctgttttgccacgtagcacaggttctgtccacttaagcatgtcacgtcatgaggtcaaaaattgggataacaattcatatctaaaaaatataattctgtgattatttttctcaaaaaatatcttaatattattatacttaaaaaaaaaaaaaaaaagtattgatattatttgtcttatcatcttatattaaatgtggctatataacataaaatatatctttttaacatttatattcaaatttaatctcattgcgtatatctaaaatattttctattattatttttttactaaaaaaaaaatatttttctattattgtttaaaaataaaaaataaaaaaaatatatgatatttttag

SEQ ID NO: 238057 - DNA, 671 bp, Cannabis indica
actactaacatataacttgaggagtacagattttttacatggatttttagaatttaaaagttgataattaattcatgttcttccccttaaatcaccactaataatgttaaacacaaataacctaattaaaaatttgtatacggttgcagttttacagaatcagcctactaaaattaattggatataatttgtaaagaaataaaataaaaattaattggaatagaaaaagttattaaaattattatttttttaattgttattttttaacacgtagctggttgttatgagaaaagacaaaagaagacgtaacgtaagtgccgcttgaaattataacggtgaaagtagagtctaggtaccttctacaatacacgctattcatacccatgcacttccaaattatttttttatatttaaaataattttttagtttaattttattataattatttaagataatttataaaaatttaaaaatttaaaataagtatttatactactaaaaatagagttcaaactatttatttcacatgcttaaaataaaaagttaacacgtataataatttatttaaattctattttcagcgtgttaaattttttcaaatattttagaatatatcttacttatctacaatatacatggtcatgcatgaaaaaaaataaaagaataaaac

SEQ ID NO: 238058 - DNA, 1324 bp, Cannabis indica
agcactctgccaatagtgcatcatacaccttactcacctaaaaactattaaaaaaattttgaaagtgattttttttttcaaaatttgattctcaattgaaaattgaaaagtaaaaataattttataaaacatgattttgaaaaatattttctcttttttaattttaaaaaataaaaaaatgattaaaaaaaatgttacccaacacagccaaaatatattttttttttcatcacatatggaatagaaacattaattgaagtaaaacaagattatattacctgaaggcccaaattcaaagccaagatacgtacaaaaataaataaattgatagctaatattatataaacatcaaggcacacatagatgtgactctgataccaactgttagaaatttatatgaatactataaagcatgtatgatcgtgtatgaaaagaagaatgaatcgaacatatacattgtataagtaaggatcaaaatacctttaactattaattttttgaacttcaatcacacacaagttttgatttgcaaaagaaaataaaaatttagttagtgtgggtattcgagcctcgaagctctccctcactctcttagatagatttactatatttcacagaatgagtagtgagcttggggaccggtatcctaggggagatactccatcagtatttgcgacacattaattgtcaaaatattttgacaataattcaggaaatgaaattgagtaatgaaaatatttagtaaatcaaaatatgaccataattagagtatttaaaattaataatcaaataatataaatcaaaatcaaatcaaatatttgacttagtaattataaaatattctaatacgaatatattacgttagggatccattttgagaaccatgcaggtcgactactccaagtgggtgtagggttccattttgagagccatcttcaagtaccacctgagcccaaaatgggagtacaaggctgagatgtagggctcgaatttaggagacctagacaatgctattcatagccttaaaggagcatgtaggactcgaattcacgaaaaatattaaactaatttggaaccctacaatgaagaggaaaggctccaactagagtaagataccatgcacaaagtagccctagagtgatgtgtaaggcttaatcaagggagcattctctcatgaacacttcttgaggggatttgtagaagattctagacattccgtaaatgatggataatttaactttctactttaatttagggacatttaaattcaactttaaatctatattttatttatgaatcttatactactattgtaattgatatc

SEQ ID NO: 238059 - DNA, 1157 bp, Cannabis indica
tgggttcaagggccacaaaatattcatttgttagttacgccaataatagtaaggcatatatgctattggatgtggaatccaatgttgtcaatgaatctagagaagtggaatgttttgagaataagttgtatgaggacaactctcaaagctctacacctctatgtaagaatattttctatgaaaataatttcaagcctttacttctaaaaggagatctcaagagtagaatactcctaaagttgtagaacaacccattaaacctaggaaaggtcagagggttagattagagaaaagtctaaataatgatgacatagattctaaagaatttttatccacatggtagaagtagagaagaagtaataaagaaaattcctttaatacttcttattgaggatgatcctaagacttttctagaagccatacaatctagagatagtgcattttggagagaagcagtcgatgatgagatggacttaattctctctaatacacctatgacttggtggatcttccacaaggatccaaagcaattgggtgtaaatgcgtatttagaaagaaataccacactgatggcactatacaaacctttaaagctaggctagtagctaaaggtttaggcaaatggaaagtattgattatttctatacatatgctcatgttgctagaacaactaccataagagtgttgtttgctttgtctttaatacacaacttattttttcatcaaatagatgtcaagacgatattcctaaattgtgacctcaatgaggaggtctatatgtgtaacgccctgatacttaggtgcactatagtgatttttcaattgcagtgcaacctttgctattcaaagggttttccttgaaaatcatgtcaaattaaaactttagatttaattactaaactttataaacttttatacatttatttacaaaagccaggatcccatatttaaacttttacaacattatcaaaatatatttttaatctggtcgcacagcgtctacaaaataaaatctcagatgtcctgagaccgaacactccaggtcgcgtcgccatgacatgtacttacaaacaccatcctagctcagagttcactcctgttcaactttcgcctttcctttacttacacatgaaagtagcaactgtgagtcgacagac

SEQ ID NO: 238060 - DNA, 1262 bp, Cannabis indica
ttaaaaaaaaaattatatatactaataagaaaacgatatgtgggtaataacttgtcatttaatggccaagtacctacagagttctaaaaatataacttatgtattattaccgtcaaaaattaaacttagttatttatttacaacctggaattaaactaagatatttatgccgcaaattactctttattatttaatagtaatactaaaaaaaagcataattatttatgttatcggagaaaaattgacaacacaaaaaacgtgcgagtattcaatacacacacgtgcagaattgcgagtatccacctagagtggtaaatactcaaatatcggcttcgattaaacaaataaaaacagtaaaattataaataagacaagaaattatagtggttcagtcaaagctcggttcgcttagtccattttttggtaataattttaacttagtttatttgatctggattactcttttatattgaaagtaagtgtctgtttaggcttacataactagtcagacacgatcgttatcacattcattatacataataatagcaaaaaatatttaaagaataaatgaaagaatagtttttttaatagaacgaaagaatagttttgaccattctttattaattgtttgaatgtacgcaacttgttaagtcgtacattgactatctatatttcgaacacacgagtgcagactctttggtgttttactcgcatattggactttaggcctataactttggttagataatttaatgtatgtgattaccctaatcgcgtacctgggcattcatccgatgacaacttagaacttacgagattctaatgggttgtttaacacattagtctttcagactaaaacatatgtaaatatgcgatctttatgtgtcgcatgagaaatataatttctcgtcgcatataatcggtatatgcgcgaccagtactgacttctcttggtcctgctttttaactatgttgggcatagtgtgcgattagactttgtctcggtcgaaccttttgttgggttttatgtcctaaaaaaaactcatttcaatataatcagatttacttattaatataggtcagaaataacatttaacgttgcatggttcacacgatttatttcatgattatatgtacataatgtataaattcatctgaaaccctttccacatacttgatcctgtttattgtgccgttaacacattggaaagtaaacatgactatgtgaataaagtttcttagatttatcagacatagggttt

SEQ ID NO: 238061 - DNA, 666 bp, Cannabis indica
cttggcctccttgaactcttggtcggaatagtcaacacccaaaactaaggggcagtcacagaagtcgtaaggtttctcatcttctaaccaccatccaacctcatggaaaagcacaagggcttacctttgacaatcaacttggtcctctacttcctaaacttctagatccccattcggcaacacatcttctccctcaaagttcgactcgaatcattcacgatgcatggccatgagtcaggcaaattttgtgttgcccgggccaattttacaaaaggcctatttagtacgagccagaatccttgagcggaatggatagctctacgcgagatgatctgctatagtaacaacaatctcagccttcactttagggcgaagcgacagttcaggatccgctttgggtagggttataggaatgtttggtcaaactttgtatgtccaattagaaggtaaatactccttccaaccaaagttgtactctctgatgtacctactatacacgtcacctccaatttggtccaggtaaaagtgactttggatggtcaatgtggtttgtttggattcctcactccatacgtcccactcctcaaagctagattaggatttgttagaggaggatgaaggtgatgctcagagtttcggctggtcattgaaaagtaattgtagcaa

SEQ ID NO: 238062 - DNA, 1021 bp, Cannabis indica
tccatgacctgggagggggatcaaaaatttttgaacacttagaaaaacaaacactttatcattatttttgcaatcaagagcctgttcttgacttttgcaactccgattaatgaaacacaaggggagtaggctattatcgacatccggagccaaacatcttgataaatttcgtgtcttttatttacatttattgtaaattctagtgttattaattggatttatcattttgactttggtttaaatctcatttattatgactccgcatcggttggctaaaaatccagtcaatattttggtgctttcattgagagctctagccaaaatcttgaagtttttcactgaaaaaaaatggtgttaacccaaagatctcaagagcgacttgacgaagagatggatagtgcccagaatgttcaatcagcaagtaatcttgttggaaacaatggagaacgccccccgcgttcggggaagagcggcacagccaccaccgctcaaactgctgaccatagagcaattggccaaactgctgccactaggcagacaactgttgggtgtaccagtgccgcagaagatagtgctactgagggtgccactggaaggggtaatacaggaaattttgtcccacctactgacagcataggccaagctcaaactagccgaggccctggcgtctttaggccgcggagtgaaccccatgttgatatcgagggaattggcctcaagatggatcaattaaaagatgtgataatccaaatgcaaggttagttccaaactatgcaccaagagcaaactcaagctcgagcggcattgaccgaaagtcccgctaatcaaaggagagagttcaaatcttggcttgaagatcatgctcgtgagatgagaaggcgccaagacgaccaagactgtcacactcaagaggttgccgatgtaatacgaagctacttcaaccaaaatactcaagggttgggtactgacacccacaatcaacaaatacctcaaacctatcctcaagaagtccctaccctga

SEQ ID NO: 238063 - DNA, 560 bp, Cannabis indica
aaggcgagtaaggatttagtttgggagaatttattaggctatttttagcctaagttttgggtcgattttagagtttttttattctctaatatcactttttggaatggttttatgctttccttccttgattcaggttcccaaggtattaaagtacaaattctatcaagtgacgaaaggacgggacgagctgaaagttgaagaaaattgatgctgaaaatcataaggtagtcacgaccaagctacaccgtagtcgcgactaatttactggttgcgactatggtcacaactatgaagtaggcagaaccattgatttatgaggttgtactatgattatgactaggctttatgtggtcgcgaccataggctacgaatgagatttttgggtagttttgtaatttagccattctgagttgcaaaaacaattttctaaaaaagggtttcgtgttttcaagcaaataattcagaaatagaaccctagaaaacaaagaaggatgcaaaagaagcgagtgtggcgacccgaattaagatcaccaactagttctttcttttctcttttattt

SEQ ID NO: 238064 - DNA, 1770 bp, Cannabis indica
cttagttggtcgaaggaaagagagagaggaaaagcttgatggtgaaatgagtagaattttctaggtttttcatccttttcttttgtttttttttcgaaaaatataagaaagaaatcagattatgatatatataatcccataaaagacaaaagactttactaactatttaaataccaattcaagcctagtcaaaaagtcaaatgttaaaagaaagccaagagtaatttggttattcccaaatcccactaaattcatgacactaccaaagtctaactatgacaccccgatattaacattttaaaacacataaaatgcgactctctaaaggcccaacgtcgctttccacagctcccgagcacaaacacagaaaatgagaaatttacttaaatagcataataaacatatacgaactcaaataaatgcccataatatgtatttttattaataataactaaatctcatatataaaccctaattatttaacaatccaaggtattaatcatatgcggtccttacaattatccccccgttaaaaagatttcgccctcgaaatctgcttgaacaattttggatactgaacccttatatcagtctctagtttcccagtggcttcttccattttactattcctccagaatacttcaaccaacgctatagttttagttcgatgaaccttttccccttcctatttaaaatttgcactggttgctcatcataagataggtccagttgtaattccaatgcctcataactcaagatatgcgctggatcagatatgtatttccttaacatagaaacctgagatacattatgttcacctgaaaacgagggaggtaaggccctctaataagaaatgtgcccgaccttttcaaatatctcaaaaggtccagaaaatctaggactaaacttgcctttcttcccaaagcgtttgattcctttcattgaggacactcgtagaaaacatagtctccaggttgaaatgtaacatcttgacgtttagggtctgcataacttttctgcccgcttacgaagcaagcattcgagatttaatcttatctattgcctcattacttttctggaccaactcaaggcttacatatttccgttcacctgtttcgtcccaatggattggggaacctcatttcccgccatagagaagttcataaggatccattcctatagtactttaatagctaatactataggagaactcaatcagaggcaagtacttgctctttgactctccaaaacccatgacacaagttcgtaataagtcttcaattatatgaatagttcactcagattgccaccgtgttgaatttcacgttagttcccatgaccttctgcaaactcatccggaactttttgaggtaaatttagggtctctatctgaaacgatagacttcagtaccctatgaagacgaacaatttccttcatatacagatcagcatactgatccaccgtataggtcaccttaacggcaagaaatgtgtcgattttataaagcgatctaccatgacccaaaccgagtcgtaccttcccgtggttcaaggcaaaccaactacaaaattcatcgtaatggcttcccatttccattctggaagtgataatggtttgaagtaatcctgcaggtcgttgctgctctgctttaatttgctgacaggttaaacacttagtgacgtagtccaccacatccctcttcatcccataccaccaaaaatagggtttcaagtcttgatacattttggtggttcctggatgcaatgagt

SEQ ID NO: 238065 - DNA, 813 bp, Cannabis indica
aaaaaaaattgtacgagattttaaataactatattattcattttcatataaaaaattaggattgtatatttttagtatagtgaattatttaaaattatataaaagattataataaattctaaataagtgtgataaacataattatattaaaatttagattataattttctcatgtgctaaaccacagaaacaccactaaaattttccaaatatattagttgtatatgaatttctttaccaaatataatcttaaatttttggatggagccaaaatgcattcccttaccacaaattttccaaataaatattagtaattatatatttcttttttatataattttggtgacaaaatctttcccttaaaatattaatatttgtacggccattctcatccaataaaccattgacctctaattagtccttaaacataatcaaaacaacataaacatgtaattcaacccaactaattccaccataattaaatggtattttaatacttttatttcattaaaaaaaaaaggttatattctttacaatatagtatacaactgtgggcccaaacttagagattaaggcccatatactagatctttctgggtattggtggattatgctttactgataagcccaacaacctacacaatggtttcttttcttttagattatttttttttttaattatttgttggcaaaatttttttacatttaatttttggcaaaaattttattatattaacttttttataaatttgaggtgtaaactcaatatcactgttccatactaatttaaattaggatctgagatacgagaat

SEQ ID NO: 238066 - DNA, 1275 bp, Cannabis indica
taagcgtttatatattacaatttgtttgttttacctgggactcgaacccaggacttccaacactcacacacccacctatggccacttgagctagcctcaagtggtttcctcttgaatttgtgccttatcaatagaattttttcctttttcaaaaataaaatataaatatcttactccatacaattctcccaatatatcaatatatctgtaattaactgttagatgtagatgtatgaaattgacatatagtactattgaactaaaacaatttcttgatattgattagaaggaattcaaaattgaaatcacacaaagtgtaaagttgtgaaactattaaaatgagcaccaaattcaactaaaatatttgtttttaccgtataacaatgcacaacatgataaaaaaaataattagcatttttgtccactaaatttttgacactaacagttacacaattatgtcccttttattaggttctgtttcttttatggttaaaaattagtatttttacaattcctaaactttgactaatgcaaaattttacccccactttattaaaaaaaataattttaaaaattataatattttattaattctaaataaaaaataatagtaaaatattaaaaaacattataaatatattaaattaattaaaaaatattaattttacttaaaaaaaattaaattattcctaaaaaatattttcatgctttactgtatttataaacatgtatcttaaaaactcaaaccaaaattattgaaattctaataaataatttaaataaactaagatttttttaatgaaaacatcaaacttatttatattcataaactcatatcttaacaaataaagaaaaataattaaaaattcaataaaaatataaattattttgaaaaaaagttaaaaattaaagtaaaaaaatgttatgtttacttaaataaatctacattttgtgagaaaaataaaatagactcaagtttgtttttcgtaaaatttagtttttacaaaaattgaatttataatatattttcttaatgtctaaatgaattttttaataaaaaataaattaattttttttttaatttcttaattagttttaaaattttaatttcttttttaattttcttaatcattcaaaatagttttttctaagttcttaattaatttttaggattcgccaaaaaaaaatgttgaatctttctctttttattttgaggggtatgattaatagttgttgaatctttctctttttattttgaggggtacgatttaatag

SEQ ID NO: 238067 - DNA, 870 bp, Cannabis indica
gatcttgggttaattgttaatttatctaacatatatatatatatatatataaaagagaagtatgagacggtgacgtggagttctaaaatgggttaaaacatgttcatccattttcttattttttttcttaattatttaaaacttatttatctcttttctaattattttttaattattaaaaacctatttatttattttcttattttttttaattatatatctttttatttttctaatttttaaaataaaatacaataaatttttttaaaaactttataaatatctaacaactaagttttaaaaaaattaaaaatttaaaaaatctatctatatacaattaaaattcactcaatatagtcttatctaattctctcgattaaaattaataaaaaaaaaatttatatacaattttaaatcaaaagtctctcaattaaaattaataaaaaaaatttatatacaattttaaatcaaaactattaaaactaacactaaatttaattgtatctcaaatcaaatacttattaattgtgtaatttaagaattaatttaaaaaaaaaaccctaaaaataatctgtataaaaatcaaataataaaatatcaatatatatagtctcttataaatttgttgactattattttaaaagttttggtactatattctcacagttctttctcttttctgtttataattatataataagttttattcacttttatcaattatttttgtagatctctattttaatttaatcttttattaccttagattatttgacaataactcttctttttctttcggttttagattacaaaatatataatgtttttgtttcacaaatttgtcaaatttttttttgaaatctttattct

SEQ ID NO: 238068 - DNA, 6456 bp, Cannabis indica
catgaaaaaaaaaaatattttagtttcatattctgttattctaatattcgaaccaaacaataaattattatagaatggaggttgtttggttggaggtaatgaaatggaatggaatagaaaagaaacaatctcaattccattcttttgtttggttacatattaaagggttgaaatggtctttctaccattttagtagaatgacaattctattttgaaatagaaagaaaaatctttcgaatatatgatgagaaaaaatttaataacttttttatcaattttttttaatgcattttaaaatttattctattcctttcttattcctatgttttcattcctcccaaccaaacgccaactaagttattctattctcattccaccattttccaaccaaccaaatgcctttattatcttatatcaagtcatcgataatgttattaagacaaaaacgaaacaataaattaataaatggataaagaatttcttctccagtaaaattaaacatcaagtttttttgtagactccaataagtccaaacaattgaacttgcaatttaagtagatatgcacatcgttccacatgcagttaaaaaagagaggcaaacctgttgtcttccagaaagtatttagccttatatagattatgaccaaatataattgattactagtttctgaaaatgaatcacaatacaacccaaaacatggatggcctgcttaaataacttagagcacatcaagccctaatcctattttgtacaaaaagtatcaagagtttcttttaaatccttcaactgggagtatctacttgtaaaacagatttcgagttatcccacaaagcaaatatccaaatgggcaaatctaactcaaatccttcaagccaaacaaacgctagcacttgtcctccaaatcactctgaaaccgctgaccgatttcgtctcgtaataactctagatattcctgcacaagttaaaatcacagcaaaaagttcaattatcaccatagaataaacatggactatactaggaatgtcaatggggcgggtcggatctgatccgactctgatctgatccgactcggatagttaaaatcattactgatccgaaacattcggatagtcactatacacacttatcactattcaaaatattcaaccaaaatcaaaggctacttactttaacaaggctctcgttgctgcacagctcatcaacaagtccttcagggccattttcaactccagataacctaagtgagttttcaactagtgaatgaaaaatgtcttccggttcactcatgttttcaatcttttcagtcactgattgaaggtcatcctaaaacaaagtagataaatgaaggtaaaataacagtttactcttaataaaagaaaaagtactcacaaatacagataatgacacaaataaagagcctgtaatagaattttgaagcagaaaaattattgccaatatgaaactcttaaacgagatccagatgccttgacatattttacttctgtgaacgtaacatcgaaagtgcactgccattaatttgagtgtacaaaaaactgatgatcaataccgaaaactatattacacattttgtacttgggtgtgagaatggtctagggttcaatcctccaattgtatcctattttccacgtaattttgtaaatccataccacttttcttcttccatttgtttcatttttattttctttggaatcatacttcaaattctttgttctttgattcgtaatttcagttcattcatatttaactcaaaatttcaaaattaaaaacgaaagagaaatacttgtcaaaattcctagataacactagtgacaaaaaaagaagactccaagtttgtacttgtagaagataatttcagaatcagactaatgaagtataacattcagaaagcagaataagatacccacgctagaaacttctaataagacttgaagtagcatacaaacctgcaaatactggtcattgttttcatttccgcttaaattcctttgattgtactgtggcaatgcttggggctccgcaacagagactggttgtggagcagtagaccctgtacttccaagggctcgagacacaatgggcatcatctgttgaaacatccttgaaaaatcaagtccaccaccttggcctcccagtcctgtaaacatgttcccaacatcctgaccgtcaacctgctgagcaatttgatttactacatttctcatttgtgggctttgtgtgaactgctgcaacatattcctcaaggcatctggagaccccacaccagtttgctcagaaacgccagacagcataccattcagagcaggactttgcagaacctgagacataacagtagcaagatcatcttggccagcagaacctacgccgcccaaaggttcaccatctctggccagctgaaccacagaggaaggatgtcctgagacctgttggtcggttctcatttgttgactttgattagcagaagtactagttgtgccactgtctacactttgggccagtgattttagtggctgagtgcgggcacgtctctgatttattcatttaaaaaacaaaaaaaaaagaataaactaagcaatctaattgtagcttaatgacagcagatattcaatatgaagatctaaataggataatctaaaacagtttacccatgaaattagcaaagcaaactattgtagcagccaagtacaacacatactttaacaaagctagctctataagtttagtacaccagcaattatgtgtagcacaatataaaaaagaaaaagaaaataaatgatttagttccacttatattatatggccaattacaattacaattacaaataaagaaggatttatttaccttgcgttccaaacctccaagtcctaatccaagaggaacaactttagaagcatcattcccatctgccttctcaatgtcccttggacaattttctttatgaacttctacattcttctccattcttcgtccacttgcagaactctgatgttctgtatcgacgtgtgtcaaatcctcttttaaatcagaaacaacacctgcatcctgaaaataccaatttgattgttctcaggttagggttatggctagtccaaacccaaatacgcctcaaatgaaatcaaataaatgaaggtttcgatccagcatgcaaagtgtacctcacgggcttgttctggtatacacccaggcaacgagacattggattctccatctacattaactgctggtgaatcagaatgctcattctctgcatcacgactaccagagggaatatgtgaattctgattatttggatcttcttgacctgaaggcgaaaataatcagccagggaccatacgtttttctttttctttttctccaagtgaatattattttattctagttagcaatatgagctatgaagttcagctacctgactgaaccaggttatctccttgcatgttaccaaccaaatttctaatttgcgaatttacttctgctaaaagagaggacagtgaatcagtgttagtagcttgctgtgaagcagatgcacttgaaggagaaaaaacagtggcaggaaatacaacaccaggcaatgcagcaccagaggagcgtggagggacagcagcagcaattatatttcttacaggtatcacacgtgatgcacctgaatcaacagaaacagttccactgcggcgatctccctgcagcccatctccatttgcaccccgtgtaccaactgcagaaacaattggcagaaccaagaaaatctcatcacaagcactaaaagattacagaactgggtctacatgatgggcaatcaaattttgtcttaccagcatgtatatgaatgttaacatttctcggggcattaccaatgccagcagaacctaaggtcatgggattcaattgaggggcaaacccgctgaagagagagcttgtttgaaggggaaaaggctgcagtataaaaatagaacaatcatgtttcatttttttagaaggtgaagagctaataataacaaccagaactggtttctcacacaaaaaattgtccatttgttgaaactatgggtgtggaaacaatctaaatcataagaacaatgtcaagctggcaaacccaagcaatagaaaagcatagatgccaacatatatcttaattctccacttcacaactgattctaaatatctaaaaccagaggacttttatgaacaacatccaactcacaagtgcttcttaatctggacactatccgacaccactattatcaattattcactttacaatacgccaaagaaatctgtttttactatgtcatcaagagatggtgtaagcgagggaaaaacaaagaatacaattctgaatctttagcatgacctaaaaagacaaaaggaagatggtaacccactctcactacaggcaagcattaacaaacctgaaccattatagggttaggtcctgatggagaaatataaacagcaggtccagcatttacaatagattctgcctgcatgatagaaaacatcaaattaaataactattactcagatataaaaaacaggaagaagttataagcccatacaggagtctgccccatccgcaaagtcaaaacagtacgaccaagctcaagaagaagagtgcctaaatgttgcattacaactcccactcgcatagactctgtctggatttgacccctcacagtaggatcagtagattctctctcctgctccaagcgccctgcaatatgctacaaggttgcagcaaattacaacaacacaaatcagaaacaaactaaatgggtatgtagcatataatgcaatctacattttagcaaatgagacaaaagattaagtggcattagatattaatatgctacaaggttgcagcaaattacaataacagaaatcagaaacaacataaatgggtatgatctccgttttagcaaatgagtggcgttagacactgttcttaatgaaaaagaagcatgacgaaatcacccatactatatataattttttgaaactaggatcctcacctaaccctacaatatttggagactaggaaactatagcaattgttatgtgtaggtacaaggagaggatataacctcaaaagttgtgggagcaaaccacatgcctaaccatttgagcccccgtgggtatttccttacttttatacaagtcataataattaaaaatgaactaaaatcaagttggatttaaatcaaaatttgaaaaatgtaatgcaaaatgcttattacagataatgcagcaactgcatgagtgctcaacagccgttctgcttgacgtagaacaatgcccaatgcttctggtgtatgtaaaccctgggcattggaaggtaagtcgacccttggtagatctccagtactgattggagatgagtttggctggtaacctacatttacatgaaaagtcatttcgtgctattatttttttattttatttttagtatgagaagaatataataatagttgttctagattaatcaccagtttgcgacaaagtctgctccatgcgattcataaactccgaaagagtagtcaaggagcctggaattggctgagaagaaaaggagatgtgagtagtagtcacagttaaaatgcattacacagctaaatatcaacaagaataataccgtgtttagtgaaggaatgggcactgatgcagtagcaatagggatttgcagaacttgaggcatagattgaaatggatgagtcgaaaatgcctgcccaggcggcggttggtttcctgcttggttctgaccaccaacattgacatgaatcccttctgatccatttccttgagcagtaccaggattatttgactgtagataacaaaagaaacaatggagcaataagtaccgcatatgtgagacatttgcactattttgttaaactcatcaaatccattcaaggactcaattactttgtctatactgccacatttacaaacatttcttcaagaagaagatatgacaatgctgaaagattttataataataataataagactaatatggacagtaggtaaaaaacataaattgcaaattggatagtagggagaaagaaaagaaataaatatatcataacaatacactgattttcgtttttttttttttttgtaaaaagtaacacatcacaaattaacagcatcagacacccataatcatgaattttattaagaacatttatgctcaccatactattagactgtgcagtgccagcaacattggccatagcctggttctgggtttccaacaccaatagaattcagaactgccccaattacctaaaggaacagcaacattgaatactgagctcctaggaccgaatgaaaaatcctttgaataaaaattaaatattagatgctgaacaataaatacacccacccgactaaggtcaggaaccatcccttcaccttgatccccaacattaaatgtccc

SEQ ID NO: 238069 - DNA, 2251 bp, Cannabis indica
cgtgtccaagtccaaaattggggctggagtcggagtctgtgtcctaacgtccagattggggttggagtccaaaaatattgattaagaaaaaaaaaactgtttaaacaaaattttacaagtgatttttttttttcaaaatttttaaaatttaaatttttaattaaaaaattaaaagtgtaagtagttttataaaacagatttttgaaaaatatttttacttttttaattaaaaattaaaaaattaattaaaaaagtattactaattacacccacaattattaaatcttattataaacactacaaattactcatacacgagtaatgtgtgagacaaaacacacaactttttctttttccataaaatcacaacaaacataagatttatagtggaacaatacttttgttcttcttaatctttctcactccaaatccaaccatcttcatttctaaaaaaatatcctaatcccagtctcatagttttaacaaagtatatatatgtgaatgggaggaaggaagtgtgtactgtgtacagtagaaaacaatgcacatgagttttggcaggctgggtgtgggactacacgtataacaacagctaagctaataatggtcaagtactctgcatgtcaataatgttaccatttattaatattgatttcatcattaccacaaaagcattcaattaaaaagaattatgaagtttttattttcttcaaatattcgcaattatttctaatgcattaatatttcaaaacattattttgtgtgaatcattaatatatgtattttgagggaatcattaattaagattgtttaaaaataaaatgtggcttaaatatggaaaggttcgaatccattgggcctcacaatcaatcattgattaactgaattttccttccaacagaacctacgtgaccccactcaactgctcacttcacctcaccccttcacttcactctttccttttgagtttaattgagcccactaatctttttataattatactataggaataaaaagttgtgggtatgcttttagtcccaccaatacaattacttttgtgatattttgaaaaaaattcaattcaaatttttatataatagtatagaattttagtaaaattaacccttgctgcaatctcgaatattcagcctcttcctatctatggctgatgcatatgttaagaaaaattagtagagtgctctattacatatcatattttctccaattattttaatatacaggacactaaataatttccccaattatcattaatattatttgaactacattttgggaaagaatattattataacatagattattgccaacaacaatattctattatttataaaaatcttttcgctttgactgtcaacgggatacctcacattgccaagtccaatggtcccaccatttacaaagtaaaaaatatatttaacataatctcatcctgactcgacattatccaccgtccacgtatcttgttgtcggttattgcacattaatttatggacctaaaatttttgggcatgaccaaattttttattttactttcctgtttttttttattaaggaaaaaagaagaagaaaaaaaaaatcttacgacatgacctgcgaaacccatccccacgtttttcatccattgacaagtcaaacacctactccaccagcaccttctatcttctttttattctttttttttatggaaaacaattatgtttaaatggttaatgatctatttttatatataagatttaattctaccagttaattatatattttcgttattagatgaagaatgattgatggccacacatacaattaagctataataaaaaaatcagtaggtacttagaaataatccaacgtataacttgactcattaattttacacttaataaacaaaaagaaaaaagaaatacagccttgtataatgttgatgctggtacgtacatggtcacattctagctaagttctctcaatttaaatatattataatttatctacttcatgctacaatgacgaattgtctatatatgctttaattaatgtttttctggaatcaacagaaacaaaattagaacatatatatagaaggactttaatattatatttatagatcaggcagtatatatgtacatgtatactaaataaatatacgtacaaactcttttcacttacccatcctaacaccaagaagggcgtgtttttggtatcgctgcttggggatcgaagggtcagccatgtgtgt

SEQ ID NO: 238070 - DNA, 903 bp, Cannabis indica
atgacctaaacatataatcaaatgaagagatgaagaagaaggtaatattaattctggaaatttatcctcttattattaacaaattttcccattcaaaagtactagtacaataatgtgcatccatgatcaagtctttgatttgcaagagaaataaataccaaaataaaaatcaaaatactagtactatatattgggtttttgattccaacctgctcagctgcaaaactgctcccgcctattatttataatttatttaatacggagtaggagcagtagaaataggtgattgaggaacaagttttgattcaatcatcttagaacgtaaagagtctttattccaaggataacaactatacaaagcacccgaatcgtactctattttacatggtccactgtcaatgacaaaccacaaacacggtgtagggtacacacatgtaggtgtatcaggagtgaaaacatcaaaccagtggaactcgttttcccatctaaacccacaaaagaagagagtcgtctgaaaaatattgcgcaagaaagtgaaagaaaaactctcgttgaagttgagaattcgaataccaagatcatcgtctttcgatttgcagtgaacttttagttgaactttttcctccaagttgtttcttatctcaactacttctatttggttgtaaggagaggaacttggtgtttgaagaccatcacatgcataagaagataacaatgtcaccataattagacatggaattatcatcttcaaaattagctcaacaacattagtactactcatgactattattttgatttttttttagtagtgtgttcttgatcatgatatataatattatctatttcttctttttatatatatagcataaattaaaaaaaaaaacgttttttttctagtctaac

SEQ ID NO: 238071 - DNA, 1479 bp, Cannabis indica
aaaaaaaaaaaaaactcagccaccataaacacacacaacaaaataaggcagtgtttattgaatgagtacctcctttaagcggatgcatcaactcgatgagtcaataaattcaagcaagcatttccatgaatccatgagcctctgacgagcctaacataaaaaaatcaccctaaatattgggatcaaaatgataaagcgaccgaaacgacttgtcgtttaggttgtaacgtatgagttttccagccatatgaaaaaccaagaatgagtcctcggccttttctgctacgacaatggccaatactctaaaaacactaaacaattcagatgaggtggggactttcgtcaccgaacaactgattgccactgcatcgaaattgaatctatacttgagaatccatcctgacaagtcatgattcatctcgtaaacaaagtactttgtataatcaataccctttttacaactgcagagtacatgaaaatttcttcgagaggccccaataaactcaatacgaacactaagaaagtctccattttcagggcctgcaaactttcgtactcgctcaatttcgagttcaaagcacaaaagggtattttcagaaccggttttccaaaatattacaccattacagaagaccccaccattgaaatcgacacattcgtcttcctcaaagggtgttttaccggtaaagcgcttccaagaggttgtttgggatgagaaaatgtcaattacgaaatggaatttgtgtctcgaacgtcgaaccccaataactttgtagtgaggcgatgttagaggatcataagcaagaaccatgccgaagattcgactgtaaaagcgtccgtcttgatttgggagaaggtcgaagctgttttcaaggttggtgatgatgggattataaacgtagtaattctttgagcgtttctccggggaatagccgcaacacagcaataaaccgcaacaggattgtagaattttaattccttggaaatatagaatcttgttgcatagaaaggaattagttttgtcaagaggaaggatttcgtatagtgaagtgtgatgagaatgaggattaataagcaaaagaagagctgagattgtgagtgaatgattacgacggtggcagaaatctgggatggaaatgagagagagccaagttctgctgacgcatttgaatctcagcaaggatttgactgggagacgaataaggatttcagtgatgaggtctgtgttgttctcaactcttgtggctgaatcatttggcgtaaggattctagtcgaatgcatcttttgagttttgaaaaactgcttcttcctctacccttgagttgggttgcatttgcatgtgttagaattttgactttgaattctaattaagctgttttatatatcccatcattttagttgtattttgacataatttagcagttggtttggtaacacttatgttttctaattttttaatcataaaataaaaataaaat

SEQ ID NO: 238072 - DNA, 1080 bp, Cannabis indica
ttgctataaatatataatattatcagttcccatatcaaaccaacaagtgtaatcatatcatatgttcatggctgctcgttctaaattttttaccattatttgttctcctaataattacaataataataattccctctgaaagtaagagttcttattatcccccaatgtggaaaactgattacgaaggtgattttcattacacatgtctaacatgttgtttggactccaatggatcacccaaacacaattctaccattacagttgtacaagtcgaaaagatcacaaaagctcttagagaattcggaggctatgatttcatggcgacaattctcgaaagaaatcttcaatctgttcaaacctattgcgacgaattcctattcttcgttgatcgtcaaaatagattcaccatttatggtaacaatgctatcactctctttgttccgcccgacaaagccatcggattcaaagagtggaacaattttgattatcaaattgttatgtcaaaggttgataaggaaaccttatccaaaggatcaactctagttccggctagtgttaagcaaaatcttattgtggatgaagtacgtgatgatggaactgttataatcaatagagtaaaggttaatcattggaatatttacaatgatggtcatgtcattgtgcatggcacagagaatttcttcaatcaccattggggtaatttttttcttttttaaaaattgttacattaagatcattttttttataaatataataattatttcttattttattttttatgcagggaaaagaaaaatgcttttattaactaaacaggataatatattcaattatggactagaaatgtttgaagatccacaaaataaaggctctttaatcactgacaaaatgttaatgaaagggtctttgttcattaatattatcgctggaaaggaggaaagagttgttaatttaacttctattcatgtaaatttatgaaattatttcccaaactatttagcgcttagaaactattttaagatagaagagaaaattttattttcctcatatcaaaaatagacctattgttaagggaatttt

SEQ ID NO: 238073 - DNA, 497 bp, Cannabis indica
aatttcaatccccaaaaaaaatcaactctgccgggaggaatttcatatcgtaacatatctttcacgactaattattttttttttggaagaacgactaattaattttttttttgaaacagaattcaatcaaagataattaccttacaaaaagaaaattgaacagcactaaccctttttcaaaacaaaaaacacttgaaaacaaattacacacgtatattctagtcaaaactttccgctttttaaacaaatctcgtaagtctcgcccacacctcattactatttttgtatacttatttctctttctccaatttgcttttatttttggcttggccaccagatcaatgacaggtctctcttccatcttctggatgcttggtgggattaattgaataagttttgctttgttgatatcatttgtgattttaggaatatgtcttctttagcttattaaagtttttcattttgtattactgttgtcatataattctgtattggta

SEQ ID NO: 238074 - DNA, 608 bp, Cannabis indica
atatgtgaagacccaacctaagcccactaattattgtattgttaaaacttgacacttttttttttcatatttattttcaaggcttatggtatttttgacaagatgtgctcaagctttgttgtatttgtgatagtttaacaatttagtgatagtccaaaccgcaaaattccgcataaaccgcaccgcactgcaacattttttgcagtttttagtttcgcggtgtgggtgcgatttgaaaaattttaaacaccccatgtgcgagttggtttgaaaaaatagtcaaaaaccgcaccatccgcaccacgaacacccctactgatagtggtacccctttgtgaaatgtggcctggaccaatctcggaatattttttgccactagtcacaatgaattcatactactaagacgtgaataagagatttgtttcgtgttgaaattaattaaaatggccccctaattcaataattgaaaatattcttctttttagggtaaattttaacaagcttttccttactcttacaatcgttagtgttctgttaaaatttcaccctacacatctccaaaaatcgtaaaatttcacggagacgacgccaagaccgttgtgcatcac

SEQ ID NO: 238075 - DNA, 1884 bp, Cannabis indica
ctaaaccctaaacccaaacctggacacgggcccaaacccatacccaaaccgagattggaactcaggacgaggacccagaccaagatccagacccaaacctagacccaaactcaagacctaaacccggaccaaaacccagaccaaaacctggttcgtgacctagacctcgactgggccccggtttgggaccccgacctggacccaaatagggacttggactcattctggacccagacccaaactaacacctgaaaccgtactgggacctagactcagacccaaacttgagattcaaacccgaacctgaacttttacctagaccaggacctaagatctagacctagatgggggacttgggccccaaacccgaacatggacacaaattttgacaaatgattcggatcatgattgaggacatggactagaaactaggcaccgaaactgggatgaagacccaaaactcgaccccaaacttgagagacgggacccaaccctaaacccagaaacaaggacttgaccatcaggacacaaccccgaactcggacgcaatcctaaacttaggacccatcccgagacccaggacccgaactagaacaagaccaggacccgaactaagactcggacaaaaactagtcccaaacccaaacttggacccgaatccgtaccctgtgaccaaaaatttgaaccgaaactggaagtagaccgggacccgagaatgggactggaaccgtaaccagaacttggacttagacctagaatcctaaccggacttaaacctagacccaaaactgtaaccggaccaggtgccagactccaaccaagacctagacccgaatcgggacccaaacctagatcccaactcatacctagactcagtgctgaacctagaccaaaactcagacctaaacatggaaccagactcaaaattgtggccgggacatagaaccccaccccagtctcggtcccgaaccaaaactgggacttgggacccaggaccttaaccggaactagaccgggacaggtgaccgggactagatcagggacgcaaaccaggacccgaactcggaccaggacccaaacgcggaccctgacctagaatcaagagatggaactggaacctgaacaagaactgcaaaaccaggacccttgaataagactaggactgtgaccaggactgggagcgagagccggaccttgacctagacctgggactcgagcccaaaaacaatcctgtacccagactgcgagcgagagccggaccttgacctagaccagggacccgatccaagacctagaatcggacctagatagggatccggatacgaacctagactcgaacccagacccagacgcaggtcgggatcgaaactcgggacctagatcaatacggaaaccctgaccaagacccagacctggacctgcacctaagaccaaaacttggacctggacccgaacccagacccagacctgaacccagactcggacctagaatcaaaccaagactcagaccccaaccaggcccggacccaaactcaaactcagacactgaatcgaaatcaaaactgggactaggacccaaacccgaacatggacccagatcaggacctaggacccggaccatgaccggtcctcagaacccagacccagatccgaacacaggactcagactcaaacttggaccatgtctcaaacccaaatccttacgtagaccgagattggaaaccaaactgggactcaaaccttaacctaggacatggaccgggacacggacatcagaattgggaccgagacccaagacctgaccctagacccagaccctaacctaggacatggatcgggacctgggacctggaactaatctgggacccgagagtgtgatccaga

SEQ ID NO: 238076 - DNA, 706 bp, Cannabis indica
agataaatatggactcatcaattgtatctgctcgtgttggagccaagcatagtagccttattcttcaaagaaaaaggaatggtttggaagttctacctagagtttctcaagaagaacagagccacacaatacttatggttgatgcaacagtattgaataatacaagttcagtcgacttatgggctattatattttcagaagataaaaaggtgagaccagcaatatgcaagcctctcaaaggttagacagttctttaaggcaaattttttcgatttgtataagcctttaaattttctagctttaagttttaaacagtattagactcattttacatggtgtggatttatgtttgaacaatattacgtcttgattaacatgttcagttggcatggaggttattatattttaattgctaaaagggtgaaatcagttttatgctaacctcttaaagattagacagtggaataactttaaagcaaaccttttgttgtgtacaagattttaaaatattttttagcttcaagtttgagtagtatttggtgttgttttatataatgtggataggcgtttttagaaagattaattagccattgataatatagttttgagcgcatttgtattaggctttgatgtgtcaagccttatactgttctccttttgagaaaaatattttgtattgagtgtttatggtttctttcactagcca

SEQ ID NO: 238077 - DNA, 772 bp, Cannabis indica
acaaaaaaaatgagttgaaatagataagtattatttaattattactttctatagtaaaacattgaaacgactaagtcttgttactaaatcaagttaggtttttccaataatttagaaagaccaatccaattaggtaaaactaaaaaaacgtttattgctttattaagctaatattaatattctttagaagaataaataaataaagaaataaggttgttaaagttaaaccttttacatcaattaaaatcattcattgaatattaaattttttttctttttgttttttatttttgtttttattatgtcctaatataaaaattcttcaaaataagatacaaacttaaaacattttatttatttatttttcataattccaaggactaaatgcaatgcactaccttcctcatgcttggtacgtagactgaatttttatttatttattcatttaattttgaacaaaatataataataataataaatatctttaagcaaaataatatcccaaacaatatctatggtaatttttaaatcaaagattcgataatctaattaaaatattaaagaaaaaaaaacaacaacttgcattagattttttgtaaaagaaaaattaatgacaatatagtacaaacaaacccaacatgatcaagatcattacaaccctttgatcaaattcattgcattaaatatattataatctataagtaataatatttgcactaaaattatgtcttgatataatagtttattttgactaatcatatttattttttag

SEQ ID NO: 238078 - DNA, 949 bp, Cannabis indica
aagttccctaagagtgagaactttgaaaatccaactctttgtcactatgcactgttctctaacaatgtcttggcagcattagttgttgtcaactcaactgtcatgaatgccaatgtggcctaaattatttttcacactctaccttattcagttgcatatagttttgctttctcaagattgaaaattgaagctacttttatcatttggttctgggtttcgttcataatttgttactggtatttaatttctgagggtgtctggtgtctacttttggcaccatgtgtagaagctatttagtattatagcttaggcatgccagggtatataaactttattttctttaatatttccatatattcatgagttgaaacacagtggttcatgaaacccagttaatttagtgtctttttttttaaatagatttttctcttttttttttttttttgtttaaatatgaatttgaattaggatttattttttttattaaataaatatacatttgttttctatttaaaagttatttgaattttatttaaattactgttattttttttattttttttgaagcagctagatatttttagttatgcttataaatatcaccatgaattaagaaaacagttttaattgtacaagcttttatacgcattcttttctcttggacttgcctctatcagttgaggcaagtaaacttctgttatttttatcaataaagtctggatattagaccaacattcctccaggcttaacctcctaatgctccacactttaccgtccttcttcctcagcagagctattataacttggtattcatccttattaataagtatagttaatttctctttatcacggtaatcaatcatatcacaaatattagtcatgcttgtttgtttgtaataagtacctttaacattgcttaatctagtgtaagtgttagtatatttttttt

SEQ ID NO: 238079 - DNA, 1230 bp, Cannabis indica
aacataaataatactcttgatatcgaacctaaccatgttaggattaagatcatttcatataggatctcaactagttgatattaaattgaatagatattacggtaaatttctcatatctaatccaagttcaatatcaatcccttctaatgcatactccatgcatccaacccaagctttactttgactaatgcccttaaacctagaaaagaaccgagacctggaccaaaaattgggaaagggacctgggcaatggaactaggaccgagacttagtacccgaccccaaacctggacttgaacctaggacccagctcgtgactagacacccaatatggaaccagaccaggcctcgagatcgggatctggatctcgaccgggggcttggaccgaacccatagtaagtctttggatatgggccccgaacccaaacccagaccaggacctgaacccaaaccttgacctaaacccagtcccagatccaaaccaagaccagaaccgtaccctgcgacccaaaattagaaccaaaattacaagtagaccagcacctgcgaacgggaccgaaactaggacttggacatggaactgtaaccagacctggacctagacccagaactataacctaaccaggatctggactccaactcatacctagactcgaactcggacctagactcaaatcccaacccagacctggactcaggacccgaacccagacccgaactcaaacccaaacatggaaccggactcgggacatagaactagggctgcaatttaaaccagaccctagtctcgatcctgaacccaaactcgaacctacgacccacgacctaaaccagaactaggtcggacccatgagagggatctaatcttgagtcgagatctgagaaacggaccttggaatagacctgtagttggtgtttggatcttggactcagacgaggacccggacctagaccagggcccaaacaaagacccaaacctagacccgagacccgaaactggtacctgaacaagaactacggaaccaggaccctgggacaagactagtaccgtgaccaggacctggacccaaaattaaaaccaaactcggacctagccctagacccaaattgagatcgaaactcggccttggacacggtcgtatacccagaccgagaacgagacccgaacctggaccttaatctaggcccaaattccaaacacaaactcggaccaagatagggatccggac

SEQ ID NO: 238080 - DNA, 1684 bp, Cannabis indica
agatatgtgaaggagataaagaacgagcagtcggctttaccccaaaatcttcagagaaggtgaaaatcgaggaaccccccattacattcacagaggaagacgaaaagaacgtgagataccctcatgtcgatctgctggtcataaccattcaactcgccaataagaggatcaagagagtgttaatagacaatgggagcttggtaaatataatttataaggagactctaaagaaaatggggctcgaaaatgccaagttaaagccttgtatggtaaatctttgcagattcaccgaggatagcatcgctagccttggcataatctagatcgcattaactttaggcgaggcacctttaactgctactgttatgcaaggcttcttgattcttgacctaccttcggtttacaacatactgttgggtcgtcgagcattgatcggactaggggcagtcagtttgatcaagcgtctatctttaacgttccaaacactagatggtgtgggagtgttacgtggcgaccagatgctggcttgcgattgctatcgcatagagttgcagcatagaacaggagaaaacgagaagaaacaggaagatcttgatccccgagttcaagatgtaagaaacctgctaaaaccaattgaagaatgggaacaggttattctcgacctaggaaaccccaccaaatgcgtgtacattgggaagaacctggacaagcagctcaaatagcaattaataagctttttgaaagcgaaccaggatcaattcacctggagttatggggatatgatagggattgaccctaagattatcgaccatcacttaaatattgatccaaattactcgacgaagagacaaaaaaggaagccctatgattccgagaggcaaggggaaataaaacaggaagtctgtctaaatagatcattaggcaaggatattactggccaacgattaataaggacacacatgagtttgtcaagaaatgtgataagggtcaaaggatttcacatatacctcacatactgccaacagaacttagaatgatgaccttgccctacccatttgctatatgggggatcgacctaactggggcgttacccgctgggcaaggaggggaaaagtatgcggtggtagcagttgacttctaatggacggaggctgagcccctcgtctccgtaacctgtaagaaagtccttgactttgtcgtcaagaatattatctgtaggtttggaactcacatgaagatagtatccgataatggaacccaatttgatggcgacctgctcactaaattctacgagaggaataaaattatcaaaagcttctcgtcagtatccaggcctcgggaaaatggacaagtggaagccattaattgaacgctaaaggatactatcaaaatgaagttagatgctgccaaaggcaaatgggtttacaagctacctcaggtgctctgggcccacaaaactacagagaaaacaaccacgggacacactcctttctcgctagcatttggctcggaagcaatactgcttgttgaagtgaacatatcgattcacaaaagagagttttataatcaagaagaaaaccaagatcttttaaaattgtccctggatcgacttgaggaaaaacgagttgagtcacaaatcaccaatgccacataccaacactgagtcacaagatacttcaacaaa

SEQ ID NO: 238081 - DNA, 753 bp, Cannabis indica
aaatacttaattattattgaactaatcaatagaaaaatctagtttattaattctattattacttcactataaatataaaattacactctttgacaatataaaattatatttacataattcttactagtagtccattaatataatcaatataagtagttcgccctctaattattagttcataattagagttggttaaaattactattttaccattctaattatctcttgattccttatgtaccattaattcaatgtgagttaatttataatctaattatagatttggatccaactgttagtactcacaaaagtaacactataagggaactaatattcgatcatttcgaaaagcttggattccattattgtataacatgttcctagccactcatgttattaagctcctaaaataaaagttataagaatcgtattctctgagaaactttaacgagtgaatcaaagaatttaatgaacacaaataggagttcatgtatactcagaattcagactgatctactaaagatcatcattgtgacatggataactctttcatattaaatgacatgttaatgaaagatgttatttacatatcggtccaatcatgtataattaaattatacacatcacctttactacatgtctatccacatatgtaatgcaaatcaaaatcacacccactagagtatagtgtatagtaaactatgttagagattttattacaatggaagataaaccatgatatatacaactcaa

SEQ ID NO: 238082 - DNA, 1045 bp, Cannabis indica
ccgaagatatttgagcagctttccattggtcaagatagcgaaacgcatacgcaacaacgtcttcaaaaatgaaaggtttcttgttccacaccaggttgttcctggctccccacacagcccaacacacggccacaactctgcaatttacagcagcaggattgttgcagaaaaccgcactgcaccagtcaaaaaaaccagcaccaggagcgacagatgtaccgatcccaacacggtcccaacatttgcaaacctctcgacaagtaactaaagcatggagaatagtttcttgttcaatatgacagaccgggcataagggacttacatcaacacgcttagttcgcaattgaaccaccgttggcaagcagttattgcaagctcgccaaaccagattttgcatcttcgaaggaagcttcagctgccacaacttacaccaaaaaacatctccagcatcatcaaaccagttacctttcaacttttgtaaaagagcataggcacttttaacagagaaagtgcccgagttctctttggaccaaactaaatgatcaaaggtttgagtaatgtttagtggaatggctttgatcaaagtacggtctctttcctcaaaaaggtcattcaaaatttcatcatcccaagttagctctcctgatttcataagggagttgacagtagcattgatcaaggacgggtgggaagaaataaccttgggattatcttcatgtggaagccaaggctctccaaggatctgaattcgggtaccatttcccacacaccatcaaattccatgttgcaaaagcgactgagattccaaaatacttctccatacaaaactcgggttcgaacccaattgagcattaagaaaattaccattagggaaataccttgctttgaacaaccaagaggctaaagattgaggacgagtaagcatacgccacccttgtttgccaagaagagataagttgaaatctcgcagattacgaaatcccatgcctcctcctcttttatgaaaacaaagtttgtcccaagccatccagtgaatgcccttgtt

SEQ ID NO: 238083 - DNA, 620 bp, Cannabis indica
aatataaacatgtatgtgtattatttgattgaatacttcaagtatagcaaaagcaaaagattaacaagggaatcaagacatattcttcaaatccctaacaaaaaaaattgttgggctcaaaatccaaaatattgcccaaagagcactaaaaaaaagccccacatatgaaaaatgtaaacagagggaaacgagagacagcttagaatcgatgggtggacgtaggaacaatggtgttcttacttcaaagttctcgggaagaagaaaaaagttacacttttattttattttttaaaattcaagttgattagttaattaagtgaaatgaaacaatttccatgattcttagatttcagcattttcattttttttctaaaaaaaaaaaataataaatctgaaaatagtaattacattttaatgttctacaccccacaaaaatacagtgtatcctaacacttcgacaaattatactgcaatattaaggggtcacaccaatatatccgttttaggggtgtgtactctagaagtgtccaaagttttttattctttttatggtagttttattttttgataaaaaatttgttaataataatatgaaattaaataatataattttattttta

SEQ ID NO: 238084 - DNA, 2710 bp, Cannabis indica
gaagatttattaagaaataacaggcacagcttaagaaaatcatagtaaatccatctgacaacatactccagctcagaccaagcaaaatataagcttatattccactacatcaatagcagtgatcgatcctaaaagaaagaatatgataaactttatccaaatcgattccaaaacagtgctaacattactaaaacagataacccatcatagataaagccctaaagaatacacatcagatccacacacacatgaaaataacctaatacacatcattcagatcacagatctaacaaaactaaaatcactaaataaatatcaaaccgatctagaaagccatcacaacccataaaactaaaagaaaaccaaaacccaaatccagatccagatctagaatacatataacaactaaaaatcaaacctttaaaagcaaaaccccaaaaattgacacaaaaatcatataactcaggcaataaaaacagatccaaagtaacaaacctcaacgattgtaacacatgtattagagattaaacataaagattagatatttattatgatagttggttacctcttgttgatcgagggatttttgggggtctccggctgagaggagaagagggctacaaaataggctacagagacgatctttgaaagaagcgaaactcgctttttaaatagctgactttgctgacactattagggtatgacgtgtcgcttttctattggttaatagtgaaatcatactcggctttacggtacaggtaaactaaatcaagtccatcgcgcggttaaaattgaaattttgtggaccgttgagatctatttcatttgggcttttagtttggtttgttccatgttgatgggctttggatctgatttcagagactcaagcccattttgggacaatatttgaagaaaatatcctagggaaaaagatcactaagggagtgtttggttggaggatttatgttcttgggaacggtgtaaaaccaaatttgtgttcactttacccagatccctatctaatatgggtagttcgtgagtgttgtgttggttcagtctatatttatttatattttttaaaaaacgggtcgtgtcatatcgtactactaaaaaatatgagtcgtgtcgtgtcgtactaatatttttaaatggttggcccggcacagtccgtcccgacattttcgtgttgtgcttggattctcgtcgtgctttgctcgtgctaacttgtattttttaaataggtcagcccattttcatatttgaacttaaattcgtattttactttttcatattttttaaataattactgaattatatgtatatttcaaagctttgattacattgaaatattttttgagcaatattttatagataatcatataaaaaatttattagaatttgaattcgagtatttactaataaatagtcaatatgattataatttttcttttcataatcatataaaattactaacatcattaaaatttaaataattactaataaatgctcaaatttttatatcacactctataaataaattaatataaaatcttagtttttcatgttttgataactataattataaaattataatattcagtattatatttaagttttagtattattttaacttatttataattgataaattcatatcttattattaatattaataaattaaaagattttttaatatgtcgtgacgtgttttttgggcttgtcgtgcttttcaggcttgtctattcttgcttacgtgtcgtgcattttcgtgcttaaggacatatttttcgtatcgtgttgtacccaagcccgtattttttcgtgtttaatcgtgctcgtgccaattttttcacttcaaatattccacatctcagcacttccccgtaacaaacacctctttgagatattttgaataaacagtcacttaagtaaatatataaaataaaaatagacttctacttctttaaatcatgctctagggaaatagattcttcatttttttttaggtaaataaggtgtaagtatctaaagttcaaattttgtaagtagcataagtttaatgattcttttaacaatcatccttctcttcctctcgggtttgaggttgccaccgccagtcttgggagcgtgtttcgagctcctgaccgaggggaggcctttgttaaggtctcggcttcacaacggtaagaggcttctctagtggtggtttgtaataatcttgaactagtgctcatctttagttcatcaattagatgaattttacttctagtggctggttctttgcattgggtcatgtgagtgtttcgaacactcctaccctttctttaaaagaatattttgtgtcattttagcttgttataaaatcgtccaagttcatgctcagagaaatttgctaaaagcaagttttcaatccataccttagtagaaatcccagttgaatttcttaaatgagctttcgaatttctaacaacttagttctatcctttgaagattagtagctaaaatctagtataatgtaggttgtcatcaccatactccaatctatgatttcaagtaatatcttggtaaatattattgcagcatagacattagacagattattaagaatggaattttgaacataaagaagacaatctcaaataatagaattatgaattcagacattaactaatataatcaaaaacatcccaaaaatttcataattaaaact

SEQ ID NO: 238085 - DNA, 1190 bp, Cannabis indica
tataattggattagatctggatatgcctaaaaacattggatcatgtggtcaaatgaacacccttaaccaccaccacgacaccaccacgacaccaccacagatgcccactacaaccaccaccttaacctcttttttaaatctaaaataaccataactactgccaattccaccctaactcaaacacaacaacacaatcaaacatacttaaacctgccaagatcaaaatcaaacctgccaaatcccatatcaacaacaaataaaaaaaatcaaatccatccccaatatttgtgacaaacacgcgggaactagaacaggagaagaaggccaaaaatcccacagtggggaatctcctataggggtgagcaaaaaatccagagaaccgaaaaaactgttcaaaccgacctactaaataccgttggaaccgaaatcgacgaaaccgaaaatcaaaaaaatcgctaacggtcaaaaccgccattgaacggtcagttttttttggtaataaaccgacgaaaaaccgaaatcgaccgttatacatatatatattaatttattatgtttttttttcatgtattatacttactaataatatataaaaataatatattattttttttattaatattaaagttaaaagaataagataattaatttttgaacaattaatttgtatatttgtagttgtaaaatgtagaataatgtatttatagaataaattggatcattttttttaaaaaaaagttcagtatgggtgctttaaaccgaccaaaccgaggttcaaaacggtcggttttaggataggttctggattggtcagttggttttcgaattgcaccaatctagaccgaaaaccgaattttggatttttttatagaaaaaaactgaccaaaccgactgatgctcaatctcctatttctcatcagatatatatttttattatttatttttttattttttaaccataccataaaatctctagatctaagcatctttaatccttttgtttctttctcttccgatctcgcttccttcttcgtcgaaagtacccatgcctagcactgaatactttggtttctcaccacctggtttgacgaagatggaactttgggttcgagagcagcaagaccatccatggcctccggttggaccaacggtggcatctcgaaccataccgagatgaacgagagagagag

SEQ ID NO: 238086 - DNA, 988 bp, Cannabis indica
aagtaaatattgcgacccacaagcgtaaattctacaattaagaacaaaaccaagaacttcagaatatgtcattggatctacttgaagaaaaatgcaacgagtcgcaaataaccaatgctgcttatcaacatcgcatcacgatatactttaacaaaagagtttgaaagagactctttaaagtacaagatttggtaataaggcgtgtatttgcaaatacgctagattcaacagctggagtgttcaacccgaactaggaaggcccgtacatcattgaagttgtagttagaactagagtttataattatcttggcttaatggcttgctaataacaaatcactggaacagcgagcatctatggtcttattatcagtaatttattatataaatattgtattaatctgtgtaatattggttatttattctgaataaaaatttgaatgtttcaagtaatcataaagttttattttctttaaaattacttgggggcatatatgtgtataataactaaattctacctaaaaatatatacaaaaatgttaaaaacctaaaaaaaaaatcacaaagcaaaggatgattgattaaaaaatatctttaaggataatacaaagtcaagaattaaaaactttttccttaagtggaaagtagattagcatttgtaagtgagattttttctcataaaacaacaaaaagctatatgcgatctgagtaaataacagctaccatgttatagcacgtactataaatgagataccaatatgtcttgagaaataatacataagctaaagtatgaatagaggattaactattaatacaagaaatcaaaagatatttaaaatagttcttaaaagaactgttcaaaatatttaaagtttgctctaaacatagcaaactattaactgctcacaaaagatgtaggagattactaactgctcgcaaaaaaagaagcagattactatctgctcgcaaaaaaacatgtaggatattaact

SEQ ID NO: 238087 - DNA, 1176 bp, Cannabis indica
gcttaaagatagtcgagattgaaagtcaaaaaacctcattgccatagtgattcgcagctgattgtgaaccaggtcctcggtgaataccaggcgaaaggcttaaaaatggcaaggaatttagagaatgttaggaagaactttgaaagattcaattactttaaaatcgaacagattacaagagaacaaaactccaacaccgatgctttagtgaaactggcctcgtagaacgacttgggtgaattgaacttagtttcggtcgagatactaagcgagcgacgcatatgtaaaatggaagaagtcgagatgatagatagcgctcctacatggatgactcctattatcagttacttactcgatgggcaacttccaaatgttaaaaatgagacacgaaaactattgtattcatggcctcgctacacaataattgaaggcaaactatatagaagggggtactcgatgcccctacttcggtgtgttctccctgcaaaagcgaatgaaatcatcagagagattcatgaaggcttttgtggggatcatgcgggttggcaaagtctgtctaaatatatcattagacaaggatattactggccaacgatcaataaggacacccacgagtttgtcaaaaaaggtgataagtgtcagaggttttcacatatacttcgcgtgccgccaacagatttaagaatgatgatctcgcctacccattttctataaggggaattgacttaattggggcattacccacttggcgaggagacgctaagtatgcggtagtagcaatcaacttcttcacgaaatggacgaacgtcgagccctttatttccataacctgcaagaaagtactcgactttgttgtcaaaacgttgtctgtaggtttggaattcccatgaagatagtatccgataatggaacccaatttgatggcgacttgttcattgaattctgcgagaggaacaaaattatcaagagctcctcgtcagtatccaagcctcaagcgaatggataagtggaaattgttaataaaaccttaaaggatactatcaagaagaagttagatgctaccaaaggcagatgggttgacgagctacctcaggtactctgggtccacagaactaccgagaagacagtgacgggacacactcctttctcgctagcatttggctcgtaagcaatgct

SEQ ID NO: 238088 - DNA, 4830 bp, Cannabis indica
taataataataaaaagaaaattatgaatctataagtagaaatacctcttttttgtatcttttaattaaaaatacattcatattatatttcattaaaatatactcacttttgtgagtggattgtccaatatacgctcactctccacttaagtctagtccataatttacataacttaaagggtataatgagagcatcatctataaaagtggatagatcttaaataatataaaaataaaggtaaaaatcaaaagagataaagtaaaatagatatacaatataatttcttgaagaatctaactaaccaggtctaataaactgggacagggttgacccgctggggtaggggcctgatccgacaagaaaaaccagctttttttttgttctaaatttggggagttagaattgtaaaattcaaaatgaaaacattctcaaggggaaatgagtaacttttaaataatctcaccccaaatataaatttaaataaaaatatattgtttatttacagaagaagcatatatatacaaacagcaaaatcaattcaattaaattcgatttctggatttctgccttaactatcttaatggcattattatagattaattttacctcaagaccatgagcaaacacaacaacatgttcaaaaagatctggtgctgctgctattaatcctactgtacttattacacataacagttctttatgtaatatgcatatagagttgtatatttatgtaaattctctctggaaaaaagtggagacagaaactaagaaagagttttcatggcatctctaaatgaaatcagagccaccaccaaaatgttcaaggtcaggatgagtccccctccccggcctctgcggacccctgtaacaaatgatagaaccaatatttaaataaattcatttaattaatcatattttattgctcatgacaagtttaaacatggtactagaaccaaatatagatgttgggagtacttagtcaagtttaaatggtaattttatgtaccttgtaaaccgattgggctcaaagccaggaacaccaggaggaccataaggatcgaaacgagcacctggaggtacacccctgtttcaatcgaccgaactggtttagaaccacacaaggaatgataaatatgtatgaaaaaggggaaagcaaagagagcaatctaaaactcacggtagtccaccagggaaatcaggctctccacttccaccaaaccaacgagggtcattaggccctgcttccacatgatgcacaaaactgtaagtatgcagaaaccatatagtgtttatttgcatcacaaatagtaaggaaaaaaagttactaacctagaagcatgcttccaccgccaaaatcacccctaagaagacatgataatgcaagcatgagacaccattatgtagaaatcaaacaaataaacactaaactaaataaatagcatattatagaatacctgggtggatacatcccagcgccagggccaggatagagatcactaccaccaactggataaacaggaggatatacaaatctgcaaccaaacagggatttaatttatgaaaaaagaatgaccccacgatgcctgttattaagttaactgtgtagaagaacaaataaagtagacaatcaaacataaataatctacaagtgtagcacataaaatggctctaaatttatgggagatatacagaatggttaaacattcctgtaatttgtgaagatatgaacaacttcccaatacccttattgacagttttacttcaaacaatctcagctactgacccatcaccatttttttcttttaaaataaccactaaaattatgtgggttatttttatacttattgaacataggacagaatttacatttttgcaatagttagttttctaaaaatttgctaagaacggatctcctctaagtggtatcctcctcattatcattatctttggaacttgttctcagggcacatcgtataactgagttgaattgcttccttaatatggcattgtcaactactgtatctgttagaatttgcttcaacttatcttcaattttcctcaaattgttgacgctgccgttgactttatcggtatgtgactcatcgagattttgcatgtcctgtgcaagaagctgtgcctcggcaattgatattatcaactttgacaaacatttaaaatttatggcctatcctagatttttccaaaacacatcctgccatcatggcatttacaaggcatacagaaaatcaaaagtttgaagcttttatattcaagctttcaaacagccagaaaaatgttaatccaataactaggttcttttgtacaactaaattgcctctgtcaacaaagagatttcaccttttgcgtttatatgaaaaaactaatactgaagttgtgcaatccataaaattttgtgtccaaacagtaacagaactattaaaaccaccatagacaaagtgtcaacagatctttgttctttttagtcatacagcaacaagcataagaggagctactgaaatatacattcaatgaaaaatatatttctatacttattgctgcctcattgtattctctttccttgctttgagattaatgatcaaccagaagtcccattaataagaaataagaaactcaaaaatactaaaaaaacgagctcataatatcaattcagactcccttcagcctatcgccagtatttttgggcattaaactcaaataacacttgaatttactcaatcaaaacaaagtacatgacacctaacattttgtgactgccataaacactattaagagaatcaaataaaaatctacctgatatggttgggtttattagtgattctaaggttattggctttaagcaacaacttgaagaactgaacatgggactctgttatcccaataaaaagcaatgagtgtgccatgtgaagtttgtcaaatgtttttacaagaggtttaaccctgtcataacaatccgatctagtgtatttccagagatatttaaccaaattatcaaaacaagcttttagctaagttattcaattatatggagcaattactgaaaagcgaactcaagactattacaatttacagacagcttattcctacaaagccttaatcctatgatagggttttggtaattgaataaatgctatgtttggtgtgatttatcaaaaaaaaaaaaaaaaattacagcttattctgaccaaagaataagtacgagaaaaggcttctgttattgtcattagtaattaagtaacaatgaagtgttcaaatgtatgaagaagagtgtaggcgtatgtgggtgtgtgtgggaagagggagtgtaccctgaagggtgtatttgatctctggaagattcaggagctctagcaccaggttcattgacataatttcttgattcttccctagtaccagaactgcaaataacaccaaaaaaagaacagacaattagtgagaagcaaacataagatgactatcactaaaatgctactgcacagctccagcttcaaaatcatctctcaattaagaacattgacagtgaattcttattgtgttactttttaacagctacactcgaggaggtaccaacaaaaacacttcttactttgttctctacactcaaaattcacagttcaaaactagaatcttcgaggagttacgagtggtgaatttcaagattcggaaagaagcataaaagttaaaaaaattgctaaacatgggaaatgcacagtcagtaatctttagacatattgataaatataatatcagattggaaaatgcaaagagtagaataacaacaatgaacaattaatagtcaatcaaaacccagcaacttatggctagaaaagtaaagctggtacaaatttcaggcttagttaattcaattccagtttccacaataaaaaaaaaaattaactaatttgaaaggaaaaaaaaagaagcaataaattggtttaggtagcaagatacaaaacatgaaccgcaactgaaataattttgctctcaataaaggggcaattttgatatgataccttcgaagattggtggatgagttagctttagaagacccatctaatttggagaaaatttctgaatctaggctcttgaccagcttatccaaattcttgaactgggtggagtaattggtctccccgctttctccgacattatagtctccaacactgaaataattaattttcccaaaacacatttctcatttctcccataagaagtaagtacataaaataaactcaatttctcaaaaattgcgaaagtaagaagatgaagaagaaaaacccacttgatttcaagatgaacaggttcagagcttccatcagccaaagcatcaacaagcaacttgtcgttcatcacaagacatttcaccaatactttttgagaaaccttctcagggtttgtgtagacaaacgcgtactcaccatcaacatcgttccagccatcaatacccacctcatcttaaacccccaaaacaaactcaaatagtcagactaaagaaacaatcaacaaaaattatacataaagctgaaaaataagaattgggaaattattaccggaggtggaggaagaagagagagcagtatcggaaaatgcaggggttccggtagcagtgagaacgaaaccagaagaaaggaaagaggcgtggacggcaaaagcaagtttgtcgaagtcgttacgaaatgacggcctggaggccctgatcacggcaataacagacttatcagtcgccattactggttccaaattccgaacaaggaatgatcttcgttactaattgagtttcttgggagaggggttttcaaggggttttcaaag

SEQ ID NO: 238089 - DNA, 642 bp, Cannabis indica
atatttttatacaatatttatattcttgtaatattttattaattaaaaagagtagtatatgaaatttgttagtgagataccccgacatgtgggggatcactaacaaattgtatagcctatatatagatcaagtataggctgagaaagggacttcctttgagatctgacttttgcacttcgaacttttggatcctcttatctctttagactctctctttaaaaccttcccctaaaaaatcacttgacggcagccaagaacaccaccttgatttcttcatcttaccattgagtccaccatactcagacgacaccactcctcaaaacaccattgatacacacctttctttacaagttattagtttattgtcccaagaactttataatctttaatttagatcaaatttatgaatatcaagcctcccatgagccttgtattcatagatcttgattaagattttaccaagaaatctcatgttgtatttttattaccactaaactctttgaaaacataactctggtgtgtcggatctaatcaataaaattaaaattagacgtagccacattaccatcgcgacatggggggtgaactactataaatctctggtatccaatttatttgttgcggttttattagtcaaatta

SEQ ID NO: 238090 - DNA, 2024 bp, Cannabis indica
tctaaatcgtttcacaaaaaaaattaaaaataaaatcaaatgaaaaatattgtagcatcacagttaacattaagaacacctattgcttagaagacagtagaaactgttgcaacaggttcattcaaccttgtaggttgagcactcaactattatgcaagatacgtaactgcactactaacaacctcttcagtcccagagaacttcccaaccataaaaaataaagaagaaccaataataaaataaaaccatatcacacagacaagactaaaacactcataacaatatcacatagacaacactcaacactcaaaactatgtcacagagacaaaactaatcgtagtaacaaaaatcaaattgcaatagcaaaatacaaccccgaccaagctgtgcacctatgcccaggaaaggctggcgggcctggctagagaaaaaaagataacctcatgtaattataaatttaagaacgataatactatttttttttaatttttttaatttagttaatgatgctgttactaaaagtaattaagatcgataaaaaagagagccataactcatactatcatatggacgagtatctgctttctactatggctaacttcaacgaatcatcaagctcactcagtactcctcttttcgctcctcttgcacttacacactctcctacctgtcaaaaatcaacttccaacatgttacacttcctttatgattatgttccagataaaaataaaattacctctaattctttttttctcttaaatccatatcaacctttcaccaagactcattcctcttttactatatccattacatcatttattaaaccatccttcaaagctccaaaagaatacattcaagcctcaaaattcaaccagtgccaacttgcaccaacaccagaagtccaatttatgactcttgaaattccacctgaactctctccacaatggatggcacagggttatacccacatccactttggtactattcaccttgctctaaattatcatggtaggaagggccttctagttagcgctcgtattggtcttcttcatactcgaatgaggaaatatcaacatgcaagtatagctactattgaaactacctcaaatggaggaacagtggtcgtcactctgttttccaatttcaacatgtctcttagagacaatcgactgactgatgcttttaaagtagaaatacagacattaggagtggatcaagactcaacttctcttagcaccacactccattatcagatggcatatcgacttcaagatcatgctcttgatcttaacatccctcaaacacaagacactttactcatcattgttaattctaaacaagtaccgacctgtacacatgtcccaaagtaaatgatcactgaagaactcacaaagcttttacccaaattgtggttcaccaactatgaaaagtttcataagccacatcttggggttcaaaccacaactgagccttcctaccacacaaaagaagatggatctgttgaaattgtttttgatagaagccaaacaaaaccacctagttgttttcacacccaatttgtcatcacacccatccaaccaacaaatgcagaaatcttgtactttgattctcagggaaagccaatttatgcttttgaattctcagacgcgcataaatattaaaatgtttgtaactgcaaaagttgtctaaaaaatgatgtgccctcacgacgtcccactctaggaaagcaactcaagcgaaagctagaaaagggtaacaaaaacatcggtctattaggccaaccatccaaaaaattcaactatatagtcaaatactatgcaccaaagagctacaatcagcctataccagaacctactagatgtgattcagatgattcttcaaaagcttcacagcacagattgtcttgccttgttacaaaagacaagcgaaatggatgaagaagcatggagaaaaatttccagcaccagctgttcaaccatcagttcaattacttcctgatgcaaacatgatcacccccagtcct

SEQ ID NO: 238091 - DNA, 524 bp, Cannabis indica
aatcccttggtatgacaaagttcattaagggccagtttttgacacatctgtgctgtgggaaaaagcaactgtaccggtgctgtgagaaaaaacaactgcaacagaactgtggaaaaaaactaagcagagtgtttagtaaattataaattttaaagtgttgtcagttgtgaagattctattatatgataatgttataatctagttcattatgatcacaaatatacaaaaacttagtgttacataaaatttttattttttatgcatttttattattttctctcaaaagtataaatttatatgcatttaataaaaataaattatagtttttaaattataatgttatcacatgtaataaaaaagttagaaacgcaaatatataagaaactctaagttgatgtggaatgttaatattaaacatataaaataaaaaatatttttcaagacaaaataaaaaaaaataagaaatttaaatattatttattttaaatgttttcttttttagtgggtaaatagcggcataagta

SEQ ID NO: 238092 - DNA, 1013 bp, Cannabis indica
tatccctccattcagcgaacatgtgccttttgctcttcaaatgcaatattcaccgcagatggagttcctcttgatcatgatgcagggtgttgggatgaccttgcatgattccaagagcagcacggaggttttggatttcagtgtaatctccaatggttgtccgaacatttgttacaagcagaacgacagtgttcggaatgccctgattaggtgctgaactgttatttccagtctcttgcacactaggcgcgattccactcaaaggagttgtcacaccttgacctacagctgtcggttgtttaggattcatggttggtggaacccttacatttcctggattctgtagtgcaggatccactacctgtggatttgttggatcaaccacacctctacgagtctgcacccccatcgtgtttatgattagatttgagataaagagcgatcctgtgattctgttctcaatgaaagctcaaaatgttgacctcgcttttggctaacgacagtgagtcttgattgtaagtgacaagtagtatagtatatatgtaatataatgaaatagataaagacacgagagttttatagaggtttggccccgagaagttcggtaatagcctactcctcttagtttgtattgacttaagaataaagaatataatgattccttttcttagagctcttacaataatatctctaaatataaattcttagataagtttttcgaccctttgcccaatgagaatgaatcactatttattaggctaaaagctgtggggaagaagtttccctcctgattataatagatataattggcaggattgcatattaaatacagaatacacttatcaagggatttggatagcttgccatatctctgtgatatgatcccaaaaaattatagggatttcctccggcgactcatgatgtgagtgttgaaactactaagtgttggcgtgctattcggattactcactgcctgaccaagaagacttcgtccgtgcgactatatgcgatgc

SEQ ID NO: 238093 - DNA, 698 bp, Cannabis indica
atccttcaaagtggaaagtttatggtgcaatcaatacacccatgagtaatgattaggaatctctcttgagttttataacatatgcaatttgatcataatataatcattgaaaaattttcaatacaaatttaaaaaaaattaataattagacgtaatatatatggataataaaataatttgtccaccataaaatattattttaaacaatcaaattttacaattttaaaataacaaataataaaatatttttttttaaaaaaaaaaagaatattggtggagatttagaaaccccattgtttttctgtgatttgcaaatttaataatttttaaagaaaaattttcaaaaatatctttttttatgttttatttacaatttaacggtctaaaatttttatttactataatacgcttataaagttttaaaattataaaaatacactttgtttagcaaaaagtaagaaaatggttaactcgaaaactgatctggagacgtggacatcaatatttgatacgtggcacgaaggaaaacattcacgaagttaagttactcaattcatagcaatcgacttggggaaagggtccccaagccctgtgcctaagttgacttcgaggactctagaatagatatttggatatcgctaagttattttcaagtcaccatcccttcagtattctgagtaagggagacaagaagaatt

SEQ ID NO: 238094 - DNA, 781 bp, Cannabis indica
caggtctgccgtgtctctctcagtttcaaatcgtaccagttttttcgactggtttgctgaaaactggtctcggcatggtggagactatatagcagaaatcctaatggtaagttggtctatatggaaagctcgcaacaacctcatttggaataatcgtgttagttctgcagctgattgttattggtttgatcgtagtttttcggaaagtactcttcctagtactctcaaatcgattgtgattgcggatttgaattaataatattatccattcccattaaaaaaaaaataaataaataaataaaaaataagggcactgggcctggctcgctcatactcagtaacaatattatttggttcttaaaaaaaaaagtaaaaaaaaataaatacattgtactcttttccttaaaaaaaaatacattatattcttttagattagatagactaatgtatttaataccatattaggctactatacttattttattttctctcattttagaatagtttaaaaatatatttttattccttatacaattaattctgtttttttttacaaataaatacagctgatttaagataacagatttttaactttacaataattcaaaaattttaaaaataatataaaaatcataaaaaaactttcactcctaaaaaatctggttagattttttttatttaacagattgttttggcgtgttagttttcatttcaccctgaaaacttcacgtattgtttggcaatggcattaggtgacagtggagatagccttccactacta

SEQ ID NO: 238095 - DNA, 841 bp, Cannabis indica
aggatcacatttgttgcattgattcccctgtgcatgtggccagaggcaaagaactcctccacagcatcacagaagtcactcccaaccgtattccaatagtgcttaaagaacagcactgacataccatcagggcccggagcttttagactagccatagagaatagagtctgtctgatttcctcagcattaggcacgacaaccaagtccttttactcctcgagagaaagggggtccgggaccaggccattaaggctctcaaaggtccatacactgagtttttaaaaatgcttcccgaaaaatccgagaattcttttccaatgtccgacctgctactcaaccacaccccatcattatttaagattttctcaatcgcatttctcctatttcttatggtggttgtagtgaagaagaacttcgagcacttatcaccatccttgatccaagacacccgggatcttttctgctagtacacggctctttgtctcaaagcctcattaagagactttcgaacctccacctcctcagtccaagccctagtcctagccagacgaccctgaatcaggttcagacgacattcaagccgagaaatgcgagaatctaatttcccaaactgattcctactccaattactaagcgccaagcgagtagcccccaccttcttgaaaattctgtcgagggccaactatgggaaagagagccccaagcactttccacaacaagagcactcggggatccctggtcgactaggcttcaaaccggaaaagctttctaggtttggattcttggtccacagtactgataaccaggggacgtgatccgaattgcaagtgtggcatgaatg

SEQ ID NO: 238096 - DNA, 1315 bp, Cannabis indica
catcacatgaagacttgtcgtctctttcacaatttagtgggatccacaacttattttacctacaaatattaatgtgtagatgatgactctttccccatgaatatttaactaccaagatttaccaattagttatttgtaagtaaacatcatttcctaccaataatgatggcttacctacaaatcttattggtaggtgaataacctttttttcttgaagtgaagcccttctactgatagaaagggagtctgaaaaaaatgaggtaagtaaaaggaattaaagaataagggatacaaaatattttacaaagttgataataaccagctgtaggagatcaacacttcttgtcataaggctttagaaattgcccttgttgaacagatctcactcttcttgctgaaaggttttgaaatagcaccaattttgtgtagcgtactgcgagcagggctgcgagccttcaacacctgtgaaaggtggcagggggcaagaaggctctaggaagaccatctcaggttgagaccctgagaatttgacctaatggatagacccccaaggcatatccactggaacttgcagctactagccctgaagaattggctgtaatttttttttggctcgatcgaatgcttggttaaagcaagttttttaccagtagtctttttaattttctttgaaactttaaggtttgacctagaagtagcttccactgaggtggtcctcttcttacaactcttggtaggaccaggcggactgcaaggaagatttttaaagtactagtctgcgagacagaaaagaccacatcaaaacttctataaataaaaatataaaggtggtgaggctaaattacccacttaaaatatcaccataatcatcggatgaggaggagctgctataataattactaaattccctaaatctagtaatcatataaatatcaaaagaattaaggagagacatatcccaatttgattagctggccctatcaaagttagttccatactgcctagcaatcccaaagtaagaattattacaacttaattggacgtgatgttcatggtaccaactatcgaatctatgggcgattaggttaatgcagttctaaatgaagaatttatattgactatccttaaactgaactaagtttgttcgattaaccctaagaacagtaggagaccatccacattgactgaaattattacctcgggaggcctcgtctttaggttcctgagtggttatattcctaaggtaatgaatgtgagccacatagtcctgatcttcttcttcttcaggcacgagaacttgctgctaatttgaaaa

SEQ ID NO: 238097 - DNA, 797 bp, Cannabis indica
taagcccaaatatgaataaattacataatagagagaaagaaagaacaatcaaatagcatcaatccatagaataatctcagtcaaaatctatcaaatccctaaatagagaatttagcttataatcaaatttataattaaactaaacacaaataaaaatataagaaatcaagagaagagaaagaaacttgatggaggattgtcggggatcttccatgctcactccaagagccttcttcttttattttttttgggttctattctgtctcccctctaaaatttgcgatcccctttcattaaaatagagttttttagcccaaaaaacgagaaaagacaaagttatccttggcctgtacgaagtcgacatcgcatcgactgtagaaaagtgaaaaaacaagctttctgtagtccctcgccgtggccaccaaaagcctcgccgcgaccactggatctattttttctacttcgacctctctcagtaaaataggcataacgttatcataagaactccaaatgagttgattcaagatgcattggaaagctcaaaaagagatctaaaacttttatgctttgacgttttccaaaatatgattaaaacatagttgaatttaggtttgaagtttcaactttattttctttcaaaattttctctattttatagatcagtgttttccaaaatatatccaatttatgcattccaagtttcgaaacctgaaaccaaagaaaacaagcgtaagtttattctaaaaataataataaagaagaaaaacaactataaaatgtgacctgaaacataggct

SEQ ID NO: 238098 - DNA, 1173 bp, Cannabis indica
cttggtgtccttgccaatttttcatgttgagactcgagattgattccaaggttgcagtggatacaattatgagttcaattttaaatgtaattaagtacatcattatagcacattatctatcttctcgacaattttttacaatcttttgtactaagataagctaatgtattgtgctcatgatctagcaaaggagctttagatagattgtaactacctcctacctaactttgtactctttatggtttccaataaaaaaaaagttacataattctcaaaaaaaaaaaaaaaaaaacactcctcataaatcataaacatgaatatggtgctctaattttggcatacatattgtagtacagatggcttatgtaaaatttttggaccttgtttgttgatcaaatatatatgttattaatttttcttaaaactgactaaaatggtaataacaaaattatcaaataaactaaatttgaattttgaataaataaaaatggtttctatttctcacgtatagaaagaaatgaaagagaagaaaaaggagagccaatggtgctggctgacgtggccccaagagagaagatgaactaaaggagacaaacaaacagctatgctaaagtacacaaaataagtaagacaacttataataataataaatatttacagtctttaatatttataattgttatataatcttaataaaaaaaatattatgttacaattttattacaatggtattttttataagtaagtgtaatttaaaaatacataatcacatattattaaattatatattaaataaattaaaataatatataattatatatttgtgagctagcacttaattaatttaattgatatctaataacaaaaaacaaatataactgcacattgcaaaaaaaataatataactgcaataaattataaaataaaaataaaaaatatttataataataaaagtaatattcgaatcataaagttagcatcttccttttctacaatcctgagctgaggagggagaaaagggaaggacccgaattagcacgtgccacctcacgtgcttccctcttcagccttttctctctatatctctaccatggcatctctattctctactctgttttatctatctataaacatatgtcgttgtataccttaaaaataaacaaacctcaaaac

SEQ ID NO: 238099 - DNA, 1359 bp, Cannabis indica
ttattaaattatatgacttacattagcatttactaaatgtatttataagtattttgaaagttagaagtaaataggtaaaataatgggtaagtcggctaggcttgtgtttaaagtctatattttttgagggctcaaaataaaaaataaaaaaaaattattagtgtaaacaacaaatattcacagcttcccacaatattttttttaatattattttatatatatttttgagggtcttaaaatctaatttaccttaagctcatatattctcaggaccgactctataatatactctctaaaaggttaaggttatttttgtagattctctatctgtttcaatattcagaagaactttgtatttcttaaaaatagtacacacgtgactattttttttatactcgtggtaattaattgtttgaactttaatagtaattcataataattattataattttataaaataatataaattaacgagaatatattgtgtgtgttatttttagagtaatatatccatttttagtatttgtgattttcaaaaaaataaatttagtatcttgtacatttaataatacttatttggtatgatattatctgttttgggcttaagttcttacgattttatttttgggtaccttaccaaaagacgtcatactaatggaataggtagacaactcttgcctattcttccgatgtaggacttggattgataccccaacaatttataccgcaataatcatcaacgagacatgccacctgactacctcaatatcaggtagactttcgatacaaggcacgatagagatcttcatttttgaggtcttctcccacacatcacaaatgcagcccactatcccagcgctcctgaatcattggctctgataccacttatgttttaatcacctcaaaacacaattaagaacagagatgaaaattagtgcaataaaatgaactaactaatcaagagaacaataaatataaaatgcaaaataaaaattaaatttaaccaatttaatgagatttgattagttgcttggcagtggtaactgcctactccccatatagaataatctttggttcaatttttatttattcacacttggtattacaatagtaaagttctaaaagttatttttgtctgtaaaaaatgttaatatttaaaggcattgtctaagagtgttgaaaaaacagaattgtccccaactaacttaactaccaagattgtggctttaaagaatttacttgtgttaaaactgaatactagctaattacattttaactaacaccataatataattttatcagttatatgtcattaaatatttagatttaaattcagaactcatataattaaatatagtt

SEQ ID NO: 238100 - DNA, 3834 bp, Cannabis indica
acataaatatgttacttgctgaaaaatatagacatacacagtctatactacaaaaaatggattacactgaatagcaaatatatatcattttccataaaataaactgtgtcttacataaataaccaaacagatcccaattgtatactcaccgacgaccccaaggataaaatcgtcaactcattctcttcttattcactaatcaaccctcttctccacacgtgtcatcttcctattcgttaaaaaaatataacgagaaaaaccgcgtctcagctattagatcttcctattcctcaattttctatacgacaataaaaaaaattttctacacaacagtacctcacgtgtcctcaccgacgacaccaaggataaaatcgtcaattccattcgacactttcttgtagttatttactaaaaaaccctcatttcaccacgtgtcatattttgatgcgttaacagaaaaataacgaaaaaaaccgcgtctcagctattagatctgtcttcgtctctgcttaaattcctcaattttctctcgttttcacaaaaaaaagaaaaaagctcaaatcaaatcaacaatggcgtccgaaagcaacaacgatacactcaaaacggaatccgccaccaccaccaacggcggcgaagctccagaccgtaagattgctctgattacaggcataaccggtcaagacggatcttacctgactgaatttctcctcgacaagggttacgaagtccatggattgataagaagatcatcaaacttcaacacgcagcgaatcaatcacatctacatcgatccacacaatgcacacaaagctcgtatgaagcttcactacgccgatctcaccgatgcttcttcgctccgtagttggctcgacattgttcgtcccgacgaggtttacaatctagctgcccaatcgcatgtcgccgtttcgttcgagatccctgattacactgctgacgttgtcgccaccggcgcattacgtctcctcgaggccgtacgatctcacatctcagctacgggcagatctcatattcgttactaccaagctggatcgtcggaaatgttcggagcaactccgccgcctcagagcgaaacgacgccgtttcatcctcgatctccttacgcggcttcgaaatgcgcggctcattggtacacagtgaattacagagaagcttacgggatctacgcctgtaacggaatcctattcaatcacgaatcgccgaggcgtggggagaatttcgttacccgtaagattactcgcgctgttggaaggatcaagatcggtttacagaacaagctttcttggggaatcttcaggcttcgagggattggggttttgctggtgattacgttgaggcgatgtggatgatgcttcagcaggagaagcctgacgattatgttgtggctactgaggattctcatactgtggaggagtttttggaagtggcttttgggaatgtgggattgaattggagagatcatgttgttattgataagaggtattttagaccagctgaggttgataatcttaaaggtgatgcttctaaggctaagaaagttcttggttggaaacccaaagtgggatttgagcaattggtgaagatgatggtagatgaagatattgagttagctaagagggaaaaggttcttgttgatgctggttacatggatgctcagcaacaaccatgatcaatcatcaatcatcaatcagtatctatcttatctctttctcactctcaattttcaatcttttttttggtttcggtttcaaatgagtacccaagttgattgattgattgatttgatgatacttgtagctttatttaatatcattttcagtacaatgctgttgttccattaaatgattcttaagagaaaatatagttaattttgtgttgttctttagtaatgtttatctcaagttcttaattcgttgtatttagcaaattttattatgtttgtttgttgtttactagtttgtattattagatatgggaagcaataatatgaactcaattcaattttcagagaaatgttcttactttcttctacattgctcacttttaatttctgcttagattattgtttataatcctctgtttcttatatattttgaattgtaaatcttgaaagattgacgataatactagatttatctgttttcataatgtggttccatgaaatggttcttaagataaatatagtttgatatattccagtaataatttaatcttttatcttatcttgtcagttagcaataacatgaactcattgctcactttaatttgagagacttgagagtctgagattgaaatgatttatgcttagattgtttagaatccaatttattttatttttagacaccgtagttagtatgagagggtataattgtcattgtattgagatagttatttagtggagaatagggtagtataaataggtaagtaaaaaaagaatagataagtagaatagaatggtatgcaaagtattgagtgaaatctctgcatcaatggagagcttttgctctccaccattgtacgagactttgtctcatgtgttactatgtttcctacacttcaataatagcttcccacaatatctactactccattgatactttctattgattgctactgttcctagctactggtttgagtatttagcagcaggttatcaatacaatgacaattgtaccctctcctactaaccactgtgtctatcaaaatagcaagattattagattgggacaaaatattgatattcactttgtgttgaaacaacatcctatactacttcaggccgagggcatcctgtaatcatcatcatcatcatcatcatcattgattcaggtaagtaaattttgtaccaaatcatgcttttcatttttagaaaggcaagaaagagataagcaccccacaacatgaaacaaacattatttggaggcttctaaggaaagagactagaaatttttaaagagaggagattttgagcattctataatgtaagagtttctagttcagtgatctggtttgatggacttagtcataatttatcagctaaagattcaattcagtgtaccagttgaaaagtggatttgtgaagtgagattaaataaaaggaattatgacctatttcaattgtgttggtggagaaagttttgattttgattttcttttttctttattgtgtcggtgtggaagtactttttgaggttaaatctaagaaaatagctttcaaatatatctcaatttacccctcacatgatgatgtttctatatataatatagatctcatctagaatgctatgatatggttttttttaagtgataataataatgccagccttgtctttgtctatggaaacaatagaatcttaaatgtgggattctctggggtgttgaaactatattaacaatacaatacatgtccttttctcttgtaatcttataaagaaaaagatgatttttaactttatctttaaccaacaacccatcaaaaaatttgtgtaatatcaattattttcttccattccaagacattgctagcaaagaatgataaaattacataaaagaaaaactcaaatctaaatttgttaaataaaacctacacaagatgatcaaaataattggactaagacgggtcaggcttgtgcataggactcactcagtgtcaaaaacattaaaaatactacataatcttaaaacaaggctaactttttcataacaagcttaattcaaactcaacatgacaacctaaaaatgacaaaaatggttgtttgcaagacagaaccattgctgccggtgattgttcaagaagagcctctcactctctcc

SEQ ID NO: 238101 - DNA, 725 bp, Cannabis indica
ctcaaacatggactttgcatgtagttctgttgtagatggaaccgcctgccgcaatttcgagactgtgttactactttatcaccaatttcaaatcatactccaatgtgtcaactttcaactcttcatataaaatgttgcacattttctgtaaggttgtgtcagtttcaccatcaacgtcatacttcctttgcttttataaactcaattaaatccttcaacatacactccaaataccatcatacaatacaactataaacacaagtgatcctgcacttcaatacaaacctaaaacagctgaatcagaataacaaaaattacaataatgggaaatagttttgacaaacagccaagaaccactcaagaacctgtcgaaaagcaatcgataaccgttgaaaataataaataatcaatcatcgagaaacagtcgagaaatcgtcaataacatgggacgatgaagtttaaaaacacaactatacacaccatcaaaaaattatcgactgtcaagaatagttgcaaacacaaaatcattcgtcatttcgacaaataatcgagaacctattgaaaaattgtcgagaaaggccttccctgaccttaggatatttgcgtcaagaacctgccgagaacgtatcgaaaaaacatcgagaaaaatacaaacccctagaatacaccaaaaaactagatatcacaattttagcaaaaaatatatcaaaaccaaataaatacaa

SEQ ID NO: 238102 - DNA, 1435 bp, Cannabis indica
gttgtattgacttgtgagtagataaacaagaagaccttgatctatcatgaaagctcttacaatgatctctgagtattttactcttaaataagatttctctagtgtgtttctctaaataaaattcgtgtccctgaatagtgagatgattccactatttatagggattaattacatcaaattagtttcctaaaatcaataaggaataaaatgagaaatctgtttacttcgtataattacaataatcaaaatgaaaaactaagtaggtttttttttcttcattactacgaatctatcccatgaatttaaagatattgttgtgtcttacaagcttgataatatataggatatatctttaaagatatccaactcgtgacctctggttggtatatgtgcactgccttcatgatggagatgatcatatattcttgtacaccttgttcgaacgttcagctccttctcactttgagcattagatctctatgcacagttccttgcgagaagaatcttctgctcgagccacaaaatctggcccatgtgtcacccagatggatgccacatcaccctgtacaaaattttagataacagtctcgcttttacccaataacactaagtcaattaaagcaataagaattaataatttaacaataagaacacaaagatttatagaggttcgaccatgtgattattatagtagcctactccctttagttgtattgctatagagaatttataagatcacaagaagctggctaagtaagtttcttaagaacccaaaacaaataagaaataaaaggagaaatttggttactttcctactttacaacaacatcgtgtgaaaattctactgaaatagatattcaaattgacaaatgaaaaaggaaagcatcactaaagctttgcttcaaccgcatttatcctgttcggattagaagctgctcagacaatttcattcaccttgtgcggatgttccatactaatctttagataagttatttctagataataaatcactctggacgacataccgaggaccgtactatccgtctgaggcttaaaatattctccacatgtcacttagaaaaatgtcacgtcactttgtgtaaaaattgggataacttatataaataaaaaaaaaagatcttttgtgagtaaattatgaataatgttaattttttttaattttaaaaatagtttctcaaaaattcttagaaactacaaatcctagcttcttccaaaatgacttataaattggaatttttttttatttttttttatttttattcattcaaaactacacttataaggatttttcatttttatttttataaactaaaaaagagcttatcgaagtcaagtcaaatgctaattaatttttttttttaaaaaaaataagaaaattcatgggagaataaataaaagtaattggaataatttt

SEQ ID NO: 238103 - DNA, 2311 bp, Cannabis indica
tatttggtggataaagtatggataatttgaagaacatgtgaagaaattggggtcaaaatgcaattttaaaagcaaaatcaaatcagcccaagaagaagcccactctcggtcagctctttgaccaatctgagctgtttgtgaatcgatccaagggtcttggactacgcgtgatggactatgtctatttgtgaatttatcacttattacttgtaagactcatttaattggtcttaattaatcaattataattctcaagttagactatgtctatttgtgaatttatcacttattaagggtaaaacagtaaatagagatatgagtgggtggagagatattattccgctgcacccaatgtaaggtttctcatactgtatatgtgtttaatttagtatcgttttagaagttcatatttaggttgttaaatcaacatacttgtgagtagatctaagatcctggtaaaataattccaacatctaattccttagaaatagtagcaggtatctgaacagtagacatagtgtaacaagggatgctttgaagcacacttttgatcagagtcaatctccctgcctgtgaaaggcatttagctttccaaccctccaatctatttagaaccttcgttttgatgaaagcaaaatcttcacgtttcttggcagagacaaagaaaggattgccaagatatttctccttccctttcaaaactggcattcccattacagtagtcatttctcttctcgcttgatccgtaatctttggggagaaaacaataccactcttatctttactaaccttttgtcctgaccagcattcatatttctccaaacaagaaagaagacaagaggcttccctttgatttgcacgacagaaaaacagagcatcatcagcataaaataggtctgtgataggcatggaattccgaccaatttttatacaagtgagctccccacggtcttccgctttacggatcaactttgataaaacttcactacacaagatgaataagtacggcgacaagggatcgccttgtctaaggccatggtctggatgaaacattttccccgaagccccattcaccaagaccgagaacaacatactcgtaacacattgcatgatcagcttgcacacatgggcatcgaacccgttagccttgagcacctcggcaagaaatccccattcgatacaatcatatgctttgtgcatatccgtcttgattcccataaatccttttttacccctaattttcctcattgtgtccaaagcttccgtggccaaaaaacatcagcaatccaccgcccctttaggaaagcgttctgaaaaggactgatgatcttgtcaaaaaccagctttaaacgatccgtaagtatcctcgcaatgattttatacccaaagttgcacagactaatcggatgaaattgatcaaacgaagaaggattgtcacacttagggataaggcaaatgtaagtatgatttagttctttgacaaaccttcccgaaacaaagaagtcttgaatcatagcacagatgtctcccccgacaatattccagtaggaacgatagaaaacccctgagaaaccgtccgggccagggcttttcagaggatgcaggctccgcacagcatttttaattccatgacagaaaggcacacggcccacctcagagttgtccaaaatcagtcacgcccacctcaaaacagagactcaaactccctccccaaacttggacttgaactcgtgaacaaccctttaaagttgtcttcgaagtagcgacatatatcctctctgttagtaatccaattttcagcagtcgccttgatcgccccaatgtaatttctgcgcctccgcgctatagtagcagtgtgaaagaacttggtattgctgtctcccttagccacccacagctcccttgatttttgtttccagattctctctaatttatgttccatctcaagtatctcgaattgcatcgtagcttccttagcacaattctccgagtttattggagctccttgaatcaagctaagttgccgataaagggcacgaagcttcctatcacagaagccgaaacaatccctattccaaaccttcaaaccctctattttgttaaatgacaaaattgactctgtattttctaaaattgtacaaataggaccctgaactgatttttggccaaaataaaacttaataataatctgatttagagatgttatgataaaagtggttacattttatatatttgttcgtgttaaaaattatcttaaagttagttatattaaaagattgttaaaaaaaaaagctcaggatcttatttttac

SEQ ID NO: 238104 - DNA, 754 bp, Cannabis indica
gcacatgatataagtaacaatacttgaagagaggagttttttgcatagctacttttgccgacaccaccatttatgtggaggacttgttctacttccatttttactaatgttattatagcttttgctatatatattgattattgtgaattttaattgggcttaattaaaatgatgataccaatgtaagtgttggagagcttacatttatagtgcaacttcacaggggtatatttgacttttttatttgtatctgtacttttttatagatatctaaataaatataatatacatatggattccttacatatatttgttataaaatcgatcgtgtgtgaagtgatgaagaaggtcaaagttttgggctgataataaataataattactgaattattaattatttattttatgtcaatttaaacatatttttctgatattttttttttatttaagcgtttatatattacaaccatgttttagctgtactcgaacttaggccctttaacactcacacccacctatggccactttgagggttgattttttttttttcagtacttaggttatggtaatattaatttataagctctctgtatataagagcatacgtcattacgtgatctcaattattcatatactattatataatatatattgaaaaatagagatgtgtacttactaactatagatagtatcattcaatcacttttaattatttttggaatctaattgcctatatatattaagaattggctca

SEQ ID NO: 238105 - DNA, 963 bp, Cannabis indica
tcaaaaatggatgttatcatactcatccactactctgccttgagtgggtcagcaccaacccccaaacactggcaggttttgcttcctaaaccgctcatacaacggttccaaacgattccctacatccggtggtactctcagaggtgctggaggatcaagattagggtttagagcaggctgagcttgctgcccccttaattctctaatttgttcaccctgctgccagatagcctcttgcatcgcagcatataactcttcctagtttggtggtggtacaggttctcgccctcaccagcaaccccgagcctagctagctcgcggttacccctaccagtccgccgcgggtgcataatctatacacctgcggtcacattccaggtaataacaatactggtaagtatttcatatatcatagtccttcccacacacttccaatattaatataattcaaataatcaggcaatcaggtattcaacaaattctctatgaattaaaagcttactgaaccatgagtcaaacaagtccttgcagccgatgtagatatcaaaccagtcttcaggatttaaaaaccttggcgctctgataccatgttgtaacaacctgtgctacagggacgccatgtgtgtgtgtttttataaaattcttatttaaatactatataattataccaaaagtgtgggtaattaaatttttgacaattaaaatcaagcatataaaaacttctttatagtaaaagataagtaatgagaactacagggaccccctattttcataatattacaaactagtttatttgtacttttacaagataaacttagcaatcccaaaatactatcaacatggagcatcctgattactgcgccgagtcactgtggctgatatgtacattgctcttacgagcccgaactcatggctgctcaactttcgctttccccttacctgcaccataaagcacctgtgagt

SEQ ID NO: 238106 - DNA, 1316 bp, Cannabis indica
agatgattgccacccaagtactagctgcaatccaaaccgacggtgaatactccatatcgccccaagttaaaaggtcctgtgacaaaggattcatgctagagttaccctgaagaagatagataaagcataagcaatgtactatgtagagtcctagctatggacaccattgcattaaatgccaccatatgctttcaagacactgctgcaacccaaagcaaataataataattagtacatcctagcttctaaattatgttattactattcataaacagattgtactttaataagcttccattctctcttcttcattttcaaaggattctgctttctattccactaaaatggttaaaaggtcattctattgaaatgacatttaaatactttaaaatgcaaccaaaagtaacagtggaatgaaaattgattcatttccattgaaatgacctcttctagatgctttatgaagatcgatttaagcaagacttacgatattgttgacttgttctttgttctgatcttcttaatggtctttgtttccccactatattcattaattggatgttgaatggcagatttcatggggagttcaaaggtgaaaaaggtcttcgtcaagagatcctatcttgcccttactatttgtactgattatggattatcttaccagattattgcgtcaagcttcttctaaaatgggttttggtttccaccctatgtgcaagtctttgaggttagttaatctctagtttgctgacgatttggtgatcttttgtaagggtaatatgaagtctctccaaattgttcaagatactattgattgtttttgtgccactactggtttagctgttaaaaaaatccaaatctcatatttattttggtggtatttatcatgatagtaagcttcatctcaagaacattgtttagatggaggaaggtatctttcctttgagataccttggtgttaatttgagacctactaagtggagagcaactaatggtagagggattattgataagatttagaagaaactctataattggactagtagaaatctttcgtttgctggcagagctcaactcattcatttggctttgttgggaataagaaagtactagatgggcatatttatcctttctcataaggtgactgctgagattaacaaaatttgtagaaattacctttggggtgttaaaggaaatcgtagtaaagttcatcttacttcttgggagcatgtttttgcttatccaaaaagtatggtggtcttggatttagagaaggaaagaagttgaatatgactctcattgctaagtacatttgg

SEQ ID NO: 238107 - DNA, 1123 bp, Cannabis indica
gccgctcatagtacttcaacaacaacgagagaccctccgcacaaatcaagaacaaataaggcgacaatggatctccttgtctcaaccctctggtaggattaataggccccatagaatgacctccatgagtaatattatatgaaactgaagttacacaggacataatcaagtgaacccaatggcggtgaaagcccattcgaagcaacatattctcaataaagttccactcaactctgtcatacgctttactcatgtcaagcttgatagccataaaaccctccttcccaactctcttccttttcagatagtgcataatctcgaaagcaaccataatattatccgatattaatcggcccgggagaaaagcactttgatgatttgagatcaccacgggcaaaacatctttaaaacgattggccaacaccttagaaatgatcttataaagcacattacataaagatataggccgcaaatcagtcatagactccggatgttttttcttaggaataagcacaatattagtatgatttaactctcttggaaaagaaccaatgacaaagaaattcttaacaagagtgataatatcattacctacagtgctccaacatttttgataaaatcccggggtcattccatcaggtcccggagatttatccggatgcatttggaaaagagcatgacgaacctcatcatctgtaaccggttccaacaaccggttgttgtgttcacttgtgattgccgagggaacacaatggagaacatcagtatcattcacggctgtagcagtgaataatgccgaaaaataatccaccatgaccgaaggaagccttccattccaatcaacctaaacgccatctgcatctttcagcttttgtatcgagtttcggcgtcttctagatgtagccgaagcatgaaaatatttagagttgctatccccttcacgcaaccaaagttgcttgcttctttgcttccaaaaaatctcacgctgcagtagcactttattgaggttggtcgaagcctttttgaagttctctatggacacatcatcacagccccccttccaacgttgcacctccaacttacaatctttaattctcttgggaaaattccctgaataatcctt

SEQ ID NO: 238108 - DNA, 757 bp, Cannabis indica
ggtatactatgtgagcaagcatatcttagatgctaaaaccagttatccataaatggaacgactagcatttgcactggtgatcgctttaagaaagttgcgaccttattttcaagcacacaacattgaggttttaacaaactatcccttacgacaagttttggccaaaccgaaagcatcagggagattaatcaaatggttcgtagaactgagccagttcgacattagatacaaaccaagcttggcaatcaagaacaaccccttattgatttcatactcgagttcccaaacgacgaagtagccataatcacataagagggagttgaccctgaagtaccaacaggcgaaggatggactttgtatgttgatggggcatccaaccatgaaagatcagggggtggaataatcctcataagtcccaacaaattcaaggtacacgctgcccttagatttgagttttctgcatctaacaatgaagccaaatatgaggctttaattgtaggattaaagctcactctcgagataaaagtcgagtaccttcaagcatttagatattcgcaaatcgttgtttgccaagtcaatggagagtacctagccaaaggaggacgtttggccaaatatctttcttatagttgtgagtttttacaaaatttagacaacataattgttagtagaatacctcgtgcttacaattctcatgcagatgctttggcccaactggcctcaacaagagaagcagaattactcgacgtaattacta

SEQ ID NO: 238109 - DNA, 1923 bp, Cannabis indica
ttcttttaaaatataacagttacaaaattatggttattttgataggttctgtttcttttataattttatcccaaaaagaattaattttaaaaattataatattataaaaaaatttgataaaaatattaaattaattaaaaaatattaaacttacttaaaaacctaaattatttctaaaaaaatatttttaaaatttattttatttataaacacgtatcataaaaaaatcaaactaaattattgaaaattcaataaataatttaaacaaattaaaagtttttgaaaaaaacaatcaagtttatttatatttataaactcatatcttaaaaaaataaagaaaaataattaaaaatttaataaagatataaaattatattttaaaaaagttagaaattaaactattcttttttatgtttagttgtttacttaaacaaatctaaggtttttgaaaaaaaaaaaagactcaaacttgttcccataaaatttaatttttactaagattgaatttttaatttatttttttatatctaaatagatttttcaataaaaaaaataaataatttttaaattgcttaattagttttaaaattttcttaattattcaaaatgatttttttaagatttactaaaacaaaatgttgagtctttctcatttttattttgagtggatacgatttgatagttgtcaaagtttcggaagcaaagttattaatttacaaaggcatgtcagcatttaaagttaaatggaataataggatagaacataagagcccctccaatggagatgcaaatgcaaaatataaactcactttgtcaaaagtctactccaatggtgtgctaaattgtgatgtaaatatctcacataacaaaaggtgatccaaatttggatcacaatataacatgatgcaaagtttgcatgctatgatttttatatttatcattatgccatttttattattttattattaaaatttataagttagcatgctaatttgcattaaatgactttcttaattattattattttattattaaattttatatttattattgtatgattattattattttatatttttaataaattattagataagcattgaatgatatattaaactttgcataaagatttacaattatgcattggaacataataataaaaattgatgcaaaaatattacaaaactattctcaaatatagatcaacttttgcatctccaattagagatggcctaatagaaagactaaattctcgtaaatataaaattttaaggaaaatttttaataagtgatatattttagggtacagaatcaatattatcgaaagtctaaggacaaaattattaattattcttaatttaaatgcatatgcaaccatttatactattcaactcgggttttataatttttttttcttaaaaaaaaaaactagaagcaatgattaagttctgttttggtagtttaatgatgcaaaagttggtttttattgttagaattttctttgctttaataatatatgttgaatttgtgtttagtcttataatatatattgttatttttctcatttctttgccctataaaattgaaattttcattgcagcctataattgaaatttttcaatgcagcctaaactttcaaggtggcctttttgaatccactcagggccagtttggcacagctatgctataggaaaaaatagttgtagctgtgctgtgagaaaaagtagttgtagcgaaattgtagaaaaaagctgagctaagtgtttggtaaattataaattttaaagtactgtgagttgtcaagatctattataatgataatgataatgttataatctagtttattataattacaaatatgtaaaaacttattttatataatattttattttttatattactttttaattttttttttcaaat

SEQ ID NO: 238110 - DNA, 886 bp, Cannabis indica
attgtgttggattgtgttagattatattgtgttgtatcagtattatttaatacaatacaatatttggtattgacttgtatgaattgattttataaagttataatatatttttaatacactcgatcccaacaccaactacgggttcgggtcccaggtaccgggtccaggtccacgtctcgagtctgggtctgggtccacgtcctgggtccgggtcccgtgtactgggtaccgggtccgggtccacgtcccgagtttggctctgggtccgggtccgggtcccgggtatgggtccaggttccccatccggggtccgggtcccggtctgggtctgggtccgaggtccacgtccggggtatgggtgcgagttcgggtctggggtctggggttcgggtctgggtccaggatccgagatccagagtccggggcccgggtctgggtccggggttcgagtccggggttcgggattcgggtctgggtccgggtctaggtccaggtccaggttaccaggtctaggtcccggttcggggttcggggtccggggtccagggtccgggtctgggtcccaagtcccgatccgggtccgggttggatattggtgttgaccctaaatcctttgtaaatattataatacaagctaatatggaccatttattatgtattaaataatacaacatacattgtattaaaaaatttagtcttaataattaatataataaattgcttaatctatacatagtgttatttattatttaatataatacgacgccaaagtttgctttttgtggtttcggtgattaaagatttcgatcacattgtggtctaatgttgatattgtaaatcagtcatctcaaatagataagtgattattctctttttttaatttcaa

SEQ ID NO: 238111 - DNA, 843 bp, Cannabis indica
gggggggggacggacccaaaccaagacctggacacgaacttgaaccgggaacctagtcaagttccaagtttgggatccaggtccaagttcggggtcggcgttggggtccggtgtttgaagtcgttgttggggtccaggttaagggccaagtttgggtttgaggtctgagtccgggttcgggattgggttcgggtttgggtctgggtccgagttcgagtttgagtctggggttcgggttcagggtttgggtccaggtcccaagtttagggcatgtcgggtccagggtctgggtccgagtccaagccatggtggggattgagatcaagtttattgttaagaatttatagttttacacaacctattagtacaagtctatatcaaacacaatattgtattaaataatactaatacatacaatataattcaacacaatagtatacaatacatcacgatataccaaccgagcccctaatttttttatgttacattgaaatggtctttcaaaatagaatagtcattctactaaaagaatagaaattaaattctattggaataatattctaacactttaaaatgtaattagacaaggaaatagaataaaagttattttctttctattccattctatttcattacctctaaccaaacgttacataattttgtaaatggaagagacaaaagtctacaagtgctatagttgagtgatatttttgccaaacaaaataattcaagtctacaagtccaataatttaacaggtaaaaaaacctttttagttcatcttttagggctcgtttggtaacgaccgtattaggtcgtattgtattgtattgtattatattgaa

SEQ ID NO: 238112 - DNA, 1649 bp, Cannabis indica
caaatcataagactatattagtatatgtctctaatataaataataaattagaggactatatgtcagtaaatgtccttatttcaaaactgaatcttttaaactatttattatttatattgtcttttgtcacataaaaaacttaataattttttttttcattttttttttaaattagaagcaaattatttaaaaattatagtatatctatattagttttgttaaaatttttttttatttaaaagctatgtcgatttttttaattttttatgagttattgtgggttgttggtatatatattttgttgtacagtatatttctattttattgtatggtatgttattattcttagatgatatttatttgttattttgatatgtataatagtggtacataattttgttagcataataaaaatattttaatgtgtgtatataattttattggcatattacatatatttaattattatatttatatattttgattgtatgattatttattttaaataatatttaattagttttaattttattatatacaatggtggcatataattttgttgtcatagtatatatattttaattgtggtatataatttggttagtatagtatacatatatatactagtaatatatatattttttattattattttctatatatatgttttggtgaatagtatatgtatttttttattatatggtatatcattttttttaaataatatttaagttctattttctattgtactttttttgacatgatatataattttattagcgtcctatatatttgtatttttatgaaaatctacatagaaaatcccataacaatcaatggaacaacttaaatcgtacaaaaatccacacacatagaaaataccaaagaaactaccggagcaattcaaatcgtaaattttttttaaaagagagagaaacaaagaaaaaatactgattgaacgcacaagagaaatcaccggaggccatttggccctatgattgcacgagttcgtctgaggagcagaggtgttgaggtcgattggccctgtgtttgcacgagagacatggccaaagtttggccttttgtcgtaggagagaaaaagtaaaaggagagatagcgacttaacgtctagggtttttaattttgtgtttttttctatccgattttttgtactctacaattaatataataaataaaattattatttacttacaacttctttaaaaaaaattaagaatagtaatatattaatattttcattataatgcttgatatagtgacgcatcaggtgtgtcggactatgtttacccaatcgcgtttggcgcgtcactataagtcaatatatttttttaaaaaatagtagaaattatgggagttactcttcagtgactcctcatatttttagtgacccgcattataggatactaacaatgaatttttagagtcattttgtgcgtgtcactaaaactcactcctaacctttcagtgacccgcatttttgtgcgggtcactaaagagtgtcactaaaacctaattttgtagtagtagttccctccaaatgtgtattgattattgggaatgaaagaagctgacgatcaagaacaagtatcctttgcctaggattgatgatttgttcgatcagcttcagg

SEQ ID NO: 238113 - DNA, 1106 bp, Cannabis indica
aataataaaaaaatctaaagtaagtatgaaaaaattaaatgcggtcattacaaacagaaaataagatgaaaaaaacaaggttaccactgctagagtgaagagagagcttaatttctcgccttttcttgacacataactatcaaagtttgtcataatggagtgtgtataatgagattttttagttgttagtttttactttttcaagattgagagctaaggactaggggtgttcatcaaaccgttcaaaccgctcgcaccacacaaaaatgcggtttgaaattttttgcgttagcagtttgaatttttcttaaaccgtgcggtgcggtgcggtttgcgattttgaattgttaatatgtggttcaaaccgcaccgcaccgcacattataaaaatactaatttttctatttatttaggtccaatatgtgaatgttcaacttaaagcccactaattattgtattgttgaaacttaactttttttttaatatttattttcaagtcttatggtatttttgacaagtgtggctcaagctttgttgtatttgtgatagtttaattaattggtgatagtccaaactgtagaaattgcaaaaactacgctcaccattttttgcggtgcggtttctgtagttttttagttttgcagtacaggtgtggtttgagaaattggaaaaactacatgtacaagttgatttgaaaaaatagtcaaaaactgcatcatccgcaccgcgaacacacctactaaagacaataaaatgagtgaaatttctagtacatataaacatacatttatgtatgtatgtatatataacaaaaataattatctaattcaacaaataatagtaaagatcagtcgatatagattgaaaattagaattaaattcaatgttattaccaagtgtagtctaggaaagaaaattgattttgtttttaataatttttatggtattttctattaaataattagtatttttgcctcctgaatttttgacactacctgatcttgctctctacaatatacggtttgttaaaaatatcctctaaaatataataattacataagggaaatagaaaatcaaaaaaaattttccctaaaccaaaaatttaa

SEQ ID NO: 238114 - DNA, 1655 bp, Cannabis indica
cttaaaaaaatgtaaccattgaaacttcttccatgttatatatataataagaaaattaataaacagtatatatatttatatatatatgctcaccgtggcgtaatttgatttctccaatatccaagcctataaaacataatgaataattaactattttaaaagaattttaataattaatttatattaacattataatatataataaaaaatcatcaaagttccttaacaaacctgatataatacccaaattgccatgaatgcatgagaaagcaatattacgctactgttgaaaaactgcaagggtataatcaagtataagtaataataaaatatttttttttgttgtaatatttatttttctttcttgaatatatacggtatgatatctgaatatatatagtactaattaaaccttaacaaattcgggtcccaattaattttgagacacgtattctagtgctaataagaataaaattataacttgtaatatatataaaattttaaattttctaggtaggaattaattatcaattatttaattattagatatgatgcatgaagagaatagtatgcaattcactttaaattctaataaaaagttacaaaatttctatttatgcgttcaactttttcaaatttttaaaaggtgttggattagaatctcattctaattgaatttttatagtttagaggatcgaaatcttagaaagggagaagtttctctcttttccacctttaccctttggcatgaacttttataagttatttgagtaattcaagcttttaaatgtttattattttgagtcatcttatttattacaagtttatataaattatataattatattgtttttaatatattcacttgtgtcaagtctagtgacttctgcaactctcttaactaacatttcagttggttagttgtctagacatagaaaatatagaagtgaagtccactcaagcaaacctcagggtctactcaggttcacgcatgaccaaagtagagttatgtccaaggtggaggttcactcataaccaaagtagaagttctctaggtactatgacgaagttctccaagtaccatgacaaagttaatcgggtgccatgaccaaattcctcggggtaccatgatgaggttcctcaagtgccatgaaaaagttcctcaggtgccatgacaaagttcctcgtatactatgaagaagttccccatgtgccatgaccaagttccccaggtaccatgacgagtccactcaggtccactcatggccaaagtggagttatgtccaaagtggaggaccactcatgaccagagtcgtgaggacacgtgaccaacgaccttctaagctatagttgtgaggacacaaaggacatgtgaccaatgacctttagagctagaatcgtgggacacatgaccaacaacctttagagctagagccatgaggacacgtgaccaacgaccttcaaagctagattcatgaggacacatgagaaaaaatgaccaacgacctttagagctagagtcgtgaggatacgtgatcaacgaccttcagaattagagttgtgaggacacgtgaccaacgaccttcggtgctcaacgttgggcctacctctgaagtctaagtaactcatacaaacttgagtctacgtgaagagac

SEQ ID NO: 238115 - DNA, 842 bp, Cannabis indica
ggattcctataaatagatagtgatggactcaaaagtgacaattgatgatagcctaagtcacactagccttcactcaaactttgagccttctatctctctccaatttcgaatacttctctctctttttctcttcaatatttcaaaccctatagtgatagagtacatgcccacgcatagcaagttggtactcaatcatagtgtgtaagactgtgaagaatccaatcaactgaaggagaatcgggctcagatcttggtgacatttaattccgctgcaaccaatctaaggtttcttgaactttatatgtgtttaaattctattgttttagagattcatatttaggatgttaaataacatacatggtagtaaatctacatcctggtaaaataatccccaacacagatcacttgctctctcgaaagcaacttacatagataaggtgctagagagattctcaatgactaacactagaggggaagtgatgccttctagacttggtatccgtctatctaaggaatggtgtcccactgatccccaagaggaaaggacatgagaaaggttcattatgctttagtagttgaaactctaatgtatgctatgttatgcactagaccaaacattttctatgcagtaggaattgtgagcaggtatcagaaaaatccaggagaggaacattggactgtagttaagcatatactgaaatatttgaaaagtacaaggcattatgtgttagtctagaagggtggtgctttcaatctcgtaggctatattaatgacaggaagcatcttggatggtgtttactcttgggggtggagcagtggtttggagaagtgcaaaacgaac

SEQ ID NO: 238116 - DNA, 1661 bp, Cannabis indica
gtaatttttttcatagaaaaatatgtcttgttatagaaaatattcttattaaaaagttgttctatattgtgtaattttcctattaaagtttcaagtttaattttattaaaaatgaataataaataatttagatttttgatacatatatttgatgtagtgtaattataataaagataatttagttatggtgaagatattagagaggagtgttttcccatttacgttaaaaattttaatttttattcttacttatttttcgtcggggacgaaacgtgaaatcccctaatagagcagagaatctcttaatataaaaataaaatttatattaaaaattgtaatatataaaaaatattaaattacgcaaaaatttaaataccacatattatttattatattaactattatccaaaatacaacttaaaattttataaaaagaatactaatctttttaaaaacataaaatattattgaaagataataaaatattaaatgggtcgtgtcatccccctcctgcctcatttaacatttaggaataaaaaatgatcctcctctagttctccatttaagagaattcccactccattaaaaagcgggtcccatgagctcaatttccatggaataaatgtatatccttaattatatacaattaatccctattaagtatcttcatttgaggaaataatacaaaaaagtgaaaatagcttattaatttgtcaatatttctccccttttcgtgtattaattttttgtttaattatcaattttttatttttcttaacctaacaatttttttttctttcaattccaatgtttaagtaaaaacgtttaaattggaagaaaaaaaatgttattaccccgttactacctttgaatacaactatatataaagagttagttaaaccatgtatgtatgtatgtatgaagaactataatttgttaaaataactcaaagaaaaaaaaaataaattaagttcaaccattttggtagtagtttttttttttttgtttgatttaacctttgcacctaaagagaggtcggatataagtagacaaataaggaaaaagataagagtggtggtgagttctataaaaatttatattaaacatataccaccatgattggagaaatgattctattaacataactttatatatatcccgtcctctactcatgatgattctataattaacatcctataaagtaattttttcaccattaaaaataatacatggtcctttagctgtggaagtggaacccaaccatctataataaggtagtggctaatatcttatgataacataagccttacgtttgaattgacatcatctctctctctctcccctacaacatgtcatgatgctctcttgcacttatatgactctgacacatcatccttgctattcataaaatagaattcataaagagtgtgattcttatttattttaatttattaaaaattataaaaaattattaataaattaagttaattaaaatttttactttcaaactttaacaaatactaaattatacgctgaacttctgtaaaccttaaaaatttccttaaattattgagattatcgaatttaagaaattgtatgatattttatttaattttacaaatttagtaattgtttaggtagtaaatcatgattttaatatc

SEQ ID NO: 238117 - DNA, 960 bp, Cannabis indica
aacattaaaatattaaatttgataaaattttagactaaatttattttaactacactttaaaacttatcctatttatagcattatttatagtgtctcattatttttagtgtaacactataaactataccaactctttatatgttagtttttactatttaaataatatatattcatacttaaattttttatatatttattatttgtattaatttataatttaataaaatagtataataataaagaatataattttagtgtaacttttagtgttgtaattaaaatagaaaaaaatttagtatcaaaattctattatttttgtgttgatttaacattaaatttaccatttatcattggagttcactacaaaaaaatcttacttttagtcacaataaaatttgtgactaaagataaaaaagttgttgctaattataaattattattattgtgttgtaactaaaaggttcgtggctaaaagtattagtcacaaaaattacaatttgttgtgactaaatgtattttaagttacaatatttattatgtctaaagctaaattagtaacaacttgtaactaaatattatggtttagtcataagtaatttttactcacaacaaacttatgttgtgactaaaaattgttactaaaagtagtagttttctgtagtggttatcctaagagacgagtaatgtgaaattacatacttttagttgattcattaattaataaattaattaatttaattttctcttatctattttccacccctcctatgagatataaaattgattctaggggaaagaactattgttattcaattattaatttttttttaataatatatatataaaaaaaaatggtgtagctagagacttgggaacaatataaagagagaaaaagagtttaaaaaaggttggagcaaaacgtgatggaatagtaggattagagagagagaaagagagaga

SEQ ID NO: 238118 - DNA, 1146 bp, Cannabis indica
caattctgaatgtcacttttaacaagccaaatagagtcatcttcgaccccaaatagctcataagcaacttggaattgtattatggacaactaggccaccttttgacggagttccaaaaggtattgattgaggaagtttaccgtggttggacataacgaccatgacatttttccttactcggcctctcagggtgttttggaggttgtgttggaggaccgagtaaatcttcaaaggccttttgcttctcttcacgggttgcttttgaagtttcttggtgggtggttgtgtctataaatatggaagaaatagtaaagttagcaatgtcatttatgaataaacacaataagttataaacaaattgaaacataataagtattttctaacaggtgtaagatagtcttttggccatgctacataacattttatagcttgacctattgttgttaatgaatcttcagctatgggacacgcgcagtgtattctccacactgacttcttaaatacccaacgattatctttgtgtaggtattcatcattttcaatggagaactttccatctttcaaatatttctccttcacaatgtagctcgaagcaaccttcagtaccatcccatcaggctgcaattgacggtgcatcccacacggtaaggtctacaaatccaaatcaaacaagcaacaattcaatttataaattgaccttatttataattttgcattagatcaatttgtaaaataacattaagattacctcttctgaactaccaccagtaggtggcggtgctgctgcttgagcagaatcctctctacaatgcggtggtgatggagtagagacattggcagcacccgacggttgtgctataggatctggtggagtatagacattggcaagacccggtggttgtgctactagatcggaggcaaggtcaacatgggagttgttcatttgatgctcctccaacaccgaaaccagacacaacactgcaatgctgggaactaataagatgaatgagctcattcactttatcctacaactttttgttgctttcctctatctcacgcacgcgtctctccaaatcagatgatgtctggtttgacccatcggtgtttttccttttagggcgtggtgtgttgaaatatttggtttgg

SEQ ID NO: 238119 - DNA, 958 bp, Cannabis indica
acgaccctctaaagctgtgactcacaaaattctcaggacggttgggaatattaaccatagtagcagtcttagtaacaaagttatagcagaaaaaaactctaggcgaactccagctacagaccaacatgctagattcgtctttccatgctcctaaaacttgtataggtagaaagaaatcaaacagctccccctcatgaaaaatttgaatggggtcatatgcttcccattcagtgatttttccttcactattgtggttcttaccataccaaatttccaaaactccacagtgtattctgatgaatcctacacggtctcctaaacatagaatacgaagatccacatcccagcatatgttgcaatttgtatcgattggaactttcgtgattgagaatatttcacgctcaacatcaaagacgatgatgtcttcaggtggtgcataccaataaatgaatcctttctcaaaaacagggtctcccaagatatctaagtcatctacgtttgcaacagaggggtaccggatgactctccaagcatcagatcctaaggtcaaaatactagccaggttcacatgtttagcacattgaagaagaagaattttgaaagtctcattacctgattccccgcaaacacccagtccgaaggatgatttaacaattcttagtacatgatgacttgaaggtgaaggtggctgtctgaggaaaagtacttcctccttaagtggattgattatgaaagcttgggtagaagatgcccgagagtagcaaagtaatccattacaggacgaatggtagtcaaagtcgtctccttccaattcaccaagcgatttgagattaaaaccacataacttctcttcttcatccatccaatatatctcgtctccttttccataacatcttgcagaaatataaaaataactatttgtttgagattgagctatcggaggaatcggcggagcaat

SEQ ID NO: 238120 - DNA, 958 bp, Cannabis indica
agaggaaagccatacatgaagtagcatttttcgaccaaatgtcttagttttccacagtttgaacatgaaggtctatgtttcttgtttcttgcgggattaatggaggttgagggcttaaccgatgatgcaaaggagggtacatcagagttgcctaaggttctttgatgttcttcttgaactatcatggaaaagacatgtgagaggttcggaataggctcattgagtaggatctgagcacaaaccaaggcatatgactcgtttaaaccagtgagaaattggaggacctggttttggctatagtagtcaagaaatgccttcatagccccagaaatgcaggttgtgttgggttgaaattccttcaattcatcccatagggatttcagtttagtgaaataggaggtgacagactgatcaccttgatgaaaacgagtcaattgtgttcgcaattgaaagatgcgagggccattggcctcattgaatctttcaccaagatcttgccacatacccgtggcaagatcaaagtgcattatgctttaggcgatttcagcagagacaaaattaacaagccaagacatgaccatgttattgcaacgagtctaagagttaagaagattacaagtagctggtcgaggcaatgatccatcgatgaattcggtcttgttcttagcagcaagtgccattgttatgcctcttttcgaggattggtaatttgtaccattgaggatggaggacaccaagacgaggccaggatgatcgccgaagatgaggaagaacgcactggaaacatcatcaacagtaccaggatcttgagttggttgagaagagggatcagccgcaggggaaagaatagaggagtttggacctagctacgatcgaggtcaggttgatcgacgaggagcagcggaagaaggaggagacagagcagagatgtctttaggcaaggtctcagactgttgag

SEQ ID NO: 238121 - DNA, 861 bp, Cannabis indica
aaaacattggtcttgcgagtggaatagaagataaaatcatgggttcaggcctggccacgtctcgacaaaaagcgacacttcgccctcataaatttcttgcatgaatcgcctataatgactggaaatctcttcttggttcaacttaatcaaatggtctctaatcctggcatcatttatttccaatttggactgaggtttgaaatttctgggtttatatgggtaggctatatgtttgggatattctggtgctgtagattctggagaataaatttttgaaccaaatttggacatctctacaaaagaaagacaatcccaatttctggatgaaatttatcaaaccagaggcttaaggaatatggaaaacctaaactaaaccctaaaaattacccaggagatacaaaccctaattgttaaaccaaatgaagtaatgaaatgtaagacaagtcataactcaaataaaagcaaagggacaatgagatagttactgtatgaagttgaaaagctggatactagagacttctgcgaatggagacgtgacggctggcgggataagttttttgagcactgggagtcaaaaagaaggttcgagtaaatttgcagaaagaatgtcagagatagggatggcaggcacagattcagaaagctcgagtggaagtttcagaaagcttaagaggctgtttggctttacagtttaaaaactgtattctgttttttaaaactgaaaatagtttttaaaaacggagtcgtttggcaaaaaattttaaaaactgtattttaataattgagttttaaaaaactagaaaacagaaaacatcaaaatgtgtttttaatatcaaaaacaatttttttgtctaacatatt

SEQ ID NO: 238122 - DNA, 845 bp, Cannabis indica
gtcgtttaaaaggccatttagcgtcggttataaggacatttggcatcggttattgctatataattgatgttatagggtacatatggcgtcgattctattgtaataactgacaccatagggtaacttttagtgtcggttgttttcaaccctacagcgtcgcctaaatcagcgttggtaaaattttttaccaaaaccgacactgaaaggccttcaaaaccgcctctaaagcccatatttgtagtagtgctactcatttaattgtgtaattgttttttttttggacttttttttaattcatattttatttcatgtcttaattaattattatgtactcactttttagtgtgatgaaactattttcataaaataatgataaataaaaattgtgttcgttatgcatatgttctatcattgtctcttttatttttatttttagtggacatattacaaaaatatttcttattatttcaaagatttgtatatagtcagttactcttttatattaataacaatagatgtatcaaaatcaaatggtggtttaaaatattttaagagaataaatataaaataaagattatataattaaattaaaagtgcccaccatagtaacattttaatggagtttgccataataaatttatatatttttttagtagtcaatatggataatagagagattatagatgagtttatgtgagtatatggattaaaaaaatttgacatatattgtattgtctattagtaatactttaaaaatttggcccattataaaaattttgaaaaaattaaataattattctaataaaacaaggcttggggggtaaatgcatggtcaaatccctagg

SEQ ID NO: 238123 - DNA, 915 bp, Cannabis indica
aatttaaaaattaattaaaaatacttaacaaattacttttgaccttatactaatatgatttcatttcatttattaatataatttatttacttataaaatgagtcacatatataattttttagtaggacgatctaatgattaatctaattttaataacgttaaattacttgaaatttactttattaacagtctaatgatcattattgtgatatgaataactcttttatgataaacgacacactaatgaaaagatgtttattacatcggtccagtcatacatgatcaaattatgcacaatacttttactacatgtctatccacatatgtgatctgaatcaaaattacacacactaaaagtatagtgtacagtaaaccgtacttagcaattccatattaaagattctcatactttaatacactgtcgacttattttattatatcatataatcttaactcttttgtcatcattataagattatatcttctctatatgaattaaggaaattttagatatttaataattatactcttatgattaatatattatttatcttataattgtatttcatatctctaatatgttatctattaattacttgcttgtagggtataaatctcaacaaatacttctcacgtccctatgttatgtcgaagaggcaaatgtgaggcattatcataatgtggcaacgagacgaactatactaggtgctttccttagtctttcaacatactcacaagtatgtaagctcttaaagaatttattatctaccttttccaataggttgttgttctttagtatatactgtgtatcttgagatgaatcttttgcattgattgttcgtcttgttggcctcacaaagcggtagttattattcacgactcacccttatctttgaaagggtgagtttgaatatt

SEQ ID NO: 238124 - DNA, 610 bp, Cannabis indica
gtaaaataattccaacactaccactgttggtggcgagctatgggatgacctgtagggtcgcccattgaataacatcagcgagttcaatgaaagagctcaagtggttgttcgaaaagaggaagcaagaaaagagatgaagttattaaagactggctcaggaagaaaattcaacactgtctcgacaaagaccgtctcgaccaaggctgacaatccaggggcctctagttcaaaaaagaaagataactctaaggagtgagccaaggacaagaaaaaacttgggaaaacatctatctcgcacatgagcacaaattcaaacaaaaatatagaaaacaaaacccataaatctagaataatataataaaaaaaacaataaaaataatatcttgaaaaatgtaagatttagagagggtttcgtgaggagagaactttttttttataaaaattttgatgagagaacttgaatattgttcattctcaattgaataacagtacaagagttctacaacaaaaatattgtacacctattcaataatttaattttctcactgaaaagaaaagtcatttgtggccccctttccccaaatttattatcatttttattttttgaaat

SEQ ID NO: 238125 - DNA, 1133 bp, Cannabis indica
gtcgagcacaaaagatgctaaaatataaaattgcatatatggcatataaaatgtattctgaattccaataaatgtccgtaaaattataattaataactaatatgcaagttttgaaattaaactgtaattatctactaattttcaaattaaagttaagcggtctttacatacgcatacccaatgattgtatattattattttgttctatattatatacaattttctatcttgggttgtttagtttatctaacataattaggtccttgtcaatttcctcctttgcatccacttagaatagtgtttttttttcaatgcagaattattacgactcaccaaggtgctattaagaggagttgaagaggtagtttctgtgtgaagaacacgctaaacacattttgtaaagaggagacattagaaccagagcaaacttatgactttccagagtcaaaaacaataaccatgcttgaagtcggtatgctaattatttccaatgtttattccactaagaaaaaggttcgagacttacccatgtgacagaagtggccatccatcacattttctgtcatcgctgagcaaaattcataaaattaaataatgcataattaacttaaataatactcctagagtttaataaaatctttgaaattgaaaaattataactctagtgcccatttctaataatgggacccacaacataataaattcatgcataattattaaaatatcaataattaacgctaattgccttgactaatctatattctaaaatgcggtcattacagatatattcttttacttaattaaatattagaaagcataaattagttacccgaaattactatctagaatcgtttcatcaaactaagtgtatttttctaaattaattttaaaataatccaatgaaaaattaattctatttatttcaaaattcgttatgttggtaatttaattttaattaggttaaactagtataattagcctaatacttttatttaaataagacaaatgggccttcacaatgggggttgttcatgtgagatagggttgggccagtatgtcgaacccactactaatagccccctaactctcacacaaggtccaaggagaggactttaacctttcattaaataatt

SEQ ID NO: 238126 - DNA, 850 bp, Cannabis indica
taattttagcaaagaccgtcgtgtggtgtagcttttcatctaggctttgatgcttcctttcttttcattttgcaaacaacttttatagcttaggggactgttgagagcgtgacacggtgttcatacttaatgtccctctctcttttttctttttcttctgctttcgctgcctttgggatatttgtacccgatgtttgcctagaaaaatccctgcatttatttctggcagacattcggagggggcctctttccagcggttaggggacccccattccctacttttatgttagggtttgatttggaggctaactgctacacttctctttttcagaatcttactaatctccttttatgtttgactgtgatatatttagaaatgagatcataattgttaacaagggttagaaagagaaagttttaaggttagagtaaaaatatttaattacacttagattcaatatatcgttatattttattttgtaaatgttgagaaatataacttcttagtaactttttttttctttgttattaaaacttcacaaggattaaaaaatacacaattagtatacttctaaattataaataaagtattcttacatttattttgatttatcacttgatatttgatattgcctagttagttataatattttttttattattattttgagtcatcaaatcaactctatatatttatctaatatatttatattatcatttaataaaaaaaatacttaatatataaatttctaaaaaaaataatcataaataaaatttgatttttcaaagattataataatgatataattataacgaccatgcaattacataaccaacttcatatggtatt

SEQ ID NO: 238127 - DNA, 2421 bp, Cannabis indica
gggggcggtcggtcgtgggtcacgtaggccggtcggctgtatgggtggtctgccgtgggtgggtggtctgcgtgtgtgggtgtagcaccgagcgaaagagaaagagagaaagagaggcgaaagagagagagagggcaggtttcaaatgggaggggggtaatgtgagaattaagtaaatgttatctcattttaccaatacccctattttaagtttagagaaaaaattattccctaatgcatgcatagaaattcaaatttccctattgaaaatagaattcaaaattataattaattatacgcataaaaaaataataataataattaattatatgcaaacaaaaaaattaatgcgtccaactaaatatttaaattttatttttgataccgtatattattataaattttttttaaaaaaaaaaaaaaactaaacggataaatacatgtttaattataatatagaatgtaatatgaataaaattgagttatatattaacaacaaaagtgatactactaataaattctcttctaattataaaataacttatatataatacaatctgttggccaccatacactacataaatatagagttcttgtaataatttaatgttttgaaatccttttgcatatatgtgtgtagtttatgataaggctctcattaaaatgcctcaaaagttgtggcaagtgcaaagacatgataatcttcacaagtacaagaacaacgatagtgaccagatttacacccacaatcgtcccatttctttttcttcattcccattttagccctactacttttctccattattacttcctcttcattatgatcctctgtcgaaaccctaaccctaatctccaccttcagtttagctaatgatgatactgcaccactaatgtatctaccactagtacggcctatgttcacccacttctctaagaccatgtttggagactcatcaataacttccttccacaaaatctcagccctacccaaaagttgggaaccccaaaaactactactaaataatgttgatcttttttttctccaccttagctcgaaaacaaaactctctaattgcttaagttttgtgatcatgtccgtacgagtatggccacctgtagtgaaagaacactccaaggagaaagactcgttccaaacgtggttgccattgatggaaatttctttggttttgagcccaacttttctcttgtctttttctcctccattaacatagtacctcacaaatatgttacctttggacttgggttctacgtttattgcttctatgattttcagttcgaggctcatatgagaattaggagaaaccatgctctactatactcgtgtgtgttttttctttctttctttctttcaaatctcaacactagctagtatttatatagatatgttatacgtagccaaattatctatagaagagcataatccaagagaatatttggatcttattgttgaaaataatactatattgtcatattggttgtgaagtgaactaagtaaaagattgagtggattattgaatataaattatatacgacctagctacatatatatataggtcccttagattcttgaaggggtagatatattctaaaatgactcttattttaattgtttaaaagaccaattgtatatgtcaaatcttataaatatgtttaaatatgatgtgtgggttgcccactaatataaataatcataattaagttgtaggtagattcacaatccactaatacagtccggacacgataaaacttttcttctaaatgggagtaggtgagtaagtaaaatatagattatttagtatttttgtacgatggttgttgaactattcatattattgtaaattgattttttattaaattttatcacacgtaacaaatgaaataatgatataactgtctagttagttatcacgtcagtatcatgccaatactttttaatttaattttacgtaattttttaatcattaattaattttagtttaataattttataaaaatgtatatactttttattttttttaaggttaaattatacacgtagttcctgatgtggcaattagttttcttttgtgctaagaaactgaaattcattaagccaaaacgcaaagtttggtgagcacatggggactcaccttccagaaacgcaataaaccattacaagaatgggacaaaccccatcgagcaagagcatgcgcggcgttatttaaaacacgagaaatccaactaacagaacagtcaagattaaccaacaactcatacaatttaacaaaagagaaatgagataaccaggaaggaggagatttgacaatcagacctttgaccaacagagcattatccgtgaagaaatccacccctactaactgcagatccttagccaaatagaccccaaaaagcaaggcctcc

SEQ ID NO: 238128 - DNA, 1320 bp, Cannabis indica
agatcctggtaaaataaattccaacagccatagtggcgtgcctgtgtataagagtcatgagtgcatggaggaaagcccaatggaggcttgaagcgaggacgttacacgtgaaatatatggtctgagagagataaaatttttcatggatgaactaacatgatagttctcatacaacttcttatgcttcaaattatttggaaaagtttcttacaactagagggtctcaccaacaatggaatactgtgcatgaccctgcccagtgtgaaatgcaagaacaatagcctaaccatctgagggggttccttgttagcctcctaatgcacctaggttaaaactaaacatagatgtgactctgaagttagtatcaaaagttcttgttgtgggtgtgattattcaaaatcatcaaggtcaggtagttgctggtcttttaaagtcagtttaaggatgtttcgttcgaatgaaatggaagctaatgctcttttccataacctaaattgggtgttgtagttgcaattgccaattactcgtattgatattgatgctctgcgagtttctaatgctttgagttctatattagggatttatcatgctttacagatttaatttcaaatgtttgttgtcttttattttatttttttcttagagttattagttctcatattaagagaaatactaatcaagctgcacatggtttaacaaaatatgttctggatctagacatagtgaaattttctattttattttcgctattgttgcgacaattttctcaaaaagaagaaaaaaaaaatagaatttccctataaacattcctatgtaaaattatggaaaaactaattatttttgttaattgataataaataagtaattataaatatacatttatattgtatgagaagtatgaatttatcaaacagcaagcatttggcattagttttaaaaacaatgaggatcgatatagaatggataagttggcacattttgcaatggagtacttggagtttggacactatttttgtatctttactcccaaaaattaagataatataagataaaaataaagggatagctactttgaatctgaaacatcaaattaaaactttggagtatatatgatggtgggctcacttttcgatcacacaaattaaggatgaaagctaccctaaaatatatacaatattatggaatatattcatagccacaaaacaaaaacaaaattttatttttcctaaaatataaaaatacaaaggtgccactctcagtaggataatcattgcataacaacctggatagaggttgaaaaacaaggaaaaactacaaaca

SEQ ID NO: 238129 - DNA, 917 bp, Cannabis indica
cgaactaaaatgggatgaggtgcagacaacttagagacagtgtgaacccatttcctaatttttaaaaattcatgcacgtcaggaaagtcatctaaaatcactatttattcgaaccatagctcacgactaccaaaccatcgttggtacacaaatgctttggaggcatcaacaaagcattgaacagaggatgggtcgacatttgagataggggcttttggaggttttgtctttttggagcctttggacactgtgttggagaagtgtctgtagtggggacaggaatagactttgtcttggactttttgacaggtggttgataagtggtatcacgcgatgattttctttttggctaaaccctttcttggttttgggaaggtataaagaccttaaatggaggacgaggtggtcctatggggttcgatttaggcaacgacgaaggctaggcaggggacacaggagactttaaactcaaagaggaacgagtgactctatttgaaatagactgagtgtgtgacgatgaagaagaagccattttagaaaggggagggctcttaccttgaaatgtgtgaggcttttgagtgactggaggcaatggcggagacgaagacagcaatggacttggaaagcaagtagaatcatcaaaccccaactggtaagggacaatggcttgacatggattggccatactagtcacgactgtaggtttgactgcaggttcgacaggaggtattgatggtggaatgagaatgcctttaggggacaccaccatgggagtaatattctccattatagacagagagatttgaggactacaatgattacggtttcttgagagtaaagtgaaagagcctattcacttttcttaggccgtaagtagagtatacctttgacaaagtttgaccatgaaaaggaaaaaa

SEQ ID NO: 238130 - DNA, 1021 bp, Cannabis indica
ggtgtatttgtttgcacttaatgagagaatgaatttgatttggtgaattcaatcacttttcgacacttaattgatcttattgatgtttttttttctttctttctttattatttatttgatttttagataattgattagcattagtatcatcaaaagcgaagagctacatataatataacttatttatttcaagcaaaaaaatgtatacataatttatttatttattaaatatggtagtgataattttaaatcttttattttattttttacaccctacatatattaagaaaaaaaaataagaaataaatttgtgttaaagctaatgtaaggaagattaaacaattgaaacttgatttcttttaaaataaattaatatatttatcatattttgtatttgaatatatttttttgaaaacaaaataaattaaacaaattaataaaaatatattcagatgcgaaaaaaataacattctgaaaattttaatatttaaattcaaatataatattttattatttaaatatgcattcagactcaaaaatttgatcttatggcattttacccaaggttagatgttcaaacctaatatgttgtgcatgtgcttatgttaattttttttattatatctttgtgctggtattttagtatattctttttcttaatgaatctgctgttaatattaaataacttaaagatacattacttagggaactgaggcttatcataacatttttattttatagtattttagaagtgtatataagattacaaataaatttcaagcattgctacgagataataaggtacatgatacctctatatgacatagtattttataattagttataactaaattaaaataagtgggacctaatattaaattgtactaataacgattttacacatcagtgctaagcactatgagtgtcgaacatttctattagacaccagtggtgcctaacacctctagacatatcgtcttgtaattgtttagtaatacttctcaaaagttattgtattaaa

SEQ ID NO: 238131 - DNA, 1111 bp, Cannabis indica
agtatttttttttcttctaataataacattctagaatttttattttaatgttctgacaatttttttttaccatgctttagttctagtttaactataagggaactaaacaaatgaatatacaactaattatataactaaaaattataaaaaataaaatgtgcatgtatatgggttgggggtaaggccaccttacacttaaatgtgccttcgcccctggacacatgtcatgaatatagaaggccacaaaccactaaaataaagagtatacattatgaaaacaatcattgtttaacatcccctctcaaactcaaggggcaagggagcaccgtgagtttgttgcgtaactcctgaaaacgacatgtggcgagtggcttagttaaataatccgcttcctggtcagctgaaggagtaaactcgagtgaaaaagaaccttgtttaaccttttcacgaacgaagtgataatcaatctcaacatgtttggtgcaagcatgaagaacgggatttgaagccaagtgaagggtactcatattgtcacagtgaagagtgggaggagtgggaggataggaaccaagttctccattagcaagggcacaacattcgaattcgttgcttgaatgaaataccaccttttgtttggaagaggaccaagaaattagattgagacccaagtaaacacaataggcactagtgctaagtcgatcatcagggcattatgcccaatcggtatctgtaaaataatgaagctcaagtgtggggtccagttgtagtaaaagaccaaggttggatgtccctttgagatactgaagaactcgtttgggtgcttgatggtgaacggtagtaggagaatgtagaaattgacatagcttgttgaccgtgaaagagatgtctgaccaagtaatagtgcaatattggagaccacccaccaggctacgataggtagtggtgtcttcaagaggatcaccatcatagatagataaaggagtgagagcaatcagagtgttggctagtttagagtcaagtaattcagttttggtaagcaagtcacggatgtacttggtttgtgatagatgaagaccagacggagaacgatgtacctgtatgcccaaaaaga

SEQ ID NO: 238132 - DNA, 1462 bp, Cannabis indica
tcgttcaaataattatactattttaattattaattaaaataaaaactaaaatattaaataaaactaacactacgtggcttggcacgtaacaatcacctagtatatatataatgtcttggtttcttcaaaaggcctaattatatatattacatgtgttgtgttataagtggtaaataaattttaattttatttatcaaatataaaatactattagtaaatccatgcaatattaacatgcagacaccacttttaacaactctaatatatttattaaaaattaccaagacgacgacatctctggtggcaagagctaggatatcagcgcatgaaactttgttcctgcaacgagagtctctgtcaacagctgccttggctttaatgacagtgtcaaaaccatctccagctagagaaagattgtctgggtgatccttctctgcgtttccatttggtgatgaaagcataaccgaagcatcacacccctaaattataacataaatacacatcttcacatatgttaattaaccaattaatatatgcatttaagtactgtagttagtaattaagctaattaagtacgaacccgaacaaagcagtcgtggaaaaagagtcgaagggtggctggagcagttacaaatgtctgtcggaatttgttgttgacggccgatcggactaaagattccacatttggacatgagtttttgtagaagttcgtgctaagctttgattgagctgtaactgttgtaacaacgccagaacaagaacaatggccggaagagcaagaatgaagcttctaggacttgccattttgatcatttaaataaatatataaaagtattatgttaagagtgtctgttggatagatatctagttttacttgagcaaatatactttatacgaatattggttgttttgaagacctctatttatatagccacaaatgttaagagttgacaaaatcaaaacaaatgagttgggacaaaaatattattcttttgctgataagtaataacactctggcagccaattaccatatttaatattaatacaaaataggttgttgttccttctccatgttctttgaataaaaaataagagtacaaataaacttttattatttacattatcatatacttatgaaaatattttttttttgaaaggacttatgaaaatgtttagaaagaggcttatttcatttaataatcattgagccaatggaataaaaaaataataattggtaatgaatgataggatttattttattttataataattatgaagattatttaggcccatatatcacggggaaatgcaattatatactacttatacttgtatattatttttcatgtactactgcacaatcatcaattattatgtttaaatcaatctcaacggtgcctctcttaattatttgacaaagtaaaagccctgctcatttgtgcatgcatagctacaataatgg

SEQ ID NO: 238133 - DNA, 880 bp, Cannabis indica
tctctctctctctctcacacgcatacacctatttaggtgtgtgtgagatcaaaactctaactcaattgcagtgtctcatgagttgagtacacactgtaatacctaaatttattcatctaataagatttaatagcccactctattcctgagtgttgtgttgaggctggcttataagatcaagatgtagatttttttaacaaaattcttagattggattatcaataattacacgaaaataaataaggatactctgataggcttcaagaggtatattctttctttcagtaatttagatttaatctatatacactatgttgagattcttgagcttatgattcatattggataaaaattattttcatcaaattcgctttcacttttataactttgatatatatggaccataaaaaccaacaggtccactataagagaatatggttgatggatggagggtggctcatataaaaaatttatcaaataattttgtcaacggcgctactgcacaagattttgcaagtaaataaattattgtattgtttaatttcaaatattatattagttatatgttataattatattttatttaaataagggggactacttaatgagcttgataagaaaaaatttgaaagacaatctcatagtgatacatattgtaacaccctaactatcttaggcgtattacgtgatttttaaacgtactgtgcagctcgttgctaatcaacgaggtttatggaaaaacgtgattaattaaaactttgctttttcattaaacttataaccattttccaaaagtctcgggatcccgatttataaaatatttacaaaagtttcactgtttaacttttacatcaaaatgaaagtcgtctaacgacagtta

SEQ ID NO: 238134 - DNA, 1612 bp, Cannabis indica
gctttaaggccatccatcccaacagaccagatttacgatgagtgagtgaatgaatgacctcttgaccaatgataatgttgtcagaaattaaacgggaaggaagaaaagcactttgtgtgggagaaatgatacaactgagaatgggtttaagacgattaaccgaaacccttgaaatgattttgtagaaagtggagcagagactgatgggtcgatagtcagttatctgttcaggatttggccgcttgggaataaaaacaataagcgtctggttgatggccgataaatctgcatccccattcaggaaattgagagcagcaatggtaacgtcatgacccaacaagtgccaattcttttgaaagaaactgccactaaagccatctaagcttggagctttatcatgagcgagttggaatgtagcagttttaatttcaagggccataaaagtggcctgaagaaggtcaatttcagcaggggtaaggcgctcagaaatgcctaatagaacatattcaatgatgtcattgtctggcaattgactttgaaaaaggttagtgaaatattgttcaatagttgtcaaaatggaggtcgtatcagtagcccaggaaccgtcaagtcgttggagggaaagaattttattggtggttcgtctcatggaagccatacggttgaagtatctggtatttttatcaccaagttggagccatgtgactcgagagcgttgttgccagtaaacttcctctttctgcaataagccactcaactcttcttcaagcttcctaccctgctctaagtgatcattcgtaggttggggtaaggagttgataattttgagctgcgattggacattacggatttgagtagcaagcggggggcctagagattgcttccaatgtttgagtcgaaaggagcaatttgttagtcttttcttaagaccaattaaaggattggagtgagcattcgaattggtctgtgcccaagcatcgcgcaagcaatcctcaaatccaggttcggacatccaaagcttataaaaaatgaagcggggggtatggttacgatgatcgctcatatattgcaaggtgagaataagagggcgatggtcagaaccaaaaaagtcgccatgatttagacagcaatcaggaaagatggcatcctaatcatcattagataggcaccattccagccgttcctgagtgtgatttggttgcttttggcgattagtccaagtgaagagattacctagcggagtgagagggtgaagttcatgattgtctatgaaagattgaaattgcgtggatggagcacgagacatattacccccaattttgttagaaagagacaggtaatcattaaaatcacccataatgagccacggctggagccgagcgttagaaacgagtcggtctattaaaggccaggtgtgcaatttattttgagcatgtggtgcaccgtaaaaagcagtaaaagtaaaatcggtaaagttaggaaatttaagataacagtgaaaatgacttatattatagggaagcaaggttacatccacatcatgtgtccagagcaacaaaagaccaccactaagcccgacacgtgggacctctaaaccgttaggaaatttaag

SEQ ID NO: 238135 - DNA, 1187 bp, Cannabis indica
atttgaaaggctcttggagcaagtatctagcactaatagaattttaatacaacaacaattaccagagtactatatggatgactccctatgagatgttttatggcaggaagtgcatatctccaattcactaggatgaaactggagaaatgaaatattaaggtcatgaatcagtacaacagaccaataaggctatagaaaagatcaaggccagaatttttgcctctcagagtaagcaaaagagttatgcagacccaaagcgcataaacgtagaattctaggtaaaagatcatgtattcctataggtgtctccgatgaaggggatcaaacgtttcagaaaaaagggcaagttagttcgaggtttactgggcattttgagattctcgaaaaggttggactagtagcttatcgtctagccttacctccaacactttcagcaattcataacgtatttcatgtatatgttacagaaatatgtctcaaatcccactcatgtactgagttatgagaatcgagaacttcagtgagatttatcatatgaagagcaactagttcagattttaaatagaaaagataaagtcctttgaaataaaaccatagctttggtcaaagtgctctgaagaaacagtaaggcgaaggaaaccatcggggagttggagtctaacatgagagctcattatccagagttgttcaagttagatttcgaagacaaaatccttttaacgggggataattgtaaagaccgcttaatttcaaatatgataaattagcagataattagggcttaattataaaattagattattaattataatttatgaatttttggtgatgtaatttaattctgggtgtgctaattacgttatatatgaacttttatgtttttcatatattatgctcggcaacgttagaacgtgacgtttggccgatagaatcatatttttgtatggtttagtattttagtaatagtggggcaacctatatagacattgggaatatctaagattattcgaggtattagatttgaccaaattacccctaggtggtaagtatgccttttggcttaggcaagggcaaaatggtcttttttccatttgggatatttgtcctttagtgattttatttatattaattgaccaaaataagttattatatactagagaattaataggttttattcttttattagt

SEQ ID NO: 238136 - DNA, 1682 bp, Cannabis indica
ataacaaccatagacactaaatctaaaactatattatcatgagaaaacacaaaaacacaaaggctagatagaaagaaacaaaacttagagataaatctcctcacaaaaatacaaagtgtttaattaaaagtattgaattatataaataatatatataacatgagaaaacttgtgtagtctcagaataagggttgggaaaaatgacacgtgtttgttcagtcgttggctaggtgtttgacaaaatatctcaatccaggtgtcctgcttagatatgtacacgttgaccatgcctactaagagaaccacttgctcaaattgcttcaatttgattttctttgctatatttcctcaacatatactttatatatttttaggtcttggaacaaagctttctgttactcacagtcactgacatttgtgacattacgcgcgtctacaacaatagttgttcttacatcaagattgtatttctttatctacaacataatatataaaaggtgggctagctaagcgaaatgtgaaagagacacatcaacatataaaatattgaagaaggcttaatttaacaaagagagaaagggaagagaagggcttttattttttcagcctatatgtataatggagtactccaaagtagagagtagtactactccactgcagatgccatggtggaattttcccaaaagcatggcatttctattagaggtcacaagatattttgggatgatcctatataccagccttattgggttcattctctttctccagacgagttgggaaaggcggcggctaaaagaatcaattctgtagtttctaagtacagacgaaaggtaattgggtgggatgttatgaatgagaatatgcatttcaatttctttgaggataaacttggtaaaactgcttctgctgattactacaaaataactcagcaacttgatccacaaacaaccatgttccttaatttttcattcaatggatggagttgagtaaaggcctaaggtgtttcattgagagagcatgtggtttgcatgataggcttaactgtgagattgaacagagcatcagattttacaggttttgctcaaagcttttgtggtttccatcttctcaattacctaaaaaaacccagaaattgaatccaaatctctctctctctctctctctatatatatatatatataacactaattcttaaagggtgttgtattgaatgaggctacctatattgcaatactaactagaccagtaaatctaagcgtaaacatagtataaaaaaaatattacagttcctaaaaatacacacacactctgctctttcctccccctaatcacatcatgttactaaattttaagtcaaagagaaaaccataacaaaattgaaacaagtcccaacaacattacaatcaatacaaggaaatatcaaaagtagaataaattacaaatacgaaaaaatagataactcacctagaacaaaatagcagaacctcggcttttttctgggttgtacggagaagaatcgagcaacggcacacctggtctatgaaagggaaaagggaatgatgacaatggtaaattagggaaagagatacacacacataccagaagaattagagagagaaagagagaaagagagagagagagagagagagagagagagagagagagagagagagagagagaga

SEQ ID NO: 238137 - DNA, 1770 bp, Cannabis indica
ccaagaaagttgttgtattatgactacttgtttttgtagcagtgatattgacatggataactgtgttcttttctgtggtcaatatttggtcaaggcttggttggttaatattcttcaacacttggatttttccattggctgcagcttggaacagcttggaatccatgcgtgtgatgatattattgctagtgttgttgtttgaatctgccttagaaataaccaaagtagttgatgaagaagccatagaagtatatatattgctcttttaaataaaagtgaccaactacataatcacacaacaccccttatatatacatcaagttctaatacattttgattaatttaacaattcaaaaaagacaattttatctaactttcaaatcaacattaccaacccccactcatatttttttattggccatgcattagtataatttgtatagtagtctagaaggttttaggcactttggtgttttatatttttttatttggccatgcttagcactttttagacgtgtcgttttgcgattgattaacgatactccctaaaaattattaaattaaattatatgagtttcgatacttagttggaccaatagcgatattaacacgtaggagggtgctaggcaccactagtgctttttagcatttttctaaaagagcgttgctattgggcaccagtggtgcttagcactttctagacatgtcgctttgcgattggctagtgatactctaaaagttattaaattaaactatatgagacctgatacttagttgaaccaatagcgatattaacacgtaggagggtgctaggcgccactgatgtcttttagcatttctctatatgaaattaccacgttggcgaacatttactaagaagatagagaaacttttaaatcctaacatttagtgatctgagatgtgttgatatgagtgataatcttttatttttaaatcattttattggataatattaagatgttactcaaacaaaatttagaaggaatgggatgagtagaaaaaaatagtaaaacatgaaaattatatggtgaacaatgaaatcaacaatttaattcatagctttcttggaacttttgtgtttgggatccttgaaaatgaaataactaatttcatgtgctacttaatctgttgtttgggtttcaggagatatccagccaataaataaattgtctaaccaaaaagtagggctgtactgggtccaaaaaatttgttgagtgtgttttatctaaagtaaaatgtgagtattattagatcttttcttacaaaaattttcaaaaatataatttttttcaaaccaaaaaatatatataaaaaaattggtacaatatttaaaaaaagagtcacatggagaggatcttgaagtgactgaggcaaaattggtacaatatttaaaaaaagaggtaaaaataatagactttaaaaaaaagagtaataataaagacaatataaaaaaaatataaagtctaattttctcaagatatataaagtaagaataatataaatcactataaaataaaattaccattaagttacccttaaaatttagagaaaattattcaaacttattgtttgtcttttatattattattataaaagcaaaagtgcattacactaactttacattaattgttgccgaaagagaataatttacttttgtaaggacatctttagtgaagagaggactcaagtcaagtaattgtttttatttaaacagttctagtgtcctactaattggtcttcaaacgaatg

SEQ ID NO: 238138 - DNA, 5073 bp, Cannabis indica
attatagtgttctatattgtatataattttgtatcttgggttattgtattctctaacatttctatctattacatgattaataaaagtagtatacttttttggacgttttgtagtttatttagagttgatttaggaatattttatttttctattatttttataggattcaggtcttgataccaagcaagtctaatgtatccttgaacttgctaactggtatcactttaattaactgttggaacttattttaccaggatctagatttactaatgtgtatgtttgattatattctataatctaacatcctaaacatgaatttcttaaaacaataaaataaatacatataaagttctaaaaaactttacattggtggcagcagaatatcatgactacttccgttcagatctctaacccttgttcctttctctcacagagtaatcacaagatctgaaattggatctcctttaagtgtggaaattcttcacaatcttccacactatgattgagtactaacttaatatgagtgggcatgtactctataactattgggttcaaaattaatgaagagaaggagagaggaatttcaaattctatataagagaggctctaagtttttcagttgtctaacaaagtagaaaactaggttattcttagattatgagaatgagagtcatcttattccttatatagaatttcatctaaggtttggatttaaattatatggaataaaaaagataaaataatggttaaataaaagattatgagaataagagtcatcttattccttatatagaatttcacctaaggttaggatttaaattatattgaataaaaaaagataaaataatggttaaataaaccttagtgactggccatactagtggatcccactagttctaatttttctattttatttaacaatttatctttcattcactaatgccatattttaatttcaatcctataaatgtcaaatctatttatttaataattataattgattatcaaataaaattatcatttaacttatttattaattagacgttacaaagtctcttaattaacaaataaactctaaaatttcttttcttcccaattaagtccttgcttagtgaaaattcataaataagacagagtctaatattgaattctaattgattaattaaaaccaattaactgagtctgcaagccaatattatctcaattagttcggggaccacgggcctatataattaagctattccaataagtagttctagaatatgccaagtaaattttatatcttattaattcttcctgactccactataaattcgaaattgcactcttaattatacagaatgatctatatgttccaaataaatatattctattaatcatccattgtttcaatctaaataatcaatgatcctctatagatgatctacatcgagtagggacaaatttactgctctacccttcaatgtattttatccttaaaatacttagctccttgtaaataattcagtaaactaatataattattgaaatgagtactcaaccatttaatctaatttagccatgctcgaaggaaatgattattttacttctattcatttatagaagctatagattcagtatctatgattagcgctccaactcaattatactaccatgttcccaagatgtaagtattggtaagatctaataggtcaattttaacgaacaagtcaaaaaatacaaatagtacaattgaaccagaacctaaccatctcaggattgagatcattgatctaagatcaactaagtgatatttacttagaaaggtaatacaataagtttaagatatcttttctatgtgaatatcagtccagtctgatatataacaatgcatccaatacaagattactttaccgattccttggaaaagacataccactatccaagtgtaagtaaactacattattgattatcatatcagtggaaatccagtgtgttgataaatcgtaagactgtatttaatcacataatcttgattacttttcactgtgtagacaacacggtaatcatgaataataatgtgctaaggatttaaatgaatttataaagcaaataaatgatcagaaaataaatatgtgaaccaagcaatacattaaacaagtaataaaatagttatgttccttcattgataaataaatatttaagattacattgaaataaaattttagttaaggcacaaaatccaacattaacatgtctgtatggttaattttggtagcaatcctaaccaccttgatgagaaccttgttaactatatccattaggaaatgaagtttgatgttaatgtgtttagtcctctcatggaacatagtatttttagctaagtgtatagcacattgagagtcgcagtgcctacttacatccttttgataaaatcccaacttagtcatgattccctttaatcatagagcttccttgacaacttcagtgagggcaatttactctagtagataaagctacttcatgttgtaaatttgatttccaactcactatattcccttcaacagtgcatatgtagcctgttaatgaacttcatttgtaaagatcaccaaaaaaatctgagtcacagtatccagtaatagtgcattccatttgttcatgtttttgtagcatatcttcaaatttaaggtacctttcatgtatctgagtaaccactttactgcttgccaatgttcaaaccctatttactcatatacctaatcaccaatcctgttccatatgcaaggtcaagtcttttagagatcttagcatacattatgcttcccacaatattggaataaggtgttccaaacatcttcttttcttcaagagaaactttctcatccgtcaatgccttgagtttgaaatgagcaccaatatgagtatttaaaatccgtgcatctttcttgtcaaaaatctcaaccacttttttgacatatgcagcttgtgtcaaatatagggcacgattatccctatatctagttatttccataactaggatcttagcagtttgtcctaaatatttcatgttgaattttgaatctaacatctttcttagcatgtctatctaagtcttgtgcttgcatgatattagcttgtcatctacataaatcagtagatatatgtaactcttatcttccattaccttatagtagacacaaattttgaatttagaccttgtgaacttctggttgagcataaattcatcaaatctaaagtatcattacctaggagattgctttgggccatagagagatttcttgagaaaacacactttttcttttgcacccctctgaacaaaaccttctagttgttgtatggatatctcttcatccaagtttccatgtaaaaaagtagtttttacatctaattggttaagttccagatcatagattgaagtaattgcaagtattagtctaattgaagtatgctctaccacaagtgagaacacctcatggtaatcaactccctctacctaagaggatcaattttctacaagtcttgccttatatattggtatctcaacaccctcaacacttggtttccattttaacacccatttgatgcctataatcctcttattatttagtttttcaacgaaaacccaagtcttgttgtcagctaaagatttattgcatttcttcaaatttgagctcctaattgcatctttgtagttctcatgttcatgtagctctatcagatcaacaacattgagaacaaaagctgtaaattatactttagtatatctagcaggtggtatatctctcttttaaccctgtccctagcaagcacataataatgaagatcagtctctccatcttcatcttgagtatcctcattactaagtgtatcatccaaatcaagttcttgttcaacttgatcatgtgcctatgatatattctcaaattcaaccagtgtagaactttgaacactagatttcaactaagttttataaaaagcatgtttattaaagacaatatctccactaataatacattttttctcatcaataaccacatttttttatcctttaacaccactagggtagcaaaaaaaaaacaccttttagagctctaggatttaattttccctaattagtataaatataaccaatctagccaataggttttagatgactatagctaggcttgtagtcagaccaaatatttatagatactttgaaatcaatagtagatgagaatgacatgtttataagataacaagcaatagttgttgcttctgccaaaaacattttaggcaaattagaatcaaccaacatacatcttacctttttcattatggccctgttcatcctctcaacatggccattctactgaggtgtttttctcacagtctcgtgcctttcaattcttatttctatacaaaacttgtcaaattcaaagttacaaaattcaagacattatctgtcttaattttatttaccctttgagatgtttgtttctcaaaatcataaaccattccttgaacttctcaaaagtctcatccattgtcttcaagaaatatatctagaatttcctagaaaaatcatcaattatagaccaaaaaaaatattgagcttttcaaagtgagaaatgtacctttgcacctgtgatgatttttagagatttgaatgtacatactccaaagtaggggtgttcgtggtgcaggtggtgcggtttttgactattttttcaaaccaacccgcacatacggtctttccaattttccaaaccgcaccgcactgtgaaactaaaaacctgcaaaaaccgcctcgcaaaaaatagtgtggtgcggactatcactaaataattaaactatcataaatacaacaaactttgagcaaaacttatcaaaataccataaagcttgaaaataaatatgaaaaaaaattaagtgtcaacaatacaataattagtggactttgagttgaacattcacatattggacctaaataaatataaaaattggtatttttataatgtgcggtgtggtgcggtttgtgttggaaatattttaccaggatctagatttactaccaagtatgtttcattaaca

SEQ ID NO: 238139 - DNA, 941 bp, Cannabis indica
agttcctctttgatgacttcggcctttaccagaggaccaatgcctcccataacatatatccaaagaagtgtaaggacctcgagaaacgcaatgtggaagccactttgacaattaaggagcttgaggagaagcttgcttcttttgagaggaagttggaggaagcaaatgccaaataaaaagttgttgaggaagaggccaaaaccaagaatcatgagcatggttcgttgaatgccaagtttgttaaattggaggctgagtcgaaggttatgactgacaaccacaccgcaaccatggataagctggagtcggagaatgtaaggaccattgagcagataaaaatatatcacaaggcagaagttgctcgtattgaagagcttgccaaggagaacatttttgggatatcttacttgtgttggtgccgaaaataggacatggacttcagcttcatgggcgagattttgggtgattttcaagagcattgtcgcaaggcccaagcgatcgcaaccaccatcgaggtcactgcagcggaagccaaggagaaaggagaagaggtcacttctgaaccagccccagagtcttgaggagaggagttacacaagggtgctggcatgttggcggtgctctcccttgtggtggcgttccgatgtgagagctgccatgtgttagtgctctccatgattgactttaggctttttattagttttacagtactccatgcgagagctgccttgtggcaatgctctccatggactaattttatgcactttcttatttgtatgagaacatatttgtgtttatgtctccttgtgccacatacattttattttggtttatgtattgatatttgggtccatatggatgggttcactcattgtccacttggtgtggagtgctcgctagttaaagctaacaagtctttcacatctttggaactttttaag

SEQ ID NO: 238140 - DNA, 1407 bp, Cannabis indica
aaggcataaaacatgttgtttaccttattaaagtacgaagtttacttaagaaggcgtgtcatttatcttatttcaaggtaataatttgaaacgatgtttacctaataagacgcatcgtttaccttattttaagatagttgtttaccttttgaatgataaactatgtttttgtttaccttatttaaggcacggagtttacctaataagacatgtcgtttaccttattttaaggtagttgcttacttttttagtgataaattatgttttagtttaccttatttaaggcacatagtttaccaaaataaggcatgttgtttaccttatttaaggcacaaagtttatctaataagacatgtcatttatcttattttaaggtagttatttggcacaatattttacctaacaaggtgtgtcgtttactttattttaaggtcgttgtttacctttttaataataaattctgttttggttaaccttagtattattattttttttttttttgaaagagacttagtttaccttatttaagcacgaagtttacctaaacaaggcttgtcgtttaccttatttaaggcacgaagtttacctaaataaggcttgtcgtttaccttatttaagacacaaagtttacctaataaggcgtgtcgtttaccttattttaaggtagttgtttaccttatttagcgccaggagtttacttaataagacatgtcgtttactttatttagggtagttgtttacctttttaacaataaattatattttggtaaataaggcacaaaattcaagtggattgggagatctaagctgtcaaaattcaagaaagatgttcttgctagctgctgtagtagggctggtgtataatttatggagagcccgaaatgaagctatttggcaaaagtcaagagtcaatccgagccgtattgttgaagaaacaaaatggacaccaaaaattcggattgatagagtaatgcctaaaaagatcaagagtattgatagagattggtttattgctttatagaacttaatcaaattttgatttcagattggtttatacttgtatatagattttggccctaattgggtgcgcataggctgtataaatttctctttgtgcaatacaattcattgatttatcaaaaaaaaaaaaaataaaggcacaaaatttacttaataaagcgtgtcgtttacctttcttaagacaccgagtttaccaaatatagtgtgtctacctttcttaatatacgaaatattcctaataagacgtgtcgtttaccttatttaaagtagttgttaacctttctaataataaattatattttggtaaataatgaacaaaatttacctaataaagcgtgtcgctttggcacagagtttaccaagtaaggcgtgtcgttaacttttcat

SEQ ID NO: 238141 - DNA, 991 bp, Cannabis indica
aaaaaaataaacaaagcctagcactcccaacaacatatcagttatattttctcaaatatatcattaaaattttactttatttattttacagcacacttttataacacaccatatattaacttctttaaaatacaccatcaaaatctcacttttttaaattttaatataatttattcatttcaaatatataatattagtatataaacatatcctcatacaaaattaattactaaaacccaaaataattaataaaatatatttagagtaatgaataatattatataaatgtagagcataaatagtaaatttaaaaaaaaatgaagaaagtgttgcttagaccatctctaatgggagacgtaaaagttaaattttatacaaaaagtagttttgtgatatttaatgctcactcaataatttattaaaaaatataaaataataataataatacaaagttaaatataaaatttaatgataaaataataataatgcaagtcatttaatgcaagtatgttagctaaaatattaaaaatagcataatggtaaatataaaagtatagtatttattttgattacaaattttgcatcatgttatattgtgatgcaaatttagatcactttttgattatgtgagattttttgtattataatttagtacactattggagtaagcttttaacaaagtgaactatattttatatatttaaatcacttatttgcatcttcaatattggagatgctcttagagcatctgctgtagtatatttttggtatgattttttaaaaaatgtaaagtttttctattttagagaagttgttatgagtgcgaacatttacattaatttctctgcgctatcttttaaaatacttcatcaaaactacactttttctatttatcttaaactcttacattacatcatacatcaatttctctatattttttctacatcattttaatattatatttttaaaaaactttttaattaaaataata

SEQ ID NO: 238142 - DNA, 958 bp, Cannabis indica
ttctatcgtaagagtatacaccttatatcataatgaccacatgatttaaaatcaatagtcaaaaaagcttctctaccgatagggaacttatactaagtcctaccgtagtcttgccctataatcatatataaaagtatataaaaagatataaatacactatttttgataaaatatatatataattttattatatatgaatgtaggttccacaattatatatataataaaatgataaatatatttcatttttctatactttatttttacgcgtcatttttctatacttaatttgacttattttaatttaaaaatacatttagtatattgtttaattaatataaaattaaccacttaaaattaatatgtgtttctttcccttaagaaactacctatcattattaattttggtaatattaaattgaacccgttaaattttaaagcactattcgtattttatttttaatttaactatttgattatttttaaaatatagtatataatatttataaaattgaaaaataataatattttccacaattgacatacattcttataaaattaaaaaataataatattttccacaattgacatacattcttaaaaaatattttagtcactaaaatttaaattttttgtgtattgtgttgttcgatattagtcccccaactatttagttttggctccatccttgtgtacacttgtatatattatgacatatctaatgtggcacttaacataatttttttcagacgaaaagggtaataactaacaaaaatagaatttgggtagttttgtcactaaaataattaatttagatagtgttacttgttaaaaaatataaaatataaatgattttagcccttaatatctcttactttaatatttattgtaaggtttatatgggtagaaaaaattgaactaattttcagttaatagattgaaatttgttgttcaagta

SEQ ID NO: 238143 - DNA, 1303 bp, Cannabis indica
aaatcagttatgaaaactagttacttaaaaaaactagttatgaaaataatatttgtgtcagaaactagttatataaaataaaacaaaaatttttgtttatatatcatataatagtaaaattagttttatataaactaaaaaatatacaataacatcataaaaatagagcaatcccattacagaacacttaaatcctgtgaaaccagtttcgacccggtaaaaaattataagaaaatataaatgttagatgataaagttaagagaaatcagtttcattagacaaccaaataaaaagaaaaatacacccccaaaaatacaaaaataaaatactgatcacaaatataaataaaataacacacaatgcgtaccaataatctgaaaacaaaaaataagtgtaatttttgaacttagaaataaaataataaaaaagtaacttaaaataaataaaaaaaaaatatgcaataacatcataaaatagaacaaccccattacagaactctcaaaacatgtgaaactagtatcaaagctgtgaactcggtgaaactagtttcgaccctatgaaaaattatagtttaaaaagcacattataaatctaaataatttttaagcataaggctgactcattttccaaataaataagtcaccaaagacacaagcatacaggtataagcaaatatgtataagttttaaaaattaattattgttttacagttcaccatactcatgatatactttgacaatttaacttgctcaatcaactagttaatcagttaaaataaatatcttaaaatgaaaaaaatattatgcactcaaaaacttttggagttataattgaattctcttaaaaaatttccaactttgttctagaactatcattataagaagataattagattaatatgagttagcacaatgaaaatttatcttatcactcactttatattggtctagaactctataaaagtcactgccactagatacattttgcccgttcacagatttaatgatgtcactcactttacaagtatctattttagttggttttagtccctgcagaacacacttcaccagctccactgaatcaatcaattcatgcaacttttaactaaaggactctctaaaaaaaaaaccaatcttctcaaaaaaagaaaagaaaaaaaaatttaatcgctttgccaaataacccacaaaaggcaaatgtaaatagagttgaattgaattaattttatcaccttattacaacaacatatcatttgcctaaaaccaaggtgaaagcaagaagagcatgctcacgggtctgtcc

SEQ ID NO: 238144 - DNA, 1245 bp, Cannabis indica
acattgtaggcatatacaattgtaatcttatgtgtggttcccttgggaactctatataagacttggtaatgagtccattatagtcaagtgcacaacttaggactcactatttgtctaagtaagtgtacttaagacggtactttactgatacccaccttgtacaatgtgatttacctagaaagtacccttgggtacatttgactagacctttgtttgtagctttgtcaggttgctcacctcccattgtctcttctatgtaggtgatttcgagtgttgatctggggagttgacaaccgttgtgtcataggtcctgtcaattttgctttgagaaatagcattcagcctgtccccttgttcccttctgagtggttctggacttatagtgatatactatggccaaaacaaaacaatcatgtcatagtgtgtcacatatgaccctcatgttgccaatgtggcaacgatggacagagttagagttgtagaggaggccacacaaccccgttatgatgtagatccggaagtcagccaaggagaggtgcctgatgttgaccaaggggctgagagttctaacactgggtttgaggtggaggagaccgcacctgttaggaggaggacatatagaacttatgttgtccttcccaactaccctctaggtgcatatgacgtcgatgggaagtcattgaacaggctaggctagcctttagtgataggtctggaccatgtcttgatacaaacttcagagcctctattcttgatgatggatcacagggagagaagtgggtctctccagcatctattattcctatcgagacttttgataggatactagccagtggactagtgagaggtgtctagtatgagatacccacgagggatgagagagcacactggcttgcctttggttggatggcatggtcgaagcatcatattcaacagggggtagtgttgctgttacacccatactttcgagatattgctacttactttaggatgtgtcctaaaaaatcaccttgaaaagaatataaaatacctctcgacgatgtttgttatatatgcagagctaggttggcctcagcctactccatatgtgattggatactactttgatctaaaatctactccaaagtagaactagatggggtatttatacttcagtcaagttagccatcagtggttgggtgacaccaatagcacgcctatgtcgaaagttggtcgatatttctggaactacttcattgcctaaga

SEQ ID NO: 238145 - DNA, 1302 bp, Cannabis indica
atacttagctgcacaaattttttaaatcgctacatatattacgttaaaatttccaactgtgattttaaatttctcttctcatccaatcatgactatgatcaacataatagtcactattatgatcctttcttttccattttccattgcaataaccaaaacaaatccacttccctttaagaaaatctatgcctttggcgactcttttacagacacgggcaacactaggtcagttcctaggcaaggtggcttcatccatggctctaaccctccgtacggaatgaccttttttcaccatccaacaaatcgatactcagatggacggttggtgattgactttgtggcacaatcactgtcattgccttacttgcctccttataaatatgttaagggaaattcacctaatggagtcaactttgctgtagctggttccactgctatagaccatgagttttttgttaagaacaatcttactcttgatataccccccaatctattcagactcagcttctttggtttgataagtacttggaagaaaagttgggtgtaaagctcaggatgtaaagtgtagagttgctgaattgaaaactcattgttttgggttggtgagattggtgcaaatgattatgcttatacttttggatccactttttctagtgatactattcgaaagttggcgatgactagctatactcaatttttaacagtaagattagacaccttttattaatattaagtgaatttagaaagtcattttgcatataattatcaaaaccatatcatggtaaggttttaagtgctgtacttttctatagatataattttaatattcaatcttttggcaaggaaacataatcaatatttgagtacatggtgaagataatactttactaataatcatactcttagccacaaacatacatgacttttaagctagtcctataatgactttactctagaccattagtactatctatgttttcataatcttattaacactcttcttatttgatatatatatcacttactggtttctacagacattgttaaagaaaggtgcaaagtatgttgtggttcaaggctttccaatgacaggttgcttatctttggctatgacattatccgccgaaaatgacagagacaacataggttgtgtgaagagtgaaaacaaccaaagttatactcacaacttagccatcttaaacttggtgacatctttgagaagacaattcccccaagctgtcatagcgtacgccgattattggactgcctaccaaacagtcatgcaaagtccagccaagtttg

SEQ ID NO: 238146 - DNA, 565 bp, Cannabis indica
aaacaagtcctaaagaatgtcaatgttaatgttaatccttcaatcaatgagaattttcatttctgtgatgcgcaatatgggaaatcccatgctcttccctttaaaaattcagcaaaccgtgcctctaaagtccttgatctggtgcatacagatctttggggtcaagcctccatcatgtcaaacacaaactataaatttcacattcattttgttgatgattttagtagatatgtttggatttacccactcaaatccaaatctgatgcactcactgctttcacacactttaaatcacttgttgaaaaccaatttggaacgaccgttaaaactatcagaacagattggggtggtgagtaccaatcttttactgatattactcttgaacatggcatcaatttcactcatccttgtcctcacacttcagctcaaaatggtagagctgagaggaagcataggcacatagttgaaatgggattaacactcttggttcaagctcatatgccactcaagtattgggttgatgctttctaaacagctgtgcgcctaattaataggttgcctacac

SEQ ID NO: 238147 - DNA, 912 bp, Cannabis indica
atagtattataaaaacagggctcaaaattgtcaaatacgcgatctaaacagataaaatacggttgttgtaatattcttttgtattaaatatgtgatattattagttattttgtagttttatgttagttggcttgcaacagatataattgttgcattactgtttcatcacagttgccttgaatttcacttcttctttctcttctggccgtcgaagttgaaatttttttcaggcaaagacaccttcgacttcttcttcactggacaatgatcacctttagccacggggagagcgaaatcggagtcatcatcgtcgatgactaggcgtttccctttagtcttgctaacaactaatttatgacctatttttgtagcttttttgacaatagagatggagaagcagaagatgatatataagaaataggagttttcatttatatatatatatgaaatacttttcaatgtgtattacctattaatgggtattaaacaaattaaactataaatattatgaatacataattaatttttattttcttaaatatttatttagttaaaacagtgttagttctactaaaataaataatattttagaagtaactgtgtaattactatgtagggtaattactagggtggtaattacacagtttagtaattacactatattttaaaatgcaaggtgtgtttggatatgaggtggtaattacatatgaagagttatttgcggcataagtggttaggtttttgcaactaacccccaattataaaattttagcggtaaaaccccctaaactcgtgttctgttagcaatttaacatttccatccatttttaactgttaactgccatggtggaatgcccacgtggacacagtgtacacgtggcacaattttattggtccacgtaaataaatatt

SEQ ID NO: 238148 - DNA, 953 bp, Cannabis indica
ccgcctatggattttctatcatcggggcaacatgctcaatcggcatccgaataacctgttaatgaaagatgatcactgggagagatatgtatgccatgatacattgttccttttaaatacccgaggactcttttcgtagcattccagtgggtggttgtcggagctttaaggaattgactaagcttgttgacgacataagtaatgtcgggtcttgtgtgacttaagtattgtagtgcaccaattaagcttctgtagttggttggtgaatttagaatttctccatcagtgatgggcagtggcttgccagcaatcataggtgttggtgtaggtttcacattagccatctcgactttttgcagcaacttactaatgtattttccctgagatagataaactccagttgagtctctgaatacttctattccaaggaagtaattgagaggcccgagatctttaagtgagaagcatttgtcaagacgattggtgaaggcttccaattcagtagtgtcattgcctgttaagataatatcatcaacataaataagaagcatgatgacaaactttggtttcttcagaataaagaaggaagtgccggccctggaattttcaaaaccccatactttgagagtgcttttgaactgatcataccaggcacgaggtgcctgtttcagagcgtacatcgccttggttaacttgcaaacatggttgggaaaggcggttgactcataacctggaggctgcatcatgtatacatcctccttcaaagtgcctttcaagaatgcattgttgatgtcaagctgtttaatcacccaattctttgatacatccaatgtaaggaccactctcactgttggtgcttttacaactaggttgaatgtctctttgaaatccaaccctggtctttgatgaaaacccttcgatacaagcttggctttgtacctttgatgactacc

SEQ ID NO: 238149 - DNA, 1573 bp, Cannabis indica
ctctttctcacatactctatttctctctctgttctttcttttcaattttttgttcttgatcttcatactctgaagtactacatggtatcactcaccattgactaacgtcattcactggagtccacatcctccgatcttgctctagctcccagaacctcatcggctgctgccaatacgacacaacactagctgaattccaactggaaccccttttcgaattcttaacctctgttctaactgttaaacttgatagaactaattttctgtcttagaaatctcaggtgatccctactatcatcggacacgaactggatgagatcttgcttgttggcagtcctcctctgcacacttacttaccggagaaccaaatcctgagtacagccgttggaaacgcaaggatcaattattactatcatggctgtgatcatcgatgaccgaaggagttcttgcatctattgcaagtttttcctgctctcattctgtctggcttgcacttgaacaaaagttttcgagtcaatctaaagtaagatttcttcaactcaagaatcaattttccacaattcgcaaaggtgggcaaaatatctccgattatgttgacaagatctaatccattgctgactcacttgttgtttcaggttctccaattcttgatcaagatctcatactccagttactaaatggccttggaccagagtacgatccagttgtgtcagggatcactgtaagaagcgatgttctctcgtttgaagaagttcaagctttgttgctctctcatgagagccgacttgaacatcattcttccatgacagatctaacaatgaaactccaagaaaatggtcccttcactagatcaaggaacaacccttatcatcctcctcaatcttccaaaactagtagcagagtcaacatctgtggccagaatccacaaaatcgccctttgtgcaacctttgtcttcgttatggacaacctacaccagtgtgtcattaccgatttgacaaaaattgggtcactcccaaaccaggatctgctagttcatctacagccaccaataattctactccccgtgcttacatgacagatcatatactcgattatgatcctcaagcttttgccagttcttttcttcctgattttggagacgattcaggttggtttgtggataccggtgcctctaatcacgtgacaaatggtcttgaaaaccttgactccactgtggcttatcctgattcagaaggccttgcaattggagacggtaagaaactttttatctataacattggcctagctactttacctactagtaataatactcatcttaatctaaattttgttcttcatgttcctgcaataacaaaaaacttggtcagtgtatctcagctcactaatgataatcttgcgtttcttgaatttcacaaaacatgttgctttgtcaaggacaatcaaatagggacagtgctgttcaaggggacccttaaagatggcttatatgttctagaagaatggtcaaaagcatcgaaagaagaaggcttaaagaaaagtgtatccaattgttatagacctactgctatgagt

SEQ ID NO: 238150 - DNA, 642 bp, Cannabis indica
aacacccaaaaatggacggaaagggctaactgctaacaaaagctgggtttaggaggttttaccaccaaaattttagaattgggagttagttgcaaaaacctacctactttagggggttttgctgcaaataaccctaattattatgtgtttaggaaaaattatttaaccaaatgtaagcataaaatatcaaattttccatttgtaatagtttttacttatatacaattaaggctactatattacaaaaaaaatgtgaaaaaaagacataattacacatttatatataattttataaatatttacaaataaatatatatttataaatttattaattgattttctaaaaaaacaaacacaaaaagtcaatatataaatacataaattaaatttatactttcatatcttatcagaataatatatttattaaaatttaatacgaaattaaagaaaatatatatacaaatatatttgcaaattttgtttatattttataaatagtgtatatatttattaaatatttgattaatattattaatgtgtataatgatattattactctagtatgtttattatgataatgttcaataaaatatgtataatttatttattagaagtttataattttaaaagtaaaacatttat

SEQ ID NO: 238151 - DNA, 4061 bp, Cannabis indica
aaaaaaattgctaatgcctttgtgttttttaaaattgaaatcaatttttaaaaattaatgggaatcatttgacaaaatttttaaaaatagttttttaaaatttgagttttaaaaaattagaaaacaaaaaaatattaaaatattattgttaattttcaaaaataatttttttatctaacatattatattttacatttttactaacatattcagaatcctaaactcaaaactacacccgaacacacaattcatagtatggtgttaaaatgttaattttttaataaaaaaaaatttaaaaataatttaaaaataatttatattaaacatcattaaatttttaaaatgacaaaaaattattttacaaacacaatttaaaaaactgaaagctgaaaacagctgctaatctcccatcttcttcttcgcccatcttctaacccacatcgagagccccaaacgtcgggaccttccagacggccggcgagaccagcactgcacgtcatcctactgcagttgcagtcgcacatcgtcccttttcccatctcactgaaacaagtattttcttctcgtggtaatataagattgttttaattctattttacacacatcctaaatttgtggtatttttttttttctttcttttatgtaattattcaaaattatcagtcggggccaagagattctccgatttagtgctttattaagagagaaagagcgacttcaacatttcgactgtatcttggtttaacacgagctttagagaattcttgtgattggtttattactagtttaggtgaaagcggtagttagttacatcttgatctaagtattcttgtgcttgtggtatttacttacatgattcatcatatttttgaacctttatatattcttttcttatcttttaaaaaaaatccatttgtagtcattataattcatcattcatcatcattcattgcttgtgtaatataaataaacgttaatattggaaaagttacagaagcagtaatcacttgggaattggaggaaaacccagaaagtgtggaggaagaaggaagtgattgggattgggattgatcattgatattgatgcggggttccattgcctgcaatagtacacgatttctacgccacttccctctacttttctcttctccaaccactgcgcccaccgcccgctcttctttcgcatcctttgcttctcgttctaacccaaggttagctaccttccctttctttctttctcagttgatgaaacaaagtaatctttttgtttgatgcccttaattgcttttctgtttgttgtgcccaatttctcatcaatttttcatttttcttgttttggcatttttgaatttgaaattatatatatatatgtatatttatattagtggtggcagcggaagagatatggaaataaagagtgatagggaaagatcaagaggtcatggtggaggaggaggaagaggaagaagtggtggcagtggctctggctctggtaaagataagattgatgcacttggtagattaatgtaagaatctaattacctgcttatatctttatatgttctttgcttacttatgttttcctcaaaatgatcattattattgaacatgaatttcatggattccatgacccattacagataggaaaagaaatttaattttatggggtttaatgcaaatgcttagttttagtaaatgtaaaatttctactgaagagggggagaatttttctgcttatgcaattgaagagcattttgttctgttatctttttctagccttttaattcttatatgctcactgttatatttttctctaggactcgtattttgcgccatatgtcatctgaattgaatttgagtatgcgaagtgatggatttgtgaaggtcaatgatattttacagctgaatatgaagacatttgcccatattcctttaagatcacatacagttgatgatgttagggaggtcagtgttcaagaattaatttccatttgtgttggacatgtttagttatattattgtttagtttaatcgccaaggtctgaagttcgagtacttgaaacggttttgctaggtcacaatgtttcatgttgtgttatgttcatttctgttgcatgaaatgtctgaagaaagaacttgatgtttttttaggctgttcggaaggataataagcagcggtttagtctcctagaagaaaacggagagctttttatacgggcaaatcaaggccactctgtaacggtgatgaatcttcttcccatgctttttgtgtttaaaattaactcttggttgttactttcacctaatgtaaatgccaattttttgaagggatagttctagatcatcttatgcttcctcatgtcatttacacatttcctattgcattatttaagttctgttttgttgtaagctgtcgcttgaactgcatatttctatcacagaacttaggtgacgtttggttagaaggaatgaaaatataagaatgagaatgagaatgagaatgagaatgagaatgggaatgtgaataggaataggaatggcgattctttctatttctaaatagaatggtcattctaccaaattaatggaaaagtcattccattggaatgacattctagtactttaaaatgcaaccaaataaaggaatgagataaaaattacttcattccattccatttcttcgccaccttaacaattagaatctgaatggcattttttgtgcacaacattaaacttttcttacctgctgcactaacaaattgtccaaaaatgcgaaacagtaatttgcactaacaatatcgtttgatttttcatttgtaccttgcagacagttgagacagaaaagttattgcaagccatagtttcagctgaagaaattccaggttttttttttctttccttcttaacatgttgtatcaactcaaacctatcagcaaaggagaatacccttgagtcaatatgtttgaattaacctttttgtttggctaactgattctctttgcttccgatttgcagtgtgtgtgcatggaacttacaggaagaatttggaatccattttacggtcgggtctcaaccgcatgaaaagattacacattcacttctctcgtggcttgccaacagaaggcgaagtcattagtggtaatatacatttgacatttgtcacatttccatttgtgtataccaaatctaaactttcttctggttggcccccttaaagtctgacattttagaactttgaaggtgttacagtgacattctattagctcacatgagacagttttttattagagcacaaggcaaaaaacatgattgtgctataatcaccaacatgatttcgattgtaggtatcaggcgaaatgtagaagtcttgatctatcttgatgtgaagaaagctttgaaaggtaagtcaatgatgaatgatgaatatttaagttgattatattttgattggtctctgattgtttatcttgattttgaggaagagggcatgaagctctacatctcagacaacaaggtgatcttgagtgaaggaatagatggtgttatacctgtcaagtactttgaaaagatagaatcatggcctgatagacagcccattcctttttaatcttatgataatactcactttgatatgatcaactgtggtgcttgagcttctcattaggttaaaggttcactcagttttccttcctcagttgaaatgaaatgaagaaatcaatttttatgattcttgtatttattttttatggttgttgacaatatagatgagcttgaattttttgtgaattagtaaaatgatcattgaatttgaatacaatttccatgatgcttgtatatattttttgtagcattgttgacatgtttaagcttgaattttttgtcaatatcatggaattaatttttttttttctctcccatctgtgaatttaactagtgaaaatttgtaaattatgggtttgtttgaaacgccgtattagatcgtattgtattacattaaattggattatatatcatatttttatataatactatgttaaactttaatttatactaaaatatta

SEQ ID NO: 238152 - DNA, 991 bp, Cannabis indica
cattctcacattcataattttttccacacaccatgtctacctatctctcaatctttaccacggctagacacacaaaatacatcagaaaaaattggtatatcccaacaacacaccccaacagatcgtggttctggccattctcccacaacagcagcatttccgcttgccaaattagcacctggtgccacaccagctgcttccaaaaccacaccagatcccgtggttgctgatactttttcagcccctgcattcaacattactacagcacctattgttgttaataacccaaacaagtgccaatctgatatatcaattgacatcctagttgattccccacctgatatgagcactaaaaaacctgatgtgagcattaacaatctcacaattaccacacctggtcttaatcaaaaaccagtccaaaagtggtcaaatcatcaataaaccatcacatttcaaggactatatttgccacactgcctccaccgcttttccaatcaaaaagttcatctcctatgctaaacttagtccacaattccgtgccgctgctcttgcagcctattctcatgttgaacctcgttcatattccgaggcatcacagttcactcattggctcaaagccatggatgatgaaactgaggctcaaatccaaacttatgcccccgtagctaagttcaatactcttaaaatattccttgctctcgctgccatgtacaattgggatatccatcaagttgacatcaacaatgcatttcttcatggtgatcttcatgaagaagtctacatgaaaatcccaccctgctataacgctcctccaaacagcgtttgtaaactcaacaagagtatctatggcctaaaacaagcctctagacaatggtacgaaaaattgagtaccaccttaaagtctgaaggttttcaacaatctctttctgacaattccttattcatcaaaaaaactccaaccttccaaatttccatcctcatatatgtggat

SEQ ID NO: 238153 - DNA, 1045 bp, Cannabis indica
caaattgcttctctacctatatatatacatattataacaattcaataaattatataatattacaaaattgatagaaaaataattatacattacaagatgattaatataaatatagggtttgaagttgaagctcaattaaccttattgtgattgtgagcctttagccaataatattcataagacttagtattattcctcctcatctcctctccaatttacctatattaattattaggatcagcttgaattaattaattatgattttatgtatcatccatattgttaattaacattttaattatttattgaaatattaatatttaagtctcaattatagattgatgaacacacaataaaatggaattaattttctcaccttgtcaatatattttgattaacaattaatcctcgagtagcaattaattaatacttgattagtaattataattaattaaatgatttagagagcaagaagatcattaacttaattaattagggctaaaaagtacgtatgtaaataattatggttcttatgttatctttttatagccaaaacataataatcctaatgctaatatgattataattattatgctttttaaattataattaaatatgattatttaatcataatatcatgattatgtatcttaagtttgaccttctaaattaatttaataaatgttctttcgttaaatatttcgagatttttagaatatgatggggacctaaatttaaatttactaaagagaaaattttagataagataatctcgtaataaatttaaattatttaaaaaaaatgaagaaatttaattgtgcatataaattataattagggaaaataattatgtatttgtttgagattttttttatttaaatatatattttcattttaaaaattaggtagttttataataatatggaaaagtaatttaatttcttaaaaattgaaaactgtgttacatttcaattggtgcaaaattatgtaaatatttttaattaaataattaaggatgcttttacaatgtacccaaaaaagagtg

SEQ ID NO: 238154 - DNA, 3768 bp, Cannabis indica
tttcaaccttctaattctataatcccacagtatatttactttgtattttttaatttatgttttactcttttctattaccctttaatttatatctaattttataggttatattcgtgttatttaattttgataatttatgtgagatttttttgtaatttgaatataaaagaaagtatttatcctttaaaattattttgtagtgatatttagttgatgtgtaataaaaaatggtagttctcaactggtttcttctctcatggtcactcaatctctgggctttttctgctttgtgctgtcactaactcatcagcgtaccctagaactatcaacctcgttcactaactttgttcctgctaattactctgttcacctttgtgctttgtttgtttgtcttaggtatgtttggtttaacagcagtttctcccaacacaaccactacacttagagcggcattgaactcctcaatttccaatatcaaccttcttcgaccaaattgctctaattcctatagaagcctatgtccttttccggtaatactcccaacacactcacacacaaattttatacagtgttttttccccttctgtggggacggtggaaaaagttcagctcagagttttgtttacgttaacttttattcgtgttttaatgcagacttcttcagctaactgcttgtacctgttgcactcaaggtctgctactttcaaagcaatggcagctcaggaaacagtgacgcatgaaacagccgtgctaactcattctggtattgatgtatatgggttacttgttattcatattttagacatgaagatttaacaatcgaattttttatgggcctctttcaggtaataaacaagcattaatatcactgtcagacaagagagacctcaccttattaggggatgggcttcagaaattggggtaaattcttcatcttataattagtatttcttgtcgtgtatatgttgactttgttcctgctaattagtctgtttctaaaattctcactggcattagtgtaacttcaattgagttgggttaatggaataaaattgtagccgataataattgatcttgactgttcaattttgtaagctattaagatatctgttgttattaactgaagctacacaattgtgtcgactggagggacagcttctgctttagaaactgctggggtgtctgttacaaaagtagaacaactgactcgttttccggagatggtgagttggttcatcctttgattataccttttgccattagattttgttgtcttttctgaacttttttttagtttaacctttgacccttcagagacattcgatatttgtagtttaacattttttttaaacttcaacataattaatgcttcaatattttttgccatgctttttattttctagttttaaacattacataatgttgaaccaaaacgtgtttgtcttttcttaattaaattttattataaagctagctcttagtaatttgtatgtttttgtttgtttttcccgagttatttttaaacttctcacgtgatttacggaattgaactctctgatttcaactgtgtagatcaaaatatataaatttgctaatactcatacttttacatcaatgtcgctagctttctagagaggcctttgtgcttgttttgcacacaatggtttccgtcccctacaattttattgaaaatctgttcaacatttcacagatcattcatattatcgcattcattttatggcaaaagaaagtaatatgatactcattctgtactcccttatttgtttatatttttcttattccatcttcaaagttttgtgcttgtacacatttaaggattatgtagtattctctttttattttgtgccaaaaagtggtaagtttgttctattgtaaaattgaaataatttgatagacccttggtagaattcgcctatgctaggaggaacaaaagaccacatatatgctgagggtgtttgggaatgtcagaggaggtgaactagtggctgagttgtattggattgttgagtttgctatcaggttatgcttagttgatgcttagttggatataagtttgaaggcatagggagggacaaagtggggtatatgacttgttgtacttagtgagcatttgcttttgggagagtgcatgtcttttgaaaaccttgttttagcttgtgttttcatttctattcaataatatccttgtcttcacactgttatctttctgtttccgactgttcttacttctgtatttggagatcctgtttggggtctatcacaatttcaggtataaaggctgttaaaaagcgtaggtacaatagataggacttccaaaacttttttattcacccaagctgttgcaagaatatttttatgtgttcaatatagctactgttaaagaaaccttttccattagtcccctacgtacagctcttgtctgtcctcatactttctgtgtgttgctgagtgcttccacctaatgtattcaaagttcaaacacagtcgtggacatttggtagatatgatagtcatatatcaaaatttattgttcaagaatgctgcaattgccttatctcttttaatactgaataggatacctgtcttataatctctcttacacatggttcatttttatttttgttgatatatatataaataaaatcgaagctttgtttcttatgtgtgtaaatattttcaactcagacaagacaacaaaatagggaggagcctggcatttctttgagcaaaatattattcaatagtaatacttaaacatgtacacaagagataactgtagttatctgttacagcttgatggccgtgtaaaaactttacaccctaatattcatgggggtattctggctagaagagacgaaaagcatcatatggaggctctaaatgagcatggaattggtgagttatgcaataagatcattcactctccttgcatgagttattttctttcactcacacacatgattatttgcaacatatcagttggttgatactttttgtaatacaggtgtgtttgatattgtggtggtgaacttgtaccccttctatgatacagtcacttcaactaaagaaattgagtttgaagatggaattgaaaacattgatattggcggccctgccatgataagagctgctgccaaggtttttcatctgaatcattttgcaaatttgtttttgtatgcgtgtgagtcaatcatgaggcatatgccttgtcatgaacaaaatatatgaagcctttatcgttgcactgtatatcagtttaaaatgcaatccagttgacatctttgattttggttatgctgtctcatatctgaacttaaatatgtgtcctgaatttaaacagaaccataaagacgtcctggttgttgttgattcacaagactatcctgcccttttagaatttctaaaaggaaaccaagataatcaacaatttcgtagagaacttgcatggaaggctttccagcatgttgcttcttatgattctgccgtcgcagagtggttgtggaagcagacaaatggaggtgttttattaaaatagtttctgctagaacaaagatactttttttttcttgatgtccagtctcacgtgttactgagaaccttctttattttgtcataggtaaatttcctcctaatatcacggtgccgatgacacttaaaagctcccttcgttatggtgaaaatcctcatcaaaaggctgcattttatgctgataagagtctttctgaagttgatggtggggtattgcaa

SEQ ID NO: 238155 - DNA, 794 bp, Cannabis indica
aaaacagagagttatattcaccttagaatgccaaacacgaacaatagtatcttcaccaacactaataatagtgcggttaagaggtccccaaacagtcctgttaattcttccctgaggacccttaatgactaaagcagattcaccaatctctgaaaaagttaatgaaacacttaagaacacacaaaccttaaacaacatatacctattttaaactcttgaatacaacaaaaaacaaaggttcacctcaaaaatagtgacttacgatcttttgcatcctcagcaatagttttgattgaattgtagaagtgtgacccataaaagggtcagcggtgataacagcgagcttatcacccactgagaaatcgacagatctagccggagaatcaaagttaaaggtgaataattgctgaccagtctgaacattccatagcatgcatagccgactgatccgcacttccagtcatcagcaacatcgaatcccccaaaccataaaccttccaacccatcaaacacaagaaattaaaaaccaaaaatccaaaaaggtaaaaattttaaagaagggagatttactcgatacttcgtaggaccaaacggcaccgttgtgacctcgatagggaaagagagagacttacggaggtgggagacctatggccagttcgaaatcgcagttcgagacctttagagctgatttgaacacagagcgcgagagctgttcaaaatgaaagtctgtttcgtcgatttgggggtaagtgaagaataggaggatttgcgtcgttcgcaatctctttaccgtc

SEQ ID NO: 238156 - DNA, 983 bp, Cannabis indica
agtagatctgccatttgaagttaatgtattgattatatatcataattaagcaaactataatgtgcattatgtaacatttaacttttttagcaatatatgtagtggtatattatatagtgaaaattttaatacatatacttggagtttaatttatatattgaagattttttttagtaagatgatatgaattattagttgctgggtgatcatcatttagagatctttaaaagttttgtagaggatgttttataattaattaacaatgttaattaatgagtattgggaactgggtttggaatatgcttagcagaaagccacaaattaattaagttgaattattttgggacaagccctgactttgtagctagtacaaaaagagaaaatcgggtaccctaaaaccctaataatccattctgatctttacaggccccagtgcttcaataatatatatgtccttaatttttagttataattaaacttgattattaagcggtgcacactttggtgcacaatagttttattcatgatattttgtataagatatttaattgtgctgttcccaaatgaaaattatatactgtagtgatcatcaatttttatttttaaattaatataatatacgattaatatcttcataagcaaaactacaaacaattgctgaattcaagatgagcatcaaacaaatatacaaagatttcgaataaactagctctcatcaaataaacatcattaatttgaattcaaaagtatgccaaacaatggatgagttcgaaccaacatctctagcattgatgctttctcttagagcaatttatagcttcttccacaaccaggaattcaagaaacaaaaattagaagataattaatgtgagactatatcttttggagcactgatctcactatttcactctataagtctatctattaaaatctcaaagtgaaccatatagaacctcacaatattaataggaataattacataa

SEQ ID NO: 238157 - DNA, 859 bp, Cannabis indica
attaattaataataattttttaaaaaaaatctacataatatatagaactattgactttcaagtttttatttttctaattttttcccctcattcaacgacgtgtttatccataaattccatcggctctttgtatgcatcgggattgtaactctgtcgtttttacttaattaacaaattaatcaagaaccatatttaatctagaaaaaaaataaaaatacagtgcagtaatttatatatatatatataatcaagaaccatgtttagccttttttgggttttgttgggaacagaagtaatatctactacaaatttagtttttagtgatacgcaaaaaaagactataaaatttggatgttagtgtcctctaatctaagtcactaaaatatataaagtgtcgctaaaaaataaattcaatattttacatttttttttaaaaaaatatttacatagtgacacgcaattggataaacatatgttatttagagcatctcaaatggtaaaaaaaatgaggatgcttgtttaagtggatagatgatgtggcaaaatggtgagatgctatatcgaaaagaatgtcattctaggaatttgtgggaatgctatacagctaaaaattaggaaactgttaattctatttttggtatatttaattgacaaaaatattttattatcctttgtatatttcggctgacatatattgatatggtttccctatttgtgtaaatctaaacttggaaggaaagttgactagatttcctatttatggaaattgaggtaaaaatggtaagttttgattacacattgattctttgctaaccagctgttattctgatcttgtgttgagtttcccattttctaagat

SEQ ID NO: 238158 - DNA, 1249 bp, Cannabis indica
aaagaaaacttagcccgaggtttattggacctctcgagatcctcgagaggatagggaaaatagcgtacaggctggctatgcccccagcgctggcagctgtacatgatatgttccatgtatcgatgcttcagaaatatgtctcagacccgacgtcccatattctgagtaatgaagcattcgaacgtcagccagatctttcatatgaggaacaaccagtgcaagtgctagacagaagagaaaaagtcttgagaaacaggaaaattatactgatcaaagtattatgaaagaaaaataaagtagaagaggcaacctgggaacttgagacggatatacagcagaaatattcagagttgttcaggtaaatttcgggacgaactttctataaggagaggatacttgtaatacgctaagattaaagaatcggattagcaaaccctaactagttaaatgtgtaataatgtggaattatattattatataatttaatatgtgaaactatactcataaattacattttgagacctcgttggtgtactgggggtatttttgtaattttgacccaagaagggtaaaattataatttttatgatatattgtgcttgtgggctatatcattatacagtatgtttattttgtctatctgcaggtattttctgacaagtcggcgcgatataatcataatcaggtattttgggccgaactgagttcagggcccaaaatacattttcaagatttatttatggaattatcttgataaatggaaaatctgaattattttattatttatgtgtgattgagatgacaattctagccttgagtatatatatatgattatatttgtctatgggggtattttggtgatttaaccacttatgcattattcaacaaataatattgaggaaattagaaaagtcattttctgaatttgctaagccctagttatcctctctctcccttattctcatcttctttacaaagttaattaattttggaatcaaagcttgaattggaggtgaatttgggtgattgttgtacttggagcttgagaattgtggtaaagctctctaattcctcattgataatgttaaattatgttattgaatgctctttgaatttattcttgatgttcttataaattattgatgcatgttgaagacttgaagtgatatgattttagtgtgtttgaatcattggaagtatgagaattgcatctagtatgttttgggggattttagggctgagtagtggg

SEQ ID NO: 238159 - DNA, 856 bp, Cannabis indica
attattttttttttgagtaatattatctgcttcacaatttattattgctgtctctcaaacaactcaagtatatacagctctaattttgtgatctacttcatggaactatccaggctggatttagatggagaaaattttgtctcactatcagtatcagccaacaacctttagaagctcaggtttgtattcagctgatctgcctttggatgaacttcttgtactctgttcagctagctgataagttggtttgtgatagattaaactcaaatgatagccaggttaagcaatagaaataagatggaaaagggtgaatagttgctggtattgatttagccaagacttcgagagcttgattctctcccacaggattacaattactaaaattcgccacactcgcaaaaatagattccactcactatttattctcacaataagcctcacttcaagagcttcaccttagctacacaaatacccaaccccaataaccaattactaacaaacttactgctgcccatttttcccagctgaatcagctgctggcatttttttttgttttccttcagtaatactgcccgcccaaagacgcaccttgtccacaaggtgaaaatgaggaaacttctcttgaatggtgctgaagtcttcccatgttgcctcaaatgctggcaagttaagccactaaattagagcttgaggctgaatttttcgagtgcctggacgaacatccaacactcactcgggttctaaggtccattcgagcttagctgtcaacctaggaggcagaatggaagcttgctgatgggtgcccaacgtagcacacaacatcgacacatggcacaacaaatggattcgtgagtcc

SEQ ID NO: 238160 - DNA, 577 bp, Cannabis indica
taatacttaagttatattttaaattctgtagctatatatatctagttgttaaaatgttaataataaattgccaaataacaatccctaattggtttaggtcatgaattttttttttaaaaattaatttaaatataccaataaaaaataacatatgtagataatgacttgacatttaatagacaggtacgtacctacaaagttctaaaaatatataatttaaaatattattattaccaaaaattaaacttaagtatttatttacaaatagacgtcaaacttaaatatttatattgtaaattattcttatttatttgaatataaaaaaaaattatatgatttatatatgttgtaattatgtaatacgtatatcctacaaaattttaattttttaaaaaattataacgtatatatatacgctttaaaaaaattgaactaaaaaattattctaaatataaaatagatacatagtaaatgcaccctatattatattacacttatataatgtattgataattataaactaataactaattagttaattaattaacgtatagataattattaattaagtaactaa

SEQ ID NO: 238161 - DNA, 954 bp, Cannabis indica
taataataataataaaatagttttaggttaatttaatcacatttagctaaaatttggctcacattctataaatgaaagtcaattaactaataaggtaaagtagtaccttcatgcattgaactcttccaccattgctggccaaagttgtgatatcattgttggatttttgagtcactgggaatgcagcacttgacttgagcccagagaaaggagccaccatgctggcttgtaccggtgtggagcggccgaccgaggcgacggtggcggcggaagatacaattgaggaagccatttatattgtaccctttgcttaactactttactatgtaaataagagaatatagatttgttttgctatgctctaataagctttgttcctcctttatttatagaccaactactcctgttttgcccttcttttcaatccaacagctttgattttgtgttctaaaaggatgggtgtcttttgaccgttggatcatgtttagtgccaaattcgaatcttattgaccacacacatatacgtactgacaaaaaaaatagccgtcttatgcttcattggtaatgacacgtggcattctctagtgtaatcttatcccacagcctaagtagttgagtttgcatgaagggttttgagtgaatatccaatccaagcaattgtatttttctgatatgattttaattgtgacttgtgaattaacctatatcattgataatttccacgtcattttttaatttatcagcttaatttccaccttgcatatatgtctacttgctatatgtaaattatatatatttttattgcttaatattaacacatataaatatttgtattctttcatagacagttaaatatgtctttgtcaattacagaccatggaatttcatgagttattacaaccataggttttctacatgcgccaaaaaaagtagtaaaatatcatattaatttta

SEQ ID NO: 238162 - DNA, 794 bp, Cannabis indica
acattatttttgttgttcgtgatatgaaccagatctggcacgcgtctagtcgagttcatcattctggatttcagagcaataatggcgaccacaattagaggaagataaagttagtcgctgaactagagagtgttgtcgatggatggaggaaaatggttactggcggacggagggaggcatagtctcgctgaatcgcaaaagctagccatcagacggtagctcttgagtttattgggcttgctgaaaatatatctatatatatatatatatatatgtttgtgtgtttattgatttgctcaaaacaaatatacataagcacgtatattttcccgtttggtaagcttttttacttttgacttattttcaccgtttggatatgatttaaaaaaatagaagaaattacattgtatacccactttactttacattgttttaattttaccttcatttctatattctttaaatataccactttatagatgatgtcctcattgtaatgcccgatcttctgagacgacacactcgctagtccgtttgaaatcatttataataaagacaataaactaatttattgaatataaccaaagcatgagatctcattattttaaaacaaaaacacttgattcattaataaatttttaaacattaacttttacaaaagtaatcgagtcataatctttaacgaaatatttttaaaccaaaatatcgtgataattccctaacatgcaatccacgccttgagctcgccatcctcactattcagttttatctttacctgcacatagagtatctgt

SEQ ID NO: 238163 - DNA, 871 bp, Cannabis indica
tagctaaagtaagagctgaggctactttagctaaagccgaaaaatacaagagtaaaagtgaagtaggaggaagtcaaaaagatgaattttctctcacaaaatgcatgcagatccttgaaggaattaattaaaggagttgatgatgatgtttacatgaaagctgtcgagaagttcaaagattcggattggagagagatttttattaatatgtctactgctagaaagagggcttggctagataggctttgatattattatagtttgttatgctaagatgattattgatacttatttttttttatatattattatagtttgttatgccatgatgattttaactggtacctctttctttttttgaacatcggatgattttgttattaatttcaaacattatatgtcttttttatatatttttttttgcttatgttccttttctaagttaattttttgcatgctaatatgattttcaggactaagaaccatcaaatggataattctagttctagttctaggacttttctaatttttggatgctataccttctgagtgattacaatgaaaagtttattcagaaaatccctcaacgaacatctgttttaagtggagagaattttgtgaaacaataattaggtgatcatgagagaacatgttacgaattgttgtgaatggataagaatgtatttattgagctttgtacttgttaaaacaaaaagaatacattaaggacactcgaatggttaaagttgaagagtcagttgctatttttcttatgattgttggtcaaaatatgagaacgagacttatagcagatcgatttcagcttgaaactattgataggcattttcgtctaacattgaaggcaatatgt

SEQ ID NO: 238164 - DNA, 1097 bp, Cannabis indica
aaaaagtaaagcaaaagagccacttgtgatcagcgatagtgagacaaaaaaaaagtcacttatgatcgaattttctaagatgatgagcaaataaaatagttactattttgagggggatgttgagtcccacattgctaatgtgtggaaagataatagaatatatataagatgaatgtgctactcctctcattgccgattgattttaaaatgaaatctcatgcacattagcatacatgcactcacctattcaactaccttaaccatacacttccctattctaatagtactaggaaatattaccgtgcttcgcgctgtttttataacaattgagaatcgcgtatatttaaaaaaaattatatattttttaatattttttcttaatttttttaaaatatatatatattttatgcttgaggctcaatcccctatttttatatttaaagtaattttactattctaattaaaaaaaaaaaaaaaagtagattttacttacaactaaaatacatggtgaacttgtattcaaaaaaaaaaaaaaaaattcatggtgaactttatggttttggtataacttaaattatattataatggtaataattgttatttttttcctctcttgaatatttgcccaataacaataatttttttacaaaaattaacattatacatattgtttatgagattttatggcacactcctgttttaggtatataaatagttttttttttttcttttgtgtgcaatgatgtacattgtaggtaattaaaaatattgagataatttaaataattaataagccaaaaaagagtataattagtataaaacattggtttcgcattatgaggttcaactatagacgtgctcttagtcttcttataactcttttattaaattacctatagattaaatattcatgaatgccacaacaaaaagaccttacaaatttataatgatatatgaagttataggatgatatttatgtgctcctaataagttaattattatcaactataagtataattattggttggttacttatttatttttttagtaacttaaagataattaaattaaaaaaataaaattaaaaactaaataaa

SEQ ID NO: 238165 - DNA, 1746 bp, Cannabis indica
atagcaaattattgatatttttttgttattagaattccatcccatattatactacatatactcagatatatataataaaatataaattactatttaatgaattatatcaaaatagtttcgatgtaatttacattgcacaagatttaaattctatcaatgataatattttaataatatattatgttttttaacattaaaagtgaagctaagaagtgacgaattttaaccagtacattaaaatgaagtcaccactacactactaaagggattcaactatttaactcttggggatcttgagtgaagaattaaggaatttggttatgtggtttctagtgaatatacttaagtattggggtaatttataatttctattaatatgtaatgttgatttgatttcagagcagaaatttgtaagtattggattggattcatattatattagatcgagttacctcgcctagtttaaacatcttttaaacattgaaagaataaagtcacaaactcaacactctacataattacttactttaacataattgtgtattattttacattttattatatctaattctatattttttattaaaattttaacgtcataataatataaaaatatataattgctcttcaattttatttctagcctcaccttaaattacaatccgatcgataatattttttaaaattctttaatattaggttctgtccaaaaaggataaatatataaaacaattaatgcgtctgtaatatttattctttctaatcctgcttaaattaattatttaaattgtgagaaaatcaaaacccttctaaatataaggaaaaataattgggaaaattaatcacctacaaacaatacatacagataaaacctaattgatttgcatgctttgggaaaatacaaagagaaatatttatatatattaatgtagacacaaaatgatgataatgccacctagcagctgctacatggatttgcatgcatggagaataaaaatgatgtaaaatgggaatggctttgatttcacgtacgggcctcccctaattcaaggatattctcattatttatctgccacgcctgattccttttgttttattttttttaatttttattattattttattttttggttctgcaaacgaaattattatcaaaaacctaaaatatatatacattcattggattttttggcacgtctactccaacattttttttttcactttcttctctcatcgactccttctattatttatttatttatttattatgacttgatattaatccatacccccttgctcactcagtcatagacaaatattgtccctatcaagtacctgaaaacaccattttgatatcattattatacagtagtatatatagaagtactgtaattttcaccttttacaataaaaacttgtgtattatatatatattttgaagtatttgattgaattttagtccttgttgtctcttcatcttcttccacattttttttttgtcccacatcgactagggaataatatatgtagctaagctatagtacccggcagtacctatgagcagcaaattaataatcttaattattgtgtcatgcataaccaacatatctatttttgtccataatagtgtttgtgtttttatagaactatgacttagatataatgggtttgtaatagtgaatgttgaattttgaccaaattctaatccatctctttttggtggggtttaattttttttttttaatt

SEQ ID NO: 238166 - DNA, 1161 bp, Cannabis indica
aaaatagttgagaaaaacgacaaagcccaaactaacgtagggcccattatgtggccggccattaggtgggatttctactctaattttatcaattttttattcctaataattaaaccctaaccctattgaagaatagtataaaaggaaggctatggtctcattgtccaactaatgcccccaaagctaaaaacctagctttcagatgagaccacttccttcgttttcttcctcttgaattttcaaaatacctaagcctttcttcacaaaataaattcagccattagttattgagtacatgcccgcacatatcaagttggtcatcaatcatagtatgtaagacagtgaagaattcaaacacaaggaaggagtttcgggctcagatcttggtgatactctgctacagaaaggatacaggggttagagatctaagcaaaatgagtcatttaattccgtcgcacccactgtaaggtttctgaaactttatatgtgtttatttacattgttttagaaattcatatttaggatgttaaataacataaatggtagtaaatctagatcccggtaaacgtattccaacaactcatatcagagccatggtaatgatttactttcataaaatatggatttagaacgatgtttgtgttcatttggatggtttcatgttggtttatgtgttaattgatgaatgtatgtgatttacgaaatttttctatgaaaataattttattttctttctgaaaatactttatttggattccttgtgaaaaattaagcaattttgtcttttacagaactcaattccgatgaaaatttaaaaagttatggagttttgaaattcgggtgttaatggtatcaaggtggtgcccaatcgcaccagcagcctcggacaaggaagggtgcacgcgcagattcagacaaaaattgtctgaaatcctcaatcagctcctccctcagggcgtgtatcgcctggctgcagctcgcccacacaggaccctgcaggtgccgaggaatctctgcaacatcaccctgtagatacctgcttccgcgcgtggatatggctgtttgcagcctccaaaggctgcacgtgcagccttgctgacagcacacctacaaatgcgatttgtgtgggatttttccccaaattttgaatttttgcaattt

SEQ ID NO: 238167 - DNA, 639 bp, Cannabis indica
tatgtgttgtcaaaatgtgatagcttatgacaagataattatgaattaaaaaaaacacatacattgttatgttttgttgatagggtaatccaaaaatacatttgttgattggtgagaagaagatataattatactaagaatgtctacaattttattagttcacacatgatttatataaatagtgtaattgaagtaaataattaattctatatttaaaaattttaaatacattgaacagtataatcttgaagaataaaattaaataatataaaattataaaactaaaattttaaattaaaataagaaaaaaaaaaattaaaaggaaagcatgctattgccaaggattaaacccataccctattatttaaataagaatacttaccaattatactgtgattattttattaattgtgttggttattataaaattatatagatacataagttgataaatattgtagtttttttgttgtagaatcatggggttccatctcaaaatcaattggtgatgtgtggagtagcccgtgttcttatatatggctcaatacttttacatttaacccatgtgagacaatattctctaatatctccctcaagatgtggtggctatttttgctcaccaatcttgaatcaccttat

SEQ ID NO: 238168 - DNA, 798 bp, Cannabis indica
tagttaaatttatttagtaactattcatgtgtaatactcattaagaagtgttccttatatgtatatataaataaggacaaatttagtgcctatcatgaccggtcatgcagatttactacgaccattagattagattactttccaatctaacgtaatcgaacgtatagggagcacttaattggtagattatttggcggttaaactttttcaattgttgtttcacttacatttaacgttccaagctcaaattttagcggtaaaactcttcaaattagtgaaccaatagcaaatttaaggtgtcatcaagttaactgccactatagactacttatgtgtatactcttccatatttgaaacgtttatattggtacacctaatattattttttaaaaattatttttaaaattaaataaaattataaaaataaaaaataaatattaaaaaaataaaaaatattataaaatttgaaataattttttatatattttttaaataatattaggtgtatcaacataaatgtgccacatgtacaagggtgtagacataaatagtttatattggctgttaactgtgaaaaatggatgataccttaaatttgttaatagtttagtaatttggagatttttaccgtcaaaatttgagcttagaggattaagtgccagtggagtaatagttgagagggtttagttgcgaaaaactcttaattgatataaaagtttaaagggattatttcacaaagacacaaaaataacaaaaaattacaaaatacggtttcacgaaattttaaatatttttacg

SEQ ID NO: 238169 - DNA, 922 bp, Cannabis indica
ttttatagtttttttagcctttatattttttagcaattgaaaaatatactcataaataaatgcatttgcagtattaattttgcattatttaagtcttataataatagctatataacttctccatctatctatcttaaaaaaaactcatgattgttacaaaatttaagttgatttcatgactcttgattttttgttaaataaaatgaaataattaatattttataaaagatctttgaattgaacatttaaagattgtaaacgtaaaaactactcttttgctatttatgttctcaggtagatcaaatctctcaaactttgaagagaccctatctcatgcccacaattgtcttagtcaatatcaccaaacttcacacgatcttacgtccaatgaattataactatttgcttctgggatttagtacattatctatcagcttgcaagagaatgtttattggcaaacatgatcggtatgatatatattaggtagaaattattggctgctattatcttcgtatttatgcatatagaaatatatatatatatgtagagtgtaatatgacctagctattattaataggataagagatttgtatatagtttgtcttatttatcttagtcttttacaaattgtttaatatgtactttgtattttgtaaaaatattatttaacaattttatttgattaattaactctgagttatgtttttgattcaaagctctatctttactgtaaagtaattcatgttgttttttatcgaaaaaagacttgaagagttgttttgtgggaaagaatctataccacaagttttgtaccatgaaatgtatgctcttactagagttgtatatcggtcggtttgggcggtttattctatatattttctaatccaatctaaagtttgggttgttaaaatttaagtgcaa

SEQ ID NO: 238170 - DNA, 688 bp, Cannabis indica
ttgttatcattgtatcttcattgtacttgttattacattcaaatccgatatcattaccgtattttacttgtaattgtaaatattatttctaatagatttgtttagtacataaaataaattaaataatgagttaaactaacttttatacataacttaagttgtaattttttaaggtaatttttttctttataaatgaaatatatcaaataaaatccattaattaataatgaaaaaataaatagaattttatctaattaactttttattttttataatcatttaatcaaagatatatttttatttcaagaatgtagaagttcaatcttttcgagtgtcatcgatttatcaattttttttagggaatatactcatttagtaccctgtatttgctcggaaaaacatatttggtaccaataatacttatttagtactttgtattttgaaaatatacatatttggtaccctaaaataagatttaatcaatacaatttaatcaatttgatcaaacagttcttagttatatgtaattaaaaaattaaatttgaattcaaaatttataaaactgaagacaatttgattgcattaataaaattttatcaaataattttaaatttaaggtattaaatatgtatgatttttaaatacaaggtactaataagcattattaaaatacatatttataatttgc

SEQ ID NO: 238171 - DNA, 3815 bp, Cannabis indica
tagatatatatagataggtattaagtttgatcacatgtgtgctatttcatgagattgaaatctattaaaagaaaaccttaatttgaagggaattattttatataaaaaaattaaaataaaattaataataataacacagattatatttagcaaatgctgccattattgtagattacataagaaaacttcattttaatttttttttatctaaatgtgataataataataattgaagtttcttatgttataaactaacaataaaatcttaatataaaaaaaattagaaaaaaaacttattgtccatttcactaaaaaaacatttacaaaacaaataaaaaataaaaaatagattagtctcaaatatctaataaatatatatagaaaaaagtatatataattttttgccatggtagaatttaagtctctattgctaaaagtgtcactattacatctcatattttcttggaccaaactagtctcaccttacaaaatcatcacaaaaatgataggttgaacttttttaaaataagaaattgcaatttcaataactcaagctcacccaaaatcaaggataacaaactagcaggaccaagactccaactaaaaacacaatcggtatcacaataagagactctagcaagagaatgagcaactttgattgtagattaattaacaaaatttaaagacacattacagagttaaccataagagtagaacttttaatagcttggactagactgagacaatcagtttccctttaagccaactcaaagcttctttgagtcctactgcttcaatcatatcgggctgcaacttcccacgccagctctgctgcacgaccttagccaaactaccaactgaattcttggccacaaacccgaaaccatgtctacactgcctgttgaaaatagcactgtcgacattaatcttgggaaaatcaggtttcatccaccactaaagaggattttgtacataatatatcaacagatcacacatgcagcatcctcaatgaagaaagtagaataaataaaaatgttcttttttgttatgtaattatgttacatatttaaactaaaataggatgtttaaaactgaaagatcagagaacatatctgagattcaacaacagaaaaatgagcatgataaatcatgggagtcacaaggttaaacttttaaacctttgtgcagaccgctctaatgaattcgtgcacatatttcagaagcttcctgaatgagaaagagggtgatgaaccattaatgctttcaaattaaggctccctagactgcattagcttgtgggaattgaacaaaccaaagcactcattaccacttccctctcaaactcgtgttttttcgcttctcattcagtgcaaaacgcctagccatagcagggttgtagaattgtctcatatgttctgaaagcctatggattgctcgtaaatcgccaaggttagaaagttgtgtcagaaaaatatcaaacttcctataaggcaatttgattctcctgtttaccacttcttccaatagacaacatgcttcttcaactttattgcaaccaaaaagcccttcaatcatcacacagtaagaatcaatgtcttgagcacagccatttttatccattttgttccaagtatcagtagccctatctggatcacccatctcaaaaaacatggaaatcaacatattataagtctgcacactcggcacacaacctgcctcaaccattataccaaagagtttaagtgcttcatcactgtgtttattgtcacataggaccttaagaaaacaattgtaagtcacaatgtcaggagggtagcctttgctccccatctgttgaaggaacttgtacgccacgtcaacttttccagccaaacacattccttcaattaactccttgtatgttgtaacatcgggaaggcaaccactacttatcatatgttccagaaatttgaagcactcttccattctatcattcttgataagagccacaatcatgatcacataatttttggcagttggggaagacaaggtagaaccacttgttctcatgaactcgaaaagctcaactgcatcagttaccatccctgctctgcaaaatgaatcaatggcagcactatatgtaaaattatcaggtgtaagacccatttcaatcatttcttctagtaccttcatcgctctttttggctttcgaactctacaccacccgaaaaacaaaatgttatacgtattagcatcaggcttaacttttctctttactctcttaaacatcccttcagcatccacaaccaaactgcatttgcataaagcatcaagtagcaagttaaaggcattgacctccggctgcgttttcactctaatcctcttcttctttgcgaatttctgcacatgggtcaaatacttttcacaatactgtctcaaaattgtcaagagaacctcaacaggaacagtgttcttgttatgccttttcatataatccagcatctcacaaacaatttgaaactgttttatcttgtattttgtagtagacagtatatcaatcatttcattaaacacacaaggttcatgagcataattttcttggtgaccagcccaagtgaaaaatctaaatgctaatttctcctcaaaacgaagcctttggagaatctcggcaaccaattcagaggacaaaccaacaccaacatggtccaaagcttcctccatgttagagtatgcataagaattatccataatagtcctatataacttttctacattgctttcttcaccattcacatcaagatcagtatgatcagaaataaaagactcatccaatctaactacttcggaacaatagaagcgcttagggaccctaaacgcaaccaaagcattggaggaactccataggcgaactaaaccgaagcatgaatatggaaaaattgtaacactgggaaaaaaatttgtgggtttgatagttgaactactcaaacctgtaacaacagcatcaacggttaaagagatgcccctactgttggatccgattgaacaagaagaagaagatgcaaaatagtggcgcattataaagatattcttccactttgggggacccatttttgagatgtggctgtttggtttactattcaaaaactgtatgtgaaaatatatttctgaattcaatagtttgtttcaataaattttctacataaagatgaaataaacaaaatcaagacaaatccatttttaatctgagatataaagagaaaaaagattaactctgttaatatagagtgataatggtgaagcactaaccttgtaaaagtatattgttgacaatccttaagtgtgaaaacgctgctgcagtaagaaaattgtggtgacaaagagaaaaaggtcaaaaattaaagaggaaaggatattatctatgagggagaaaaggaaaagctggcaactgtaattctctctttgagaataaaatgaaaaaagaaaggaaaaggacttgattaagcttaaatctgaacacaattttcattcaataaaagttattaaactacaaatcataattaataaaataatttcataacgtttgaaaagtctcataagtaaatttgtaattaagtaatattttacaaatgaatcccaagacaaaaagaaagcaacaaacgaaaatttaacaataagatcatgaacatcatgatatacagaccaaagaatgtttggagcctgagccaacagaggccactgaggtaaaaggctgagattaatttaatgaaagaaagaaatctaataaattagtcagacagaaaaatcaagttcatcattttcatttctatgacaattaa

SEQ ID NO: 238172 - DNA, 871 bp, Cannabis indica
ggtttgtatcatggtcctaatgggttatgggataagatgttaaaaagggttgctcgaaattatataatgcccaaaaaaattgtaaaaatacaatgtcaaaaactaaaaattatgagcaatgcaaattgataaactgagagaaatctgagtttttagttttcttaggttttaaacaaccaatgaaaatctttctaagctatggaaccatcatcaatgctattcgacggatgctattttcgctttccactgtaatcattcaccacactcggcggcaagggaatacagcagcttataattggcacaaatgtccataaggttaaataacacatggagtgttggaatagccaagatccctaccattttcttttgtaacgtttgggtctttacgttcaaaaaaaaaaaaagagaatgtaaatgtaaagccacgtacgtatactagactgaaagagtgctttggatttctcaattttcagctctgtcaagatttttaacacatacacaacatgcatgccctcacatctacaactgttgcctattagcccagctccaatgctagctagttctattttattattttttaagtagaatattaataaattaaacaattgaagaaaaaaaaaagtgaacagcggtactcaacagcacctagacactttatatttaaagttgaaaaatcaatgtttttttgacatttaatttcattttctgacacctacctctcgttagcacctgtattagagttgtacttacaaaaattataattcatttaaccatatcagctgttcttttcatttaagcactacaaaaaacagctacttataattttttactcacaacgtaaatttttatgattaaatgtaacttttaatta

SEQ ID NO: 238173 - DNA, 601 bp, Cannabis indica
ttttttattttacaatacacttttatattactatttagtgcatctgtttttagtacacatttgtaaaaattttaaaatttctctaagaagctattgtgactgctgttagatctcattggaggaaaataccatgtgtgctcctttcttcatgctcacacttaattgtttaattacattaatgcccccatcctcttttgtttttcctctaacactctttcattactttaattctttccaaccttagcagcaaaaatttattgtttccaaataaacctttgctttaaattaatataaatattccaaataattatttaacaaataaaattgtaaaatataattcttcacacagtttcattaagtaataaatataaaataaattataaatgctaacgtttattattttttttatttagaaatggtgtgaaaagatttttttttttttttaatttttcaaaattctatgaatgtaattagaaaggaagtaagagaggaaaacaaagagtgccaaggcacccaataaattattcttggctcacacttgtttgcatggctatttaaacaaattaacccttatattaagcgtaatatagtcctaattacc

SEQ ID NO: 238174 - DNA, 1099 bp, Cannabis indica
tttttttttataaaaatggacatttattaacttaattgttagatttagggtcattttgcatcttggcccagcctaataacttaggtactggctcaagaccacgtccatttaggtagcaccaggatcccttcactttgccaagtttgcaagtcgtagtccactccatccaacacttgccatgattgtgacatctcattgatgtcaatgtagtaatgcagtagcgatttctacactttgctgagttcgtggaagcatttccccactactcatacacgttcattattatgttgggatctgtggaaattgatcctctaaaccaacttattatccaactcacttaaaccaactaacttagctaactttctgttatgttagttagttagttggtgctatccttctttgaggtgggtctataaatatgtctagtcttttcactttccaaaagaggaaaagtagagaataagagagggcattgaagggagttgcttaggatttctaagctgagagttctgttcttgaagagggtcaagaacaaggggtgtactcgggttggtagagagaaaactgtgactgttttctctggtgtgtttcgagtactaacagagctgagattgctcgtgttcttgaaattatattgatactctcttattccacatattaatgaagaattggtgatgtttctcagctggagtatggccagggatcatgttgatctctaggaccagaactaggataaattcttgttttgttctttgtttgatttctggttttgattcattatgttgttaattagtttgttttcattattgctgtcaaagctgtgagtttattgcaggttttatgattgaattcttggtgttattgttgctggaattacaacaaaatcagagcttcaggttcaagatccaattgaggaagtcaataatcaagattgaatcaagactcatctgcaaccagtcatgacaggatcagcaagatttgaacttgagaagttcaatgggataggggactttggcctatggagagaaagtttgaagggaattcttgttcatcaaaaagtagccaaggcattgaaacccaaggaagaactcactaacaa

SEQ ID NO: 238175 - DNA, 1222 bp, Cannabis indica
aggaatctaataatatggatggctggaaacatgatctataattatagaatcccgactttcctaacaagttgaatgttggttctctttaagtgttaattctagaactgaaaagttgtgaacaaatttagattggatctaaattatacgttcactagtaaagtaacggtactaaaggataaagaagtaattagaagggtaaaataataatttaaccaaaactaattatgaaccgacacaaggagggctaatcactagaattgattatatcaatggacactgcagtaaaactcagtaaatataattctataattactaagagttcaattctatatttatagtggagtaatcatcgaattaataaacatgattagttgattgatgagattcaataaataatctagtttattggagcttaaaattatagattcatggtccccagatttctactttgaaacactgtcaaaggtagagataacatttatatataaaagttcagaaaaatttattttgatttgtcaaaatagtaattatttattttgaaatgaataatttatttttttcaaatttattacttaaataaattgctggaaaagataaaatttgtttggacaaaagacaccaatattttcttaattgagacaagggtgacgccacctacactgtgtaacatagtgataggcgcccactactttagggttgccccactagatttgtttttgaattagttaatgaattaattaattcaaaaaagaaatatttatttaaatttaaatttcaaaagtagttatagatatttctggtggatgttctctcaaggtagttgagagattccctcaattggttgagatattcattcaatcggttataggaaataaatatctataaaagaacttggttatattatttattcaaataattaaatatgatttaataaatgatttgaatttaaataattaattaaataaaacttttattagtttatttaaataccgtataaacaaaattctaataacaaatttaacgtaacttttagaaacctaaaacggattaatctcatttaatctttctcaaaaaataattaaaaagtagtttttctcatgtattgagatttcaataagaaatttatatacattttattctactagcccactattagtccttgtgtgtggtggagatctggaagattaaggtatgaccgagtgacttgctatggtgcatggcc

SEQ ID NO: 238176 - DNA, 514 bp, Cannabis indica
gatcttattgtcatataagtataatttaagtaaaattaaaaatgtgcataaaatgacccgtctgaaagactaaattaaagctttatacagttttttctaggtaagaatatgttattaattacagttcattaacaatattctcattctgaaaagtagtgctcatgacataaaaaaaaagtaaaaagaaaacgagaaaagttttttagaatttttaagcaataacttgaatgcttacacatatataatattatatcaaatcaaagttgttgactaataaacaacttgatgagttttaaattgattatgtttttattttgatgaccttggtgagtatagatcgtttggtacgtataaaagattgaattgaattttaattactacgtacgtattacgtataggactaataaattggattaataatcctatatttggtgaatgtgggattggataacaattatttatttttatttttaagaagtggagttttatttgtaccctataaaatgataaatac

SEQ ID NO: 238177 - DNA, 1001 bp, Cannabis indica
ctgagtacaaaacatctagaataacaactggagcattagacacaaaaatactacgaccagattaggaccgtgacatcctagcaacaacatgtgctagacgatttgctgatcgtttcataaatcaaatttttattaaaggcatagaaaacataagagaatgacagtcttgaaccagattcccaaagatggagcaaagggatgagtgattgtgaattgcttggatgaagactaagctgtcagattccagttcaacatgttgccaaccttgtcgtttaatccagcttaaggcctctttgatacccataatctcgacaacttctggtccaaaagcaccatgaaagcagtgagctttagcttcaatgagagaacctgagtcgtttctggcaaccatcccatagccatattggttatcactagcaaatatcgcagcatcaacattaatcttgattgtatttgtttccggtttagtccaaagctcagctccatcaccacaactactagagtagatataggatagagaagtgttatcctgagctttacgccaatgatcaagagcaatgcgagccgaagataggacatttgcaacagtgagtaccttatctttccaaaccattgagtttcttgctttccataaggaccacccaaccataacaagtgaacagactcggtcagcatcaagagagtggaaaagaccatccaaccagctagcaaaagagaagtctagagagatcccgactggtagacccatatgattccaacaagaagtagcaaaagaacaagagagaaggacatgtgaggttgtttcaggtgcatctcggcagacagggcaaagggagggaatatcaacatgctttgttatgagatttacacaagtcggcaaagtcccagaagcagcacgccataggaagtttctaacctttggtgggatctttagttgccacaatttttgccaaaaacctgaattattgctgcccgtttttggatctttagaagcctgaagg

SEQ ID NO: 238178 - DNA, 1592 bp, Cannabis indica
tctcacaaaatccattggaagtcttggaagtctttatgcaagtctaaatttttaggaaggcttgggttttcgatctcttatccattttaaccaagctatgctggctaagcaacgcctggcgagaatttttaagaacccttcttctctcattgcttctgtccttaaggctagatatttccctcgtaacgcgtttcttgaggctaaacctggtcacagcccttcttttacttggagaagtattcgtctgggggtagggacttgctgcagtcgggtcttttatggaaggtgggagatggtagtcatattaggacgattgaagaccattggatccctaataacagagttaagtttttctcttccaatcacaggcctccttccccttttttgtcctattttgtttctgagaatggggattgggatgtttctaaacttacaagctgtttttctgatcctctggttgatgatattcttagtgtccctcttctgggtgattttggagaggatgagcttgtttgggggcaggatagttttggggagtgtatagtcaagtcagcttatcatcttgctttctcttctcatgatcttccttcttcttcttcttcttttgctgactctaagaaattctggtcaaaactctggactttgaaaatccctccaaaagttaaggtgtttatttggagaatgctttctaatgctattcctgtttctttttcccttcataaaagatgtgttattgattctcccctatgtcccctgtgtaaattacatcctgaaacggttaagcatgcattgctagattgttccagggcgaggaaagcatggaaatcttcaaggtttgttaatctttacaataaatataagtatttaaatatttttgatttcttttgtaatatttctcaagagctggacaaggattattattgcattttttgttgttttctgtgggctttgtggaaccaaaggaataatatttttcatcatagacaagtgggtcaaccttttgatgtttatgaatgggctgttacttttttcttcaaatttttggatgctcagcaggtctctgttttaccctctgcttctaatcaggatcaagcagatttgcaaattaccccttctcagggagcttttcagatatttacagatgcagccattggtgttcagaggaaaaagtacagtataggggctgtggttttgaaccattctaaccgagttgtggctggtttggccattcctttttcaggttgtgttgatccgatggttgctgaggctaaagcaattatacatgctcttcagtgggcctcctctattttcttgccagtggacattctaaaaacagattgcaagtctatagtagataaattgtactctagtaaccggggttgtaacattgttgatgacttagttgtttgtattaggaacttgttatctccctgcccaaacctcaaagtggtccatgttcgtaggagctttaatgtacacgcacataatacagctaaatggggtcttgggcttaatagtgagttcatctggaatggctctttgccttccttgtagtcctgtggtgttggtttgttctccacaggattttcttt

SEQ ID NO: 238179 - DNA, 645 bp, Cannabis indica
taaaataatttccaacagagacccacttgcatcgtcatagaaggagaccgggccacctgtgccaaaccgcagtgatcgttggcactgtgtaaaaaaggagcccatcggcaccgtccttgtcaaaacgatctcaaggggcacctggctactactggaggggggcgtgtgggtgtctcggctgccagaagattagggacgggcggagaagggtctgggatggagaacgggtatcaactaagaggaagaagtagaataataatttggttaagattttttttaaaattgggaaggagaaaggggtgtcagctaagcttttttttaaattcccagttaatcgccagtttggtcctaaatataaatattttttaataataaatgcaatttttatttttatttttttagaaaaattatcaatctcggttgttcagtgtgtaacttctgagattgataactaccgaaattagtatctatctcagaagttacatatggatccgcagtgcaaatactgtaacaattctatctatattgacctaagaatggtgccgccgttaatgagaattggggagtatattttttcaaaaagatcaataaattgaatgtgcacaaggccattaatgttgcgaagtgagacatgaggtcttgggt

SEQ ID NO: 238180 - DNA, 650 bp, Cannabis indica
agagagaaaacactgtgttctttattttcgagttaatacaatctaataaggggagtaggctattaccgtactaaaggggccaaacatcttcaaaatctggtgttctttatcacttattggtttttgctctatttttattacatttctaatcgcttcataattgactcactgtcgttgactaaaagcgaggtcaacaagggtatcctcaaaacttcttgtatgttgtatcccttaatctagtttatgaggttgatgaaattggactaataccaatatcttccaaatcaattcaccacacacaaggaatagtgtgggctattaggataaagtgtataaaattgttcttgccgagttctcaacacatgagcaagaataattgagagaaaaaacaatttctttctcctttctatattttgaaaataatagtgtaaaagagagtgcccaatttctcaaataggcttttatttatagtaattaaatctcattaattaactcatatataattataagaataaataaatatttataactggttactgatatttttgagggaatctctcaactacttgagagaatatcttaacaactttgaaatattcataaccactttccaaattcaaatatttatatctgattgaattaattaatta

SEQ ID NO: 238181 - DNA, 715 bp, Cannabis indica
ttgatgtgaactttggatccctataaaaaaatggactttgggacactgtgaagacggattatttctctaacatacagttttgcatactgatcaatgaaaaaattcatccgaataggtaaaaagtacgttgacttcgtaaacctgccaactatgacccacacagagtcgtactgccccgtagtcctaggcaatccaaccatgaagtccatggcaatgtcttcccatttccattctggaaggttcagtggctacatcaaacgtgcagacctttggtgctcaactttcacttgctgacaagttaaacacttaacaacgtattcagctatatcattcttgattccaagccaccaaaacatgggcttaagatcttggtacatctttgttgtctccggatgaacagaataaggagtcgcatgagacttatttagaatttccctcttaatatcatcatccataggcatacaaacacaattcataaactgtaacatcccagtattatccactataaagtcaataatcttcccagccaaagtcctatctcaagatttcgttaagtctggatcttgcaatggtgcttctttaattcgttccagaagagtagattgtagggtaatgttagcgaactgccccacaacaaactcaatcttagctcgggtcatctcatcttgtaacaccctgatacttaggcgtggtacagtgatttttcaattaaagt

SEQ ID NO: 238182 - DNA, 647 bp, Cannabis indica
agtaattagtccaattccctgtggttcgacctcacctgtgtgagtttactacttgattgcgtatacttgcgtagtgatcataattttcgcaacaaaggtctagcataggatatgggattcaagatagacaatatcacagtgttctgtgataacaagagtacacttcatctaataaagaaccctatgattcaggaaagttccaagcatatagacaccaagatgcacttcattagagatgtaatctcaagtaaggaagctcaagttaagaaaattcacaccaatcacaaccctgctgatatgttcaccaaggcagtgactcaggtcaagttcaaacattgccttgatctacttcatctaccagaatctgattaaacttttcatcagaatacttcgtggatcaattatctgttgactcacatgctggcataagacaaatcaaggagaatttattgaattatgatccatattgtggctaaaacagaaacggtttgttgacaattggtagttgacagttaattctgttaactgttggttagttgaaatttttttgtattcttttctatttttgttcgagttctataaatagcttaagttcaatgttttttagagcagtcttgtacaatttactcttactctctctctctctc

SEQ ID NO: 238183 - DNA, 810 bp, Cannabis indica
tgttaattttttttaaaaaaatgacatttattaactttattgttagatttaggaccattttacatcttgacccttaataaaaatatgttgcttatatcattatgaaccgcatcttttattattattattatttttattatatcatatctatttatattataaagtttaaaaattaatttattttgtcaatattaatttgtaagatatcaaaaattattatatttaaataatgttttgtatatttttattaatattgcacattaaaagtattacaaatttaaacacttttttttttgtcgtgtaagttaatttttttttttttctgtaatctttattttaccatatgtaatgatatttttaatttatcaatcatgaataatttatggcattattatcatacaattacttagtgtagttttatttttatctaagaataactaatttaatataataaatgtgatttttttaataaagtaatataataataaaaatgataatttattttatttaaaaaatatataataataaagaatattagttttgggtgaaaaacttattattaggacttaagacttaaagacacactaacatgttatgtatgtctcatctttgatagaatctatcatgaaaaagaagaagctatcattgtaaatagatgagaaatacattgagataaggattgaatatgacaaattataccaacattttcaatattaatgttatcaagaatattattattgttgttttgattaattttttttcaactatccttctaattttatctacaaaattacattgtaaatttaatct

SEQ ID NO: 238184 - DNA, 2432 bp, Cannabis indica
aagtttgagttttgttaaattataatgggagatgtggagaagaaaaaaagtaggctatatggtgtttattagttcatcggggaacagggtttgagttgattagtgtctgatgttcaaattctttcattcgtcgaataaggtttgagtgttaatagtgaataagctttgaataggtggagggtttttacggcgcataaataggagaaagcaagaatagaagttagaagtttggttcaaggactgataagcttaacttactgtattgttttttatttggattaattatattccatagtttatagcatggaaaattctttgtcaaactttggatagtttaatgtttactttttatgttactgataggactgtgcactttgactttccttgtcccatataattaataataaacgtggattaactagtgctagttaggtagtgaaaaatgagacatgtgagctactaatccagcttgataattatcaaatcgaataaccctgacctaccatagtgcaagttgaatggaaaaagtttaatatgctgcaaactatagcaacatatagtgcaaaactaacatatacagggccgattcaaagccacaatagctactaccacatagcagcaacaagaaaagtctcggaaacagaattccttgcttttctaaatcactttgtttatcccttcggtaaccatgaactgcagagttcatgattgatacccttctcgtcttgtaatttgacacttaagagtgtattcaagttttctcatccaggcttacatagattcataacaatcatttgctgaatttgagcattcttgtcctcgaagatcggcatcaaagtcagagaatggggtagggacagtaattagtgaactggctggcattaggttacgaaatctgtattctagttatgtgttatatagaaacaaatcatgttaagaaatccatgtgtggagtaagagcctcagagatgtgaccatgtcttgtagttacacactcttgtcaattttcgaatttactataatatgtcagagagttcatttggattattactgaatatctttcggtttctttacagctgactctgcatccgaggatggtgatcatgctgcggtatgctgactatcttgttatgtatcgtaaaaataatggtatattagtatgatgtttttttttttgatctaattatgggacaattattcattttgcagtatgtcggtgatgaagacgaaagcagcgatgacgaaggaatgctttgtaagtgacccttttaaaacaattcccatgaacatactgagtcttccctgtattcttacaatgagttcttccaacagatctccccgacttggaaaaggtgcgaggaaacaaaaagcgatgagtgaggagtactaacaagtaacatgcagccggcgatgcagttaaacaacgcccttatcagataattgataggtatatactagggaactgttgagtttgatgaattataacacatattataattgagctgagactgtacataatctgacagtgcttccttttatgctctaaatctaacctctcaaatcatttggcatctaaacatgagatgccttttgctgctgcagtagttgtagttgtactaccacgagttctttccttcatctttttcaacttagtggacctgttatggattaaaaaatcatgtgaaatattggattttgattactatctggtgattttgagcattactatcacggaatgataccttatgattagttcgtaattttttatagagtaatttgcggcataaatatttaagttatattttcgactatgtacacgtcgataatgattttgagcattacgatcacgggatgatgccttatgattagttcgtgatttttttggagtaatttgcagcataaatatttaattaagttatatttttgactatgtacacgttgataatgattttatatttaacgattatgtatttacgaaactttaaaaaatataatttagatattattatcgttaaaaattaaatatttacgctgtaagttatttttttttctataaatacattaaattatacaataataatatgatactgattgtcattggtggccctatatggaaatagtaaagtttggggaagtataacttaaatgagatgacatgttttacttatctaacaactaaatccccttttaattttgttaatggtagcaaggaagtaataatattctaaatctttcttgtgtatgactcaaaaatcagttgcatttgcaattaggaggccttaatcttgattagtagatgtgtctatttggaagcagatcaccaccaaatttagtttcataggttgcaaaatttgaatgggccatgggatatgagccattgttgtatggtttgtttacatttcgaatattcacctaattctacaagaacataa

SEQ ID NO: 238185 - DNA, 959 bp, Cannabis indica
ataatataataaaactaggtaatatggctgcacgtcgcgcggctatattaattctttttgtataatttgaaaaataaaaatttattaatataataaataataattaaaaaatatttcaatatattataatacaaagttatattattcaattatattttatttatgaaaaaataaaaccctctaattgaactcaatcgatcgaattcaatctaattacaaaatatttgatatcaaattataattaactggattaaattgaatgtataaagttggatcttaattggatcagttattgtatgtcaatctcaaaatttaattaaaaatcgattcagtctaattacatttatatatattaaaaaatatttatttttttatatataaattaacaatatttaaatattaataaaaaatttgtattaattatatttttagtgactctttctttattatgttgaatttataatacttattttgtatatttatttgcatgatattttgttctattttattacttgataatgttattgttttattttttaaacttttagtggcattaaacttataaatatatctttatagagtattaaacctaactaaagtaagagtgatacttagtttttacatattttcttcatatttttaagctaatatgaaaatttaagtgtgtaatggatatctaattaaaaaataaaacgatcaaatccaataagtaattggattagattggattttgaggtctaattaaattggatcggatcgtgatgattttttaaatttaagggaaatttacaccctatactatactttccccatttatttcaattgtactgtgatacggcaataatttcttttttactgtacatttttatactgtcttcctattttgtgtattctaatactatttgataaaaaaaaaaattattctttgtgtcagctatgtgtttacttattttttattt

SEQ ID NO: 238186 - DNA, 2266 bp, Cannabis indica
cttgttcaagtcatggtgatccccactaatctacactaaaagttgtgagtgagtgtttaaacatatatattattctcttattatatacacatattttatattgcatgtgttcttattttcttctatatttcttatatataatatatagtgtatatatattctatattatgttgttgtaacatttatttaatttctttgttggtctttgttgtaataatatctctaacagtatatatatgtttaaatttttataaggtaatatacaatttgaaataaatgttgtgaatacatacatatgtttttttagttttttttagtgtacttagaaattattaatggtctcgctatcagagtataatttatataaactttcaaataacataaagtcatcatagctaaggtttcttaatggcaattttaattgaaagtttatttggaactttttggttggtaaaaatactaaaacttatgggatttacatatgtatgttgtgctacatatatgatacgtaaacgtcaaaataataattataataataataataataagcaaatgtatacttactcttttcctttcaatcttactaataatatgcttaagaatgagagtatgcagcataggagagctcctaaacacgcacgctaatccagaaacgttatcttttttcatatcaacatgcaactccaatgtccgtaagttctcaaacggattaagcctttctcccaaatatatatggtcagacagaatctgcaatgaattaagttatataccaaatcaataacaatatcaattaaaattaaaatttactacacatacgtacctgaagacaattgctttcaccaccaaattttaagcaacggacataagcgagaccagcaaagaaatctgaaaaactcttcattttggccacactcacattttcatcatcaccaaaaccaattaaagttccaattgaaacctcctcaagattcctcaaattaacaagagaagaagaatcagttacagtattctcttcccaaacaaggcttcttagttttggagcgtcaatcttcacccaactcgcaatttcatcatcatcatcatcacggtagaactcttcgaaacaagtccggactctcaatgtgaccagtttaggacaacaaatctccaaactccgtaagcaatcgcagaatttgagttcgaattcttctagcgctcgacacccaatcctcaatgtttcagtcccaaacaacgatcgatgctgagtttggtcaacagagggaaagatgaatgagagaagagatccaacaacatccgatgatcattatcaatcaaaacgacattacttagagaaaacgacaccaaagatggaaacccggttttcaagacagacaaatcaggaggcaacctaaaagccgccctgcgtgatttcaacgagagaacgcggagagattcgcattgaataacgcttctgggaaacattatgttctcatcggtgatcacatcgagctctaattgctgtacgttgtgcctaaccgcgcggcggatcaagtcattgaggcgtgataatgaaattgagtttgttgtacgcactcgaagggtgcgaatatcggcggagtttgatgaagtattattagtggccgtagtgattttatcacggagattaaagacctgtgagatggggtcggtgaggccatcgtagtaagcttggcgagagtatattgagctctgtgtaaaatgttgtgaaggagaaaagtgatgggaattagtgaaatcgaaatcaaggtctgggaaggtgtaccatagagatctccatctcttggataaaaggcttgtttgggctaccgttttggttggtaggagagtgagaatgtggtggattagagcgtctgggagttcgctgattcgatcgatgtcgtttgatccattcttgtcgttcccgtaaatgtatctccaatttcctctctttgctgatgatcttgtttccattaatgactaattaaaaagcaaactataattaattgtttgaatttatttattgtactttgcgtctgtgactgactgtaagtgggagttttattatgtgagttgggatctaactataacttcttgatttctgaaactttcaacttgtgaacgacatcaccgcttcatttttaacttttaattaattctttccaatttagagtttgtttcgggaataatatctcaactgaaagaaatttttcttttattttgtagcgttggctaacaatttttaaatcactagttttttatttttaaaatt

SEQ ID NO: 238187 - DNA, 1034 bp, Cannabis indica
ggagtggatctcaaacaaaaggacacatagttcttaagtgtccaatgggactctttcccattgagagtattgatagctagtctcgagtcactctcaataataataaactttaaccctaattcaagagccagagaaatggctgaacaacaggctgctggctgtccacacaaagcatccgagaattccaactgagtcgtgtggatccgaatcaccttacccaggtggtttctagctacaacagctgtgcacatgctctccactcccactctaacatcacaatttagtttgatccaatcctcagggggtggattccatttttttgtcaatgtcggagtcggagatggcaccagagaagcatgtaattctgcaaaggaagagtaaataaggtcaatacattttaatacatccggggaattattattgtgtactttttcatttcgcgccctccagatggtatcaacttcaatcgaagcatagagaaagacctcctccactcgaacacccctcttattaagactccaaagaaatttcacccagtcccaaacctgaatcccgttgccacagaccggatatatgccccaaggggatgagcgccacaggtgtaacgccacatcacaagatagaaaaaggtgttcaacagattcttccccccttccacacagaggacagctggtatcctctatttggaatcttctcctaatagcagatctgacggggagcgcctttgagaggatgcaccaccaaagaatcttatgccgctccagaacttcactattccatagtttgttccaaagtgttggggccacctcaccatggccagctctttccagagcttgagcaagataggtcagatttactcgtgaacctccctggcccgaaggggtttgcctcctttcaagatagcaaagactatgtctttatcgaacaacctttttagtttcaagtgtcccaagagccagtatttgtgaggagatcagccacacaattcaagttaggcgggatttctcccattggtttcggaatgaaacctttta

SEQ ID NO: 238188 - DNA, 1648 bp, Cannabis indica
tgactgtgaaaaatgaactatggtagttctccttttctaggtgaaggaagcccttaaacatagggataaaaatgaaaaaacacaagttggttatcttttaccgtagatgatgatctaacggtaaaaattaacttgtgagattgatagttatttatcagagcccagcgggacccgctgcgggtaattgggagcttattttcgtaactcctttggggaagatcgataacttcagaattgtgattaaagtgtgaggcatgacttgaagagcattgaaatatcttcaaaatgcaagttgaaccgcgtcaataagaccaatattaagtgagttatgactgttttactaaaggcagttcatgacccaccacccaagctgacatccagtgcccaagctgacatcccagtgcccaggttgacatatgacgcaacatggactttgggtaagtcaaaaaaacatccaagggatgtactttatgatgcctaagtgatatttttgcatcacttagtctgtttttatgttctagcgaagacactcactagttctcggagatgttgatattttgcgaaaatcagagacttgaaactcttcatttccaagtgaatttcccattttcgaaatgagaaatgtgaagttgtgactttgacttctctgacttcataaatcttagttattattaaaaactagacggacggccgaaacggtatgaggattggataagcaaaacctagcgcaccagaccatttgtcaacctaggcattgggtactcatttcggagcttccaggatgttgttttgatacttccaatgctcttgaacttgagtatgaggtctcttgccccattttggaccattctagattcaatgatcaaatcaaatttggcatttgaatcatcgaaactagcacaccaagctgattgtcaacctgggtgttgggcccaacaccaggtcaacttgagcaccagccttgtttccagggtctcgagattgtcattttctccccgagtttgcctaaatcttcattatttctgatgatggaaaaatgcccagaacacatttttgagaacttgattggaaacaacccaagttgacaatatatcaacctaggcattaagtttcccttttatccctttggaagttccgtttggtccccgaaaatagttgaatcttaatctttgttgaaaacaaagaagatgcttataagagttcttgaaaaacatcatcaaaatcagtccatgttgatcaaaaatgtcaacttgggtgctatgccttgtttctggcacctaggaagtgttgtttcatcctcaaaagtacttgtatccctatttttgatgaagacggggaatatgcaaaagtcaaatcattgatctaatggaaggcacacaatgttagactataatatagtatatgaaatacagcatatatataacgatatgtaatgcggaaaatactataaacatatcgataacatatatacaatgaaagatcaaacaatacctccagccattgatctttgagcttcaatcctgcgatagcctcagtattggagtttgggcttcctcgctctctcaactctcttttgatggaatttgctaaataatcaaaaatgagtgaaaagcttggggaccgagaccctatatttataggtgagata

SEQ ID NO: 238189 - DNA, 879 bp, Cannabis indica
acagtccacacgttccagaaggacctagcgtgaaggtggtcagaacctagaaatagggaatgaagaacccaacataagttttggtggtactcaacccatggactatgataatgatggtgcctatgatcccacgagatttgtgccagttgtcgagttataaaatttccatctcacgcgccgcttggaggaggcaaattgacgaaatgctgagttggaacaggaggcagcctcggccagggcagcacaggagagcaacacacaaaacaaacctaatcctagagtgaagagaccacgagttaggcctcgcggctcatgaactagtaggtaggagacggctgaggagaatcctcaaaacgctcaggaagaacaacctggggaaactgagggtcccgttgagaatgaacaaccaaatgaccaaccggagccttgtcaccgaaatgagaacagaaggtaacccgggaccagggaacaagaaatccctcgtgagaacgagggaaatcttgggactcaacctggtacaggtgggttaccacggagacatcactaacgtccttctggaaccaacagggaaagggcatgtacaaagcccaacagggggcatgcaataacccatacccaagggagaaggacggggcatgacaaggcgagtgtcaactcgagaggcacaagaagcaatagtcgatcaatgagaggacgacacggaactcgtcgcaatactgatcgagaaagtataggaatgagtagaacggaaagttacttccatgagtaggacgaggtctgttaataactataaccagcaagaactggatctttgtaatcactttaaccagaaaaaacatgaccttcgttaacatctcagtcaaaagcaagaggatccta

SEQ ID NO: 238190 - DNA, 839 bp, Cannabis indica
attgcttgtaccaccaccaaacaatcagtctctagagtcacctgcggccaatttttatttgttatccaacttagagcctttcggactcaaattgcctcagctaactctggacgtggaaagcatcagatctgttgaccctgctgtcggttgatcactttttatggtcaatagtttggtgctttaattgagagtgtggatatcgtgatctgatccaatgccatggtgaacacaagaagaactcctgttgcaccatctgcatctttaggtctccctcaagacccatagattgcaaatccaggcactcgggttccagtcacacttgtgatccccatgaatactgtggatatggtgaatctcgtcatcacaataggcgtaacaagtttggccaccacagctggccaacttgacgtgagcatcccggtggatccaagtggcaggcccatgcctccaactccttggcctgtctctctagcataaaatcggagttgagatccggttgttattctcgaggggtgcccctaaagattcttccttcagtgagaggcaactgaggaaggtccacccttagaggttaaggcctgccacttggatcctccgggatgcttgttttagtctggccactatagagtcctgccaaataatcctggccgtccatagacctataggggaggtctggatgcccaagctgtgcaggatctggcggctcaaggtgtgcaagatgtggccgcctaaggtgtgtaggatcttgtaggtgaaagcctgcaggacctggcaggacaaggattgcaagatgtggtagaccaaggtctgcaaaacttggtaggtcgactataagctcc

SEQ ID NO: 238191 - DNA, 940 bp, Cannabis indica
ttcgaaccagcttggaaccagagtattgttgctcggttttggtgttttcagcaagaattcagagggaatcaagccaaggtaaaccctagatactttctagctatgttttctcaagattttaattggtttcaagtagtaatttttaaaattagtggctgttagggttaggttgtttgatagttcgaattctaaggttcatttgagttggttttagcttcttgaagctgcttttgatgtatggttatagatttgagcaagtttgagctttgaactccaagtttaggtctttaatggcataatttgattcaatgagtttttctgtgattttctcgttggaatatgttgtatatgcattgtttaggtactctggaaagtttggtaacatttggataagttttgagcaagaaatggattattggggaaacctggtgcaaaccggctagccggttttggcagaatcctcgaacaagctattttctcaactctcgtccatttcagtgtcgtagttgagtgtttccttgtttcctgagttagtgtaattcctagagagtataacaaaacctagagttgtgggttcgggtttcatagattaaggtttgaccatgtgatttacccggtttcattatgtgattagggcatccatttaacgcaagactttccgttcaggtccgtcagcacacttgaatctggaaagaaggtaagaactgtgtataatatgtgatatttatacgaatgtatatatgtatgatatatatgcatgttgtgtgtatgattgtatatgtctgagtgatatcatagtgacacaatctagtgtcggttcagcagtacatgcatcgtactggataagagtgatattaaccccagaaagtatgaattggtgctatcatagcgacacaaacattgtgtcggttcaacagtacatgcatcgtactggttaaga

SEQ ID NO: 238192 - DNA, 893 bp, Cannabis indica
ttttgactttgcaattgaataaatcatacttgggatttggtacttttgcctcctggtaaacatgttattggttctcgttgggtgtataaaattaagaccaagtctgacgggtctattgaactgtacaaggctcaattagtggctacgggtttttcacaaccgtatggtatagaatttgaggaaacttttgctcctgtagcaaaaataattattgttcgtactctcatagtagtgacatcagctttccaatcgactatacctcaaatagacgttaaaattgcctttttgaatgatgacttacatgaggatgtctacatggttcctcctccgggtgttcctcataagcagggtaaggtttgcaagctaaaaaaaagaccttgtatgatcttaatcaggctccttaagcatggtttcaaaagttctctactgctattttatctcttagttttgtttcaagtgatcatgattcaactttatttgtcaagtgcacatctgcaagtcgtattctgcttttcttgtatgttgatgatatgattattataggagaagatttacagggaattatagtgttaaagtcagaattagcttttcagtatgagatgaaatatttgggttatctgtgctattttctaggtattgaagttgccttttctccataagtttatcttctttcttagtcaaagtacactactgatattattgagcatgctcgccttatagatactagagttgttgacactctctctgagttgaatgcttggtattctccttctaatgtctctcatttggaagatcttactttgtgttagggtttgtgctctgaaaatcttgtaaaattatttttgcttataaataagagttgaacattttgatatatgcttgaatgttaaatt

SEQ ID NO: 238193 - DNA, 1505 bp, Cannabis indica
ctatgctgaaaacatcataccccactcacaatgtggccacctatggtcttagacccccatctaccgtgaatcttcatctgtcctcagtttttggcattttgtttggctcttgcatggaatataaagtaaatttattgttagcaaaatgaggaaaaaaaatcataagtttatggatatttaattttacaactttcaatttatacctgctattttgggtctttgtgataacctctgcccacacctccggtgtcaccatatttggacgtgatatcctagtcgcttctacctctccatatttttgaatattctccttccatgtctttttcgtatctgctctccagtcacgtaacccttttgacattgatttaacactgtagtcctcaaacataggattgtaagttgagaactcaaacttggttgaaaaaaataaacattaaagtcatatatatttattttataattattttgtttgatctattacaataaaaatttgaatgttaccgttattttgtcccatatagtttgaatgaccgtatcctcaacgtcctcgaactcaaacttattcaaaggaatggtattgtaaacaaaaagcttgatataattcttgaacttattgccatagtcgtctattggggccccagtcccaatatgaaatctaaattttaatttctgacctgtaggttgcttgactagttcttgttcaatatttttccccttatactttctcttaactctctttttcttactgttgcttgcacctgtatcagccattctacacatacaagttacgtaataattaattaaatcaagctactaacaaaaaaatatatatatatatatatgtatttgatttaattaaaggtgagtttaaatattacaataccttaaagtctgcaagtcatcataatcatcatcatcattaacatgtacattattttcattatcattatcgctagtgtcttcatcatcactataaataatgaaaccatctaaatcttcacggttaggctgctcatagtccctgttggtcactttgattgggtcaacatcatcacggacatattcgacattgtccagttgtgcaagtttaacgactaatgggattcccgaagagtttctttcttgtatagtcgtggtatcatcatcatcctcatttgagaaatcctagacattgcgagggtgtaaacattgacaagcttccaatcaactctattctttaggtcgggaatgtaatatatcaaatttgcttgggatgcaagtatgaatggttcattttgttaccattcacgggcaatgcagacactagtgaaaaaaccatcactttctatcctgttatcgtttgtgtcccaccacttgcacttaaaaataataacattacaattcttcaagtaagtgaacccgtacacttgtttgagtacgccataaaaaattttaccaccttcttcaggaactaaaataccactattttgggtgttacgattatcatcctaatcctcaactaagaa

SEQ ID NO: 238194 - DNA, 651 bp, Cannabis indica
agagcatgcttagccaatctatgtagtcctcaacattaaagttgcggctaacatgagagagagatgccccaaaaaaactagacaataagactttaatatcagaaaagataacccccaattcattcaaatacactgtctgaccctccaaagctgagacaaaagaaagtgaatcagaaaaaactttttccacgggaagtcccacatcttgagtccaacgcaaacctactagtaaagcaattgcttccgcctgacacactgaaaaagaacctgcaaatgagatagttaaaaaacaataagtacttataacactgctgcaacaaattaagctactcaagtgttaacatggttgagcttgtgattggtgcttttctctcagcttccttttgattttttgctggaaaatgtagcttctccttatgttgagaagctcctcttcaagcgaggaaatgaaaattctgttaaagagaggcttttcaagttgaagtcaacgttcaattctcttgctgcgtttcggtttgaagtggagaacaagagaatcaaaaaccctgttgtggagaagtggctggacgatcttctggatgctgtcgatgctgaagacttgacaatattgagtacaatgctatgaaacacgaggaagttgatgagtcaaag

SEQ ID NO: 238195 - DNA, 1767 bp, Cannabis indica
tggtggaaagagcattccattggaatgctattccaatactttaaaatgcaaccaaacaaaggaatggaataaaaattgtttccattccattccattccatttcattacctccaaccaaacgccaccttaattcgcaactcacttatttatagttgagtccaatttcctaatcctaaagctaattggagtcttttaaatttaaagcttcctaaagaaaaggtaaataaaaagtaaaatatataattatatcttctccttttttaaagctaatttcgaattcctatacaactagaaataggaatacaaatttaaaaggtaataacaattcctaaagctattgggattaagaaaaaatttgagaaattaaaggaaaaagataaatgataagcaaaatgccaaaaatcttttcccttcttcctttttctctctaatttcgaatggcatctccaactaggattaggatcccaattcaattaatcctaatgccataacaaaaaataagaaaattctaaattttcaaagaaagagaaaaaagataagtgaaaaaagataagattttttttctctttttctttgttaatgaatttttgaaattcccaaggactaaacaagagtgttcaaagtcctaattcagttgggaatgcttaaaaacaaatacaagtgcctaagtatgttaaaattgatgcccatctagtaggttcgagcaaaacgggcttggttcacttcatcaagtcaactccacgcaagtgtgaaattgacttggggggaaacatataaccctgaaacttatcctggtaacatggacattaatgtttgacacatggcatgaagataatgtcacgaagttgagtagactcaagtcatagcggtcgacctgggaggggaccctagctctacacccaggttgactcaaggttctccgggatggaagttcaaactttaataacttgaatccaacccactatcttacccaacatctagattgacgttgtatgtcaacctgggctttaggatgtcaacttgggcgctgggttgtgaactgcctttagtaaaacagtaataactcactcaatattaatttgattgatacgattcaacttgcattttaaaactatttcaatgctctctcaattaatgtctcacactttaatcgcaattctgaagttatcgatcctaaatttcaccacaagtgagttacaaaaataagctccgggttacccgtaacgggtcacgcagggctctaaaaaatgactactagctttaaaagtaattttgatcgttggatcatcatctacagtcataattagccaatttagatttttttttcttcatattttgaattattttttcctatttttgtgggcctccttcacctataaaaggagaactcccttaatttatttttcacatttagaaaattacccacaaggtctgagcttctctctctagaatttggagctttgacacctaacctatatttgtaataccatttcttaagaaataaaaactcgaagtagacgtaactctattactgtcgcgatacagggagtgaactactataaatttctatgtctctctttacttttacttaacaaatattttattctcgccaatctagcgagcggatatgacttagaagtctatgtccagatttatgagtcaacacaacgggtaagcaaactacgtgtaagaagctgtagaaaattattatttattaatgggatgattgcgacaaaatttcccaaaaacttagggttgatgcagatt

SEQ ID NO: 238196 - DNA, 1115 bp, Cannabis indica
cattagcatgttacatatttaccatccagttagtacaaaaggtctggtcgtacccaaaaccccaaacaaaacaaaatacttgtgaaaaacaagtgactaagagtcataagtctgctcggtcacttggagggcacctatgcctgtataaagcatttggcaaaaaacaaaaacaaaaacaaaacaaacacaattgcacaatgattatcaataagggatgaaattcattatgaataacaaaagcattcaaaccttggattaaaggctgcccggtcagccggttgttcaaaaaaatgaaaaataaattccaagtttaaagacagcttggccggtcatcttgtcttaaaagaaggccttttggctgaacagacataaataaaaggatagtaaaaggaaagaaattaaacagcaagagtcctaggctctttgtatgggtcaactggatttgaaggggccggaggatcatcattttaggcggatcactctgatcggtagtagaggtggaagtggtcgccttgggattcccgtaggctgcctgagcagcgcagtagttgagaaacatgtctttggaagcacccagataatcaaagtttcccttgacattggccttccaaaagtcataaaaaatctcgagaccaattgtctctaaggcattcaccttttccccgacctcaccacctcaaatttttggttcttaacctcagcctcaagttcctcctctttagctttcttctcatcctccaacctacggagaagtgtccggagaccctctcttttgtcttgaagactggtaacgtcccgagacaaagaagcaatatcagcctcaagctgttcggttgacgacatctcttgtagttccctggtcagctcgacaaatttggtctcaacatctagaagtttcttattaacttctccaagttccgtctgcacagtctcaagttgagtccgcgcatctgcagcttcctttctgtccaagtccacatccctttacagtgtgttggaagtggcgagattcttgatagcagccgacttagctcgggaataggcatatccaatattcataccagtctgtgcagaaaaaaggcattaaaattctgaactagtcaaagaggaattaa

SEQ ID NO: 238197 - DNA, 1599 bp, Cannabis indica
atgttcttgacgacaaagttgagaactttcttgcaaggttatggaaacgagaggctcggcctcagtccatttggtgaagaagtcgactgctactactgcatacttagctcatccttgcccagtgggtaatgccccaattaagtcaattacccatatagcaaatgggtagggcgaggtcatcattcttagttctgttggcggcacgcaaggtatatgtgaaaacctttgatacttaacacatttcttaacaaactcgtgggtgtccttattgatcgttggccagtaatatccttgtctaatgatctttttagatagactttgccaacctgcatggtccccacaaaagccttcatgaatttctctgatgatttcgttcgcttctgtagggagaacacacctaagtaaaggcatcaagtaccctcttctatatagtttgccttcaattattgtgtaacgaggcactgaatacaatagttttcgcgcctcatttttgtcatttggaagttccccgtcgagtaaataattgataataggagtcatccatgtaggagagttgtttatcatctctacgtcttccatttcacatatacttggctcgctttccacctccacccgaactaagttcaattcatccaagtcgctctgcgtggccagttttgctaaggcatcggcgttggagttttgttctctcagaatttgttcgattttaaagtaattgaatctttccaagctctttcgaaccttctctaaatactttcccatttttaagcctttggccttgtattccgcgaggaccgggttcacaatcagctttgaatcactatggcaaatgaggtttttgactttcaataattctgctatctttaagctagcaatccaggcttcatactcaacctcgttatttcatgcgtcaaattggaatctcaaagcatagtgaaatttaaagccttttagtgatattaatattacccttgcacccaaaccttgctcgttggacgcaccatccatgtataacttccaagtttccgcttctcggtgcacaggtgaaataacttcgggagttataccgtctattaagaagtcgaccaagacttggcccttgatggatgtttgagggtggtaagttatgtcaaacttccccagttcgattgaacattttatcaatcttccataagcatttgattttgataaaacttgtctcaagggttgatcggttaacacttttgtggggtgtgcctggaagtacggccgtagcttacgggacgtgtggactacgcacggagggagtttttctagaaggggatatctagattctacccctcataaccttttactcacgtagtaaataggttgctggtgcttaccctcttctcatactatagttgcactaattgcatcttccgagatagccaaatagagaagtagcgtctctccagttattggttttgccaaaactggaggcatcactagatgcctttttatgctctgaaaggccacttcacactcttttgtccactcgaacttcttgttgcctgacaatacattgaagaacagcacacacttatcagttgatttttaaatgaacctgttaagtgcagc

SEQ ID NO: 238198 - DNA, 760 bp, Cannabis indica
aatcacgtaatacgcctatgttagttagggtgttacagtgtgggcatggaaaatgggaatggaagaacagatggggagaggtggtcacgtgacatgtcagcctcctctctcaaacgttttcgtttgggtttggattgggacccaaaaatataaggaaagagccgcgtccttttgactcctgtgctcttttttttggctgcatgcctgtttttttttttttgactagcattaacccacagtaaccattctcgacatgtcacattacaattgggtagcgatacttcctaaaagttattatattaaactacatgggacccgatacttagttatactaatagcgatattgacataaagcagagtgctaagtaccactggcaccttttagcatttcttttttttttcacaccttagtgagtcagtcactagtattcttgtcccaatatgggattttaactcgggttgagatgaaaatgctttaattttgaaaattatttttaaaaaattaaaaaaaaataattaaatataataaattaactaataaaaattataaaaatatattttttagatattatttttttaaaaaattaataattaaatgaagttatataatttttttagttattgcatattatgaataaatatatcagattattaaatatatacaatagtatttgatatatcgtaacactaaaattaatataccgtagtaataaattatataccacaaaaaataataacaatactaaattaatactcaaaa

SEQ ID NO: 238199 - DNA, 1488 bp, Cannabis indica
attctgtaaaaccgtattttttttaatttttttttgtgtatttgtgaaataatctctttttttttttaacttttaaaatattcttgaattattaaaaaggaaacattgtaattatgcttgttataattttatatgtttatttattttgaaatggatgtatgttcttctgaatcgatcttcgaattgttctaaattagtacaatatgtctataaaaatggaaaaaattaataacaatttaaaaattagtttgcaattttttttcaaaatgagacaactctagaaagataatactatttgtcttcttacaaaatgacaaattttttaaagttattttcgtttttttcatgctttgcaaaatatttttcaataatacacttatctagttttagaacactccacatgttttttttttttttttcataaaaaggctccacatgctgtttaaaatatcattttttagggaaaaaaaaaacaaaaaactagtctattttgcaaaataaatattaaagatatctatttaatttctttcttttctcttcttttttttttaggcttaacataaagatatctattttcatttgtaaataattgtaattttgttggtttctgaaaattaatgaatgttcagtacttcaagaggaccccaatggaatcaatattagatagccaaataaagttacaaagaagatcgaccaatgtcagtgatatttggtccacagtatatgagaacaaagatgtacccacatagtgaaccacaggcaagtaaaattaattacataaattatcattatatgttgcaatgcatattattgaattttaatatatacttaattaattggtgcaggaagtagaattggcaaaaatgttagtaaggccaactggactttacatggaagattttgataaggaaaatttattgagtgaatccaaattcggatcagtgaaaaaagtatatattttgtgtgaagaagatgaggtgatgaaggaagagtttcaacggtggatgattgagattagtgatccacctttgactaatgaacaagtcatacttattaaaggagctgatcatatggtcatgctttctaaaccatatcaactttcccaaattttcactaaattaatgattactcactcctagttttatatagctaggctaattatgatttttgcttcttgaattttgacgtgtatcaaatcatgcaccatgaacttttaaagttgttaaaaataccatttgaactattaagattgttatttaagaacttttgtctaatttcattcaattttactattttagttattgtttatgtactaaaccatgctctccagactttgatatctacaaaatcatgtctctcgaactttgacatgtactaaattatgtctcctgaactttcatctatgttagacgtttttactaaaattggaaaaaagtctttaaattcaacaatctcaatagtttataaggtatttttaacgaccttaaa

SEQ ID NO: 238200 - DNA, 701 bp, Cannabis indica
ctgatcaaatggttgagcttttaattgccttctttcaacgttgccaaaaggaaactgagtgctaggacacaatctcttttggtggcctaaaatgaatctataaaaggtttaaattactatacacatactgatatacataatatgtctatacatacaaactatacatagatatgacattagttgaagtatattaactaataacatcttataatttaagtacgcttggaagatatatcaacagaggcttctaacatttgttggggtttatgggttttgaaaatatatttcaaagcttgagaggcgagagacaagacgatacttagaattgtttttccaatattttataaacttattatctttatttttgggttcaactctcaaacacgtgttattagaaactcattatttgtttttatagcttcttgcatatttgcaacaattttattcatagagtacttaaatttgcacatacaactaatatgtttacattaattaacgaccattccatatgtgcacattgtggtaaatctcacgaagtggtgtaaattgaacaaaaattggcattgtactaagaattttaaaaagagattcctaggccacttttgagacttaccactccattcaattatgaagcaatataaataaatatgtgttctcaacccattgaacttgatttgtttatgtgttataacacttgtata

SEQ ID NO: 238201 - DNA, 666 bp, Cannabis indica
aagagatgaatttaatctttaaataaataattgttattaattgactaaattcaatactaattgggcctaaataaaactatcaaaggtgatcattttatttagtaacctagtccatttaaatatctaaaaataagtaggctcttatatgcatctaaacccaatagtaaacatatagactcacataagcattgattttgatgggccctatcatgttaatttagcacaaatgaaagaaaattacaaaattacctgttacaaattacctatttaatttattgacaattaactatgattaatttggatcataggtttgtcaaaaaaattaaaatttaaattaaacaaataaacatgtaacaaataaagaaagttagtgttgcccctgattttgtccaaaatacgtggaccaaccggattgagacacgtagactgaagagacaagactttgggataattcagctaagtctctttaatcaaagagatcagcattcaacatgcctcccggagaaggcatgtaagtttcacatactcccggagagcaaggctacaacgaagcacctccgggaggtatcaaatcctatctgaacagtcacctcgcatttaatgctgcatgggagaaggcgtattgaaactgccataagtattaaagtctaacggcgtaacccccct

SEQ ID NO: 238202 - DNA, 1298 bp, Cannabis indica
gtctaggtcacagtatgggttcaagttttactctggttccaggtcctagtctgagtcctagtccctttcgagttcgagtctggatcgtgatctgggttctaatcaaattctgggtcccagacgaggttttggtgtgggttccgatccgagtttaggttctgagtctaggtctaggttcgagtctttatccgagtctgggtttggggcctgggatccaatctcgttgtgggtatttgtttgtacccgtgtcaaggttagggtttaggatttagggttttgggtttagtgtttagggatttgggggtatgtgtaaaaattttagggtttagggtttaagggaccgcttcaagtctcggcttcaattttgggtcacatggtatgatttaaggtttgggtgttggtctggttcgggtccttgtctaggtctaggtccgtgtttgggttcaggtccgagtctgggtcacaaatccaaactccaacctcatgtttagtctagttcgacttcttgtatggattcgggttctggtccgggtctgggtcttggtccaggtcccagttcttgtacgagtccgagtgtgggtctgggtccaagtttcagtccgtgtctgggtccgggtcttagtctgggtctaggtttgggtctgcgtttgggttctagtacaggtctcgattctggacccgtatccaatcttaggtcccggtctcgttccgattcggatcttgggtcccagtccgtgtctgggtctaggtctgggtccgagaccggggtcggggcttgggtcacagtcccagtcctggttcccgattcttgttctaatttttattttgggacccaaatctaggtctgggtcttgagccaggtcctgggtccgggtcttggtccaagtccatgtttgggtttgggctcgtgtcccgagtcccgattcgagttttaattcgggtttgcatcccggtaggggtctagttttgggtcttagtcagattctagttcctagactcaaacccagtgtcggactcggacccaagtctggggtacgggtgtgggtttttgtgagggtccgagtccgggtctgggtttgggtctgagtatgggtgccagatccaaatactgactactggtcagttccaagcaatgagtcagggtcaaggtcctagtctagttccacttcgggtccggtctgagttcaggtcctgggtgcgggtctaggtctgggtctgggtcagggtctcggtctgaatctaggtctcaagtttcaatctcggtctaggttagtttgggtttgactccaagttcgtat

SEQ ID NO: 238203 - DNA, 901 bp, Cannabis indica
taagaaagttgtcttcacacactacacagctagctgttcaagttgtcttttcaatttatctaaattttaattttaattttggaatgagacaaaggtgcataaacggtgggaagaaattccataaaattaaatttcacagagagtaaataaagaggtagatgagacattgtgattgtgatatatatagagctttgacattcattctactgttaatttacaaaaacagtagaatgatagagctttgacaatcattctgactctggctgtttaataggagcagattcttaattacatggtgaacatgttagaccccaagagtagtggagtatggtacgtagaagagagtaaataaaggggtagatgagacattgtgattgtgatgattgatagttttgagtgggagtgggattaagaggttatttctctgcatcatggagagccttaggcaataatacaatagcagcaatagttttgagtgggagtgggaaattatgtatgtaattctctagctgctatagcaacaataatacacaagtttcatatattgtctacatctacaccttgctattctaaggagagaaccagtgggattgacagagataaaggaataaatcattgttcatggtattaccacccattgccagtagttcaacaatacaatagcaatgaatggaaaccaacagatttgattcaccttatactactttcagaaacagaaattagaaacgatgcttgaatatctaaatcaccattaaatgcaatatcacaaataatttaattagaacatctatatcagtagacttacacatatagcaatcttttatgtatgacaaaataagtcacacaatgaattaataagctttctgtcgacaatatagtgagataagtaaaataaaataaa

SEQ ID NO: 238204 - DNA, 945 bp, Cannabis indica
tttctcacactaactcgccacactgggtgaagaacaccaacaaatacaacaaaaaactgctacttttagtgacaactttttagttacaatataatttttttgagcgtaaatgtgacttttaatcacagcaaaaacttacttgtgactaaaatttagtatttagatacaaattgtcactaatttagttttagtcacaacaagtatagtgactaaaaacacatttagtcacaacaaattgtaatttttgtgactaatacttttagtcacgaaccttttagtcataacatatgaatgataatttataattagtcatattttttttttacttttactcacaagttttattgtgactaaaagtaaaaaaatttatagtagaaatttacaagtctcaagggcaaaccaacttaatcatacatttcgcataaaaaaatttcttccaacattataattttataaattttattggattatattggttaggtagaataaaattaattccatcgtatgtgttcatttttttggtttagattttttgttgagttattatagttgcatttttgttagttttgtcatattggttaggacgattattgcaaaactttttaacacaccaagtgaatacgaagttgttaccgtgttttatcaaaattaaaagacttaggtgcatatttttttaatagttgttatttttttattttttttggaaaaaagataaataatacttattcttatcatataatttcaaattgtagggttattgtacttttatcaatatgactaaactactttcagctatatgagttttaaattcaaatacttgattacaagatggacattgttaaaagtatatacagggtactaattgagtatatgcctaagtaaaacttgtcacaaaacaatttggaaaggcaataattctttagggaattttcattttcatgatat

SEQ ID NO: 238205 - DNA, 2166 bp, Cannabis indica
gggcataaaacccaacacatttacagttggaagaagaggatgaggggggtctaattgccgaagatcaaaagggagaggcccaagcttttgatgataggtggtgtttggttggtaagtttctcactaatagaactattgattttgatgcaatgagacacatgttggcttccctgtggcaacctggtaaaggcgtttatgtcaaaaaactggacacgaatagatatctttttcaattctaccatgaaattgatattcaaactgtgattgatggaagtccttggactttcaatcggctgcaattggtgttccaccgtttagagagaggagaagatccaagattggttcagctacatgaattggacatgtgggttcagcttcatgatctgaaatatggctttatgtcggattgggtggttagacatgccggcaattatattggaaagttcgtcaaatctgatccaaaaaactttattggagtttggcgagattatctgcgagtgcgggttaccattgacatcaacaaaccattgaagagacgtatgaagttgattaaacaagatgtctcttggctttggaccacattcaaatacgaacatgttcctacgttctgttttatatgtggcttcattggccattcggataggttttgtcctaggagatttaatcctcagtttgatccaaatgtcaaaccttatggtgaatggatgaaagctgttacaagaaaaaagaactacctcatcggggctcaatggctacgctcagggcatgaggaagatgatggcggcattactggcagtggacagccccggagtatggctgagatgcgagaatcaattgaccctacaatggcgcgatttgatggagataattcgggtagcaaatcaaggagaaaataaaggaaagaatattatggttagcaatgaggatcatggcaataaagatcaccaagtggatattcctattgaagatcctgtgcttattttggataataaaagaaggcgtattgttaaggaaattttgagggagtttcatgacgtggaagatgatactatgggcggtatggaggatttgaatggtagtccaaaaaacgattcacaggtgggccgtggtgcacaggcccaccagccattatgagtatattggcttggaattgccatgggcttgggaacccatgcgctagtcaattcttaaaggatcttgttatccaaaagcagcccaaagttgtttttctttgtgaaactttttcaaagtctgaaggtttggagaggatacgtgtgtctttgggttttgagggggttttttcagttgatgctataggaaaaagtaggggagtggctatgttgtggcgtgatagaagtgatgttaagttactgggttatggggggaattgcattgatgttgaaatcagtgagaatgatgggagaaaatggcgacttactggcctctatggagagccaaaccgaagccttaggaggaacacttgtgatcaaatttggtccctaaaagacaactattctttgccttggtgtgttattggggacctcaacaatgttacttctcaatctaataagaggggtggtcttccatatccaaattggctcattgaaggatttggaaatatgttggaagactgcaatttatttgacatggagttaggtggatatccttacacttgggagaagggacgtggtactagtgcttggattgaggttcggattgatagggcattagtctctcaaacttggcttgatactttccacttgcgaaattgattaatcttgaagtatcaactttggaccactacccgattcagctgacacttgatgttgttcagaaaaaagagctgcacaagaggtttagatttgagaacttacggctcagggagccggtgtgcttatagttaattcgtgatacttgggaggcttcttctgcaagaagttctgttatggacaaaattcctagttgtggtgcaaacctgctggagtgggggaaagactattcaggtaactttaaagctcgtatttgggactgtaaaaatgagattaaaaatggaagcaaggtagggatgatgcttcggtccagtagtataaaaatgcagaaaatcggttgcaggaggcgttgattcagaaagagatattttggtgccagcgatcgaaacaattatgg

SEQ ID NO: 238206 - DNA, 769 bp, Cannabis indica
ccaacaaatcagagattaaaaacggagttaaaaatagagtatctctaaggattttaagtggttcaaccacattcttttgaacccagatttagtccactgtaaaagagctttcaaagtcacacatgctttgataatctttgttcaatctttgtaaaaccagcacaaagtttttccaaaaactttacaatcaaaacacttagttcttggagctctcaacaactcacaaactctctatgttttttaataatgggattaagccttcacattagttaagacaagccttatataggccttggtacaaaccataagagagaaggaaaaataactagacaactaacttaacttccttcttatccgagtgttgggttggctgctgaggtggcaagtaacttgatcacaataccacaaatccatctagatctagtagcttgacacttgagtgagttgaacaataacaccaaattgagttgttcctgtatgtctcacaaaggggcctaatcatcttttctgatattcaccaagttcaagcaatgcttgaacttagcttgagtgattggtttagtgaacatgtctggattatgataaatttatatcttctttacattcacctcattcacctcttggctgttgatcacttccttaatgaagtgaagcattgtttcaatatgcttgaatttcttatggaatatgcaggtactttgattatcacaatatgttagaatatattttattaggacctagatttactaacaagtatgtttattaatat

SEQ ID NO: 238207 - DNA, 2285 bp, Cannabis indica
gctactgaggttaaaagttttttaggcttagctggcaactaccgttgatttgtttaaggtttttcaaaaatagtgacacctttaacataattgacaactataaatttgaagtttacttggactaatcggtgcgagaaaagttttcaggagttaaagcaacagttgatcactgttccagtgttgactcttccttctaataagaaaaaaatttgttgtatattatgatgcctcaagactgagtggatgtgtattaatgcaagctgaaaaagcgatagtctatgcttctcgacagttgaaagagtatgaactgaggtatcctactcacgaccaggaacttgcaacagtagtatttgcactaaagatttgacggcattacctatatggtaggaaatgtgaaatatgcaccgatcataaaagtctgaagtatttcttcactcaaaaggatctaaatatgagatagagacgatgactcgagttagtgaaggattatgactgtaaaatcttttatcatcttagaaatgccaatgtggtagtgaatgccacaaaaggtcaaggacaagtaacatgatacagatttaaaagcagctggcagatgaaatgacaaaagttaatatcgagttggttgtgggacaattagccaatattactttgcaatccacattattaaaaagaattagagaagctaagcatggacatacggatttggttaagattcaagataaagttttagctagtaaggctgaggactttattgtggatgaaagtggtatgttgtggtttatgaaccgtgtatggatgttatattaggaaggagattttggatgaagattagtggaaactcaagttaaatctctaaagcatcttgacggagactagcattttttaggggtgaactctgagacatttctagtgttttctctttcttttcttactttgtttttcttatatgtactttgattgtgtgtgtacatgtttgtgtgtgaatctcggttagatctaagcaagttcttggtaagaacttgttttgctaggatttcttttgtgctttgtgtgtgagtgagattgtgtttgtggtttgtgtaggcttctcgattgttctaagacaagagtctttactcttggggacacactatacttgtggtcgttttgtgtttaagctttattaacataaggtaaggtcatattgattttggaactaataataaagagttttgttggtgcaggcataaggctgtccaaattcctatagtctatatagatggttttggatttttttattttattttggcaggcttgaatggtgtttgccagttttttttttttttttttggtaatttaattttgttttttggtttgattattgtattttgttgttgttgaagaagaagaatgacgaggagtgagagagtagttttttttttaagttatcgtatttaatttaaatattaattaatttttattagttatttaataattttttttaaatatagaccaatagtatattgacacgcgacatctcacttgccaaattaaatacttaacgatactagtagcgacaaaagtaataggatgtaacttaagtcaattttttttaaaaataatataaatatataaaattgaaattatgagatatttatgccacaaatatgcctcttttgaaaattttatgaaaaattagaacctgtcacctaacaaaatgtgattgacagtcaatgatgtaaaattaaaatatatataaaatctatttaaaatgagaaatttacataaattattatttttggtaaattttttacatatttacgtttaaaggttttatttttttatttttacaatgttaataaaaataacaccaaaacaataaaaaataaactacatgaaaataatagaaaaacaacatcaaaacaacataaaaaaaataatatacaaaaaatcaacaataaaataaaaaaattaaacgaacgtatgttatataaataaaattttaaaaacggtaataatatttaaaattctatacagctgtatttttatattttttttattattatttgtgtatgtgttttttttttttttttttgaaataaccccttttacatttcacttaaattcactttcttgcactcttctattataatatttctttttatataatttatactagaaagtaattataatgcgcttggacatttatatgtttctcattttaaatactgtctggtatttaagaaagagttttaaatttttttttttataatcgtataagtgagtttttaaataattttaaataa

SEQ ID NO: 238208 - DNA, 943 bp, Cannabis indica
taagcacaaaatataagagataaaaactaatttcagcccaaaatgtctttagcccaaatgataatagctcttttaacccatttgtgtgctaggcccaaattaatagtaaagcttagggcacttgatatgtcgtcttcaaccttccagctactttttttttttggaagccatgaacagccactgacatctccctcagttcttcttacatagtcctcaatctttgactaccattcttcttagcagtaactaggttgatatatatgtatgtacatattttagaaaaccagtaaacatagagacgtcgtcgactcttttccaacttattttctgcgattcggcgtgcccgcgcgtcccttcgccaagcagtgaccacactcctccgatgaacttctgctatcgggcgcgaccacaattcccatctcttatctgtgctctgatctggaacacgcccaatttcctccaccaatcgacggtgtcgtggtcggtgtacccctgttgctgcagtattcagtgccatctccgtcttctttggcgttggagttcttcgagttgccttcgttgatgtagatcaagaatccacaacatccgatgaagccacgccgatcttctccgccttcggtgttcttcaagctgccttcttcgtcatagattgaactgacattgattgcgatctacttagatcggatccagctgaaatgtcactgccgacgagatcgagagccttctccgatggtgcctgagccgagggagccatagatgtctctgttgatgagcaatattgctcaactctaacatctaattcctccatgagatgcactttaaatgccttcaattgagcatcaaagaatcgataattacgacgatccaactccatcaacatcttcgcaatctctatttttttcatggctgagagttcttacagtgaatctttcactgtaattgc

SEQ ID NO: 238209 - DNA, 770 bp, Cannabis indica
atataattgtaattaaaattatagaacatataattatttaaaataaaaattattttaaatttaaaataataataaaaatctgatttattaaataaaataaaaacaaaaaaatctcaatcgttctctccctcccctgctcgtctcttctccttctttcttccttcttcttattctacccaaatttttgaaaaatcaacacgagaacaacaatcaactaagtgcttattatgctaaaaaataaatccatctaattagccctctatttcatcttcttttcccaaccaaacaaaagtcatatctattaaaaaaaaattagtaaattcattacaaaaaaaaaaaaatagatctgtttctttcaaaaaaaagaacaacccatcagccatgttcatcggatgtgaaggagagaactttgccagagagagaggaaacaaccagatctaggctctgaggcgccatgaacgtcaagatctaggagagagaagcggatcgaagctcgagatccaggctttaggaggtttcaaagtacgagggagtcgttcatcggcttgggtgttcgacgactctcttgaccagatctgagggaggttgacatcggagtagggtcatttcaagtgaacaaatatactagatctgaggaggagggggagaagtgattgaagaaaaaaaatatttttaagtttattaatttttattcaatcaatttaataatagattgaatctttttgattgcttttaaatgtttctgcaaaaaaaaaatggcagaagaagga

SEQ ID NO: 238210 - DNA, 1072 bp, Cannabis indica
tacagaattttttagggtctcttttatcgcggtttccgctgattgggggaggctttttgaagaccccgttcttttcttcaatggcgtagatatggtcccgagggactgccaactctatatagtttacaaagtgtgggccacctttccttttcagagaggattccttctttggaggggacttggctaatttcgaacttcgctgtctttgtggactgcgtcttctcggactccttcctctggaattcttccctctatgactccgagatcgtgatcgtggcactgttgacttacgtttatctttgcctttctctaactcagccagagaattctcaatcctcttatgcggctctgctatggcaaagaactcgaccaacgattcaggtctttgagcttgcagttccttccagaaatcggttcttggtaggacacctgttatcaacatacacactagcgaagattcgggagccttctctacttttgttacctcaacattaaagcgtttaaaatagtcctgtaaagactcaccaggttcttgtttgatattagccagagtggtataggggcctataggtcatcgtggctttgaaatgcgtgaggaacaggtcgacaaaggtcttgcatgtcgagatagatgcctcgggcaattggctgaaccaagcatgggaattttcttccaatgttgccgcaagaatgcgacactttgcgagttgaggtacctgatccacttccataatagtattaaatttttctagatagtctatgcgattagaggtacctttgtattttatggatttggataactggaatccttggggagtcgagcttgtcgcacttctactgtgaaaggacaggtcccatgcaacttgtatatgggctttctctactgcttgagcatttttaaggcctccagaaccataccttgatcaatgttccgggctagaggagtattgacttgatcaatgttttctgggatattaaccccagtagttgcagctggtacggtaggcagattgatgcgattatttataccctaatcacccattcggggatcacggggctctttgacatcacg

SEQ ID NO: 238211 - DNA, 660 bp, Cannabis indica
aaagctaaagacacatattatagtagtagaaagctacaaaataaataatgactaaaaataaaaaaattataataatagaaaaaattaaataaagaagaatagtcctatataaagagattatgttatggactcatatctcttttatataaatatataaatttgtatattgagattattaatctttttaacaatcaactctcttcataattatttttctgcttgaatcttgatactatgtaactttcatacaattcaatccacgttcgaacatatagaaatatatctttctattaaagtttactttacgaaattaagttacccttattttcgagtttggtcttctacatgtatactaagccaaattaatatatatttcatcgtaaagatgagatgagagcgcatacacaattctgctaacatataatattattaggtgtgaacttaagatagacagtttgtcgacaagataaaaaatagacagattatgccggggtacctatttttttagagtgaaaaaacaaacactaataccatatcaacaaccacgtagcactatcatatatacctaccaatttggcactaccatatattatatatacctacgaattcagcactgcatagcggtcaaaaactgaatatcttgaaaagtaaagttccact

SEQ ID NO: 238212 - DNA, 763 bp, Cannabis indica
atcaccagttgtaaagttgcaaggagtgctcccactatttcccacttgttgtttgcgggtgacagatatgtctattgtcaagcttcggaagcagaagcaagtcaagttctttcactccttcggttatttgaagaagcatcaggccaaaaggtcaatcttcataagtcctctgctttctttagttccaacaccatagcggatactagaaaccgtatatgtactttgatgcggattcaagaagcaggagaagacagcatgtatttggggctcccaagtatagttggtcgcaacaagaatgctgttttggggtttcttaaagagagaatgaggaagaggatcaatggttgggagggtagatttctatctcgagctgggaaagaggtgcttatcaagactgtggttcaatctctcccatcgtacgctatgaatgtctttcttttccccattggcacttgtacagaaattgagaggatgatggctagcttttggtggaagtcgaataattccaacagcaatggcagcggcattacttggatgagttgggatagaatgaccaagcacaagtttgatggtggtatgggctttcgtagcttgagggatttcaatttagccatgcttggtaaacaaggctggcggcttttatttaatgtcgattccttagctagcaaagtcttcaaagctagatattacccacatggcgactatctaactttggagcttgggtcgaatccgagctttatatggagtagtatctttgctgcaa

SEQ ID NO: 238213 - DNA, 1097 bp, Cannabis indica
aacacaaggttcatcttcattttggtgaaagtcataggttttgattatttcatcaaaccttttgttccaacagcaagaagcctgcttaagtccataaatatacctattcagcttgcaaactttctcttcttgtcctagaagtttataaccttctggttgcaacatatagattgtctcatcaagaattctctactcgattattcgatttcaaaaattctaattttgttctcttagctaaattaaatgttatttagaaagtcaatccaaaaaaaaaaaattgaaccatcgagtgagaaaacttgttgcacaagttagtgagccggccaaaatttgtacttataaaccctagtgtacaatgcaaatcactttaacaagaccaaagtaaatttatactatttgattgtgtgtagtcttaatgtagatgagcttcgtagcttgatttgcatattttgatccaaagttgattttttctgagagttggctttggctttgactttaacttttgggttgacttttgactttgagcttttgaagacctcttttgaatagtgtcttaaatttttgattccttgaggaatcttttgctctttatcaagtatgaagtagttgatatgcttgttgaatccattttgggtcactttgagaagtttgataaaattaccatttcgccttgaaaaaatttattttatcttttaattttgctacaaaatcaaaaaatcaatagtaacaaataataatcgaatatttattaatcatcaaaaaaaggagacctaaaagtttgagttaacacctagggctggccctaggcccaagttgacaatttattaacctgggccacaaaaaatagagttttcctagaattattttgagcatcatctccatcttcagaaaatattgagaatcaactagttttggggaccaaacggaacttctgaaggggcagaagagggacccagtgcccaggtagacacctaggactaggccttgcgcccaggttgacattttgtcaatttggattgtttccaaatcagttcaacaaaaagtgctctagaaatctttaccgtcataaaaaattatgaagattcaagtaaactcag

SEQ ID NO: 238214 - DNA, 634 bp, Cannabis indica
ttactattactaaattatatatgttttttttaatatcttttggttaaatttatataatttttgagcaatatttcatataaaaaaattattaatatcattaagatttggctatatacttataattacacaaatttttatatcaacaccctacaaataaattaatatataatcttaatttttcatgttttttaattatagaattataatatgcaatattataattaagttttatgattattttaacttatttataatcgttaaattcatatcttattattattaataataataaattataagtaaaaaatgttgtgttttactttttgagtttgtcgcattgtgctttttaaactagtctattcgtgcttatgtgttgtgtcatgttgtgcttaaagacatatattctgtaccgtgtcgtgccaatatgtagcattgtgtcatgtcgtgcccaagctcgtactttttcatgcctactcatgctcgtgttttctgagctcataccaatttcgtgccgtgtcaaaaagcttaacttgtatttacaacactgttatggtatatatttttagtttatttttcacaatttttgttatgagtgtatttgattaacatggaaatttcaataatttattttttt

SEQ ID NO: 238215 - DNA, 596 bp, Cannabis indica
tttatattaattttcttttaaatttaattgaaaaataaagtaagatattttatgatatttgatcttatttactgaaaatttaaataaaaaaattcaatcggtatatgctcctttcaattggtatataccagattttagaattctatttggctacacaagtgaagattaatccatgtatcaaattaattatgtgtcactcacaattttcctaactctgtcactatctctattattgatttactaaatagattgatgttgaccaaggttttcggcaaccaattaaataatatgatgagaagaactttggaataattaatgcaggtagttttaacgtgctttgggtattaatgagtcgtattccacgagtctttgttattaatgagagttcttatacagagatctgttctttggtgaattctctctctctcttctttactcttttccatcgatccccttttcttttattcaggggtatttataatgttttgtaaggatcactaaaagggatcacttgtctttgagtgccagccatcgaggtgcacaagttcctaagagatataaaataagacatacatgacctatgccataggtatcat

SEQ ID NO: 238216 - DNA, 2536 bp, Cannabis indica
taacaaaattaatatagatatacaatagtctttaaattatttgtttctaattctaaaaaaaatatacaagaaaaaaaattaatttttacgtggcaaaaaataatataaataataaatggtataaaagtgttatttctctaagtatatttacttgcatgatttggggtcatatctgcaataatatctcaaattaattcgacactgttaggcctaatcaattaacaattaatacaagaaagattaaatggctatctttcgggtcttgtgtataagttaggagggttttgaagtgagtgcgatacattagacccataattcctctaactagaaactccaattatgaagactcaactgaatttgtctaggttaactatattaatagaacctaataattgttatgtaccatatatgcagcaatttttttgcaccaaacgagccattcaggactataagagcacgagccctatagaattctctaatttgatgtgcattccattatatacatatattcattaattagattagccatgagagagttcacttcactgtatagtgggtccaattgcaaatatcttatttcacaaaccgcgtattccatggataacgacatttatttatatctaaatatttatctataatataagtttttccctccttatccaattattataagtttatattttgcacctcaatttcccattatcgaattcaccaaatttagcaatcacaaatcttgctctatgtacatatgtgcacaaaaatcttgtaataaagttgtgatattttttttttttgttcttttttaaataacaaataatttcatgaatataagtttgtattttgttttaatggatggtccataagactcaataacccaacacacatgcacaccttcacccaattaaaactagaaaaaataatgataatgaaaaactttttggttgtgaacctacgtggaagcttacttcgaagcatatgtgtttcacctccatgaagctaaaaaaatctaatgtgctaaagataaatacacatctataaataagaacatgttacatatatcatgacatacttaagtatatgatctaatatacttcctctatagtaaccattatatttgagaacacaaacacacacatactgacatatatatagctagtaatttcatgggagagccaagcactgagaataataatagcttcatggggaaccatggcgcggccagttctatctacagaggagttcgcaagcgaaaatggggcaagtgggtgtccgaaattcgtgaaccaggcaagaaaacaagaatttggctcggaagctttgagactccggagatggcagcagccgcctatgatgtggcggccctgcatttcaggggacgtgaggcgagggtcaatttccctcacctcgttgactgcctaccccgaccggtgagctcgagttcggaggacattcgcatagcgtctcaggaggcggcgttgaggctgagaagtgggacagtgggtccttccacagtggaggagattggtggctccggctctgatggtatgggtatggcgcctgtcacggttcggctttcgccgagccaaattcaggcaatcaacgagtctccgcttgactcgccaaagatgtggatgcaaatggtggaggagtcagcggtgtttggattcaacaatggtgatcaggataatgatcagtactgggatcatggtgattatgaggatatgcataacgattctctttgggatccttaactaattaacctatatattattgttaggtagcaatagtattttttttttcataaattatatacaacaaaatataatgacgtaacattaataaataaaacatattgaaaattaattaagattattttcaacgtcctatatattatataattacgaggccgggagtcagttttatatatatagatatatatatatatatatataataagtatttgttttagtgattatatattggttataacatgatcagcttataataattagctagtattgaagatttgggttggatttgttacattgtgcgagtgattttgttttcagcaggttttacaataagcatattacaattagaagttttcatgatcagatattggatagtactgtatactttgttttcgagggagaaagtccatttgtaatattatattctcaatgggagctgatttttttggggtcccacttttatagaaaaaaaaaaaggaaaaagaaatgatgaaattagttcttgcttattggttggcaccatcaagctagatttttttttttttttaatttcttttttttttttttgatagagaagctataattgtggtttggtagccaggtgcctattatatgtgctattatgtatgtgtgaagtgatattggtttgttgggtaacacaccagtgtttcatgttcctatcattggcttctatttatggaagggtctcgtgtgtggttattaatttattttattattactattgttataaatattaataattatgtggatgtctaaatctttta

SEQ ID NO: 238217 - DNA, 1194 bp, Cannabis indica
ttattttattcttgaatgtaccaagaatattagttctttatctcttttgcatgaataatttttcaatattagttttattaataatgagattattatttctaagaatggtgcgcctatttatttttcaaatagagtaacaaactttatgtgctcaatccaagtgatcaattaattttaaataataaattgtttagagtagcattgcctcaatcaaataagaggcaaaaagtttatgacaatgatgaaacgtatctataacatctatgtttaggccatattggcctagcagaataaatcgattaacaaaggattggtcctttgagaaaactaaaagttggaactcttccgatgtttgagtcttgtttagaaggcaagatggcaaaagaccttttttttgtaaaatgtaatagagctaaagaataacttgagcttatacacactgatgtgtgtggacctattaatattcaaactcaaaatggctatgaatactttgtcacttttattgacgattattttagatacagtcatacttacctaatggccaagaagtctgaaactttcagaaagttcaaagaattcaaggctatggttgaaaaagccattaggtaaatcattaaagatactttgatcagatcgtggtggtaagtatttggatttcgaattcaaagactattttttggaagaagggatcttgtcccaactcatagtacctataacacctcaacatacggtgttgcagaaagaagaaactgaaccttgttagacatggtcagatcgatgatgtattactcatcactgtcgctaaacttctagggatacacacttttggcaactagttacatttcgaatgtagtaccctcaaagagcataatcaatactccaatggaattatggaatggtacaaaacccagtttgaaataattttgtatttagggctgtcctgctcatgttcttaaaccaaagtttgtgaagcttactcccaagactaaagtgtgtatatttgtagaatattcagatgagaatcgagatgcctatttctatagtcatcaaaacaataaagtatttgtattaacaaatactatttttcttgaacataactatatgaaaagtcataagccacgcaatcaagtggttatcaaggaaataagaaatgagatttctaaactaaggatttcagcaccattagttgaacga

SEQ ID NO: 238218 - DNA, 963 bp, Cannabis indica
gacctcacttgcgtgagatactacttgattgtaacaatagtggattaaatgaagttatgagtggcccttgtcgataagcagcgtcactccgtgttggtcgatcatcccttttaaggtcatggtattagtaaaggttaagccaactagcatgttgagagagagagagtagatagtattttttcaaccgagttctctatggatgaatctggcgtgagcggtggagactccaagattccagggtcatcttcttcgacagtgaccaacaacacttgtaagaattttcgttcacccaaatggctaggatggaattttttatcacacttaaagcaaacaccctgatccctcttctctttgtactttgccttcgtgggttgacgtgttgctggtggaggggtttatttggtcacatttgaggtggtggtcagcgccaatgaaaacattcatagagttgtcgtattgttcttgtttcggtacgagcaaaaattaggtcgattggcaatgatagggctcaatatgggcttggaatgagtgtgtttaatgggtgggcccgtttgtaaaatgtaatgcccttctatacttctatatgttgggttgtttccatgatgtgggccaggcccattacttgtaagatgtgcacggtggcctaattaatatcttctctcagccattttataaaacaagtatcccacatgtgctctggtatccttagtatacaggacgccaacatttcccacctcccacggtagcccttcagcgtggtgatctaacaaacggaaagcaattcgtccaataaggatcatagcgacactccccaaaattagaggagcatcatattcttcaaggctacccatgatgtgatttactttcgtcggttctcccattggaaccaagtaagagcatctccttccaaacaaagagcatctccaatagagatgtaaatacaaaagatagctcactttataa

SEQ ID NO: 238219 - DNA, 8136 bp, Cannabis indica
ataaccgattcaatctaactagaattaaattttagtatccaatccaatacaattgtaattaaaaatctaatcttttgaatttagattgaattcgattcaatcaaattaaattagatgttacacacccctaacaaaatccctccattgccatatatgagtcttcttgagtggtcaccaccactcactagtttttccaaataaaattaatttaatcaaaccctccataatcctatttatgtagagtgatattatgggctaccttaaagtgtcaaatactataaaagatgatacatatactgttgcattttaatattaaattttatatatttttatttattaattaatatagaaaattgctaatctattataaaatattgtatctatatggtgttagataccttaaaatgtcaaataacaatgctcatttatatatatatataataaattttgtgttgagttaattaaatacttataacgttaatgatttgtttaaagtttaaattggtaactgagaagctgttgaaactttgatgaatattttaacaaaatatagtgttttagtgggtgtggagtgtgaagtatccagttttgtgcgaatgggtgaggactcaccactagggtcggcccaaatattttggggaccttgtacaaaattttaaaattgggctctttacaaaaaaaaaaaaaccgtatacattaaaattaaaattctattactagcttttttttttttaaagattcgttcataaataggtcttttctttaaaaaaaaaaaatgggccttaaaaaaataggggtcttgtgcaatgacccaagctgcccaatgctttggccgactctactcaccacacacgctagcgttgttcattcgattcggattggtgtgacactttattatttttatagaaaaattatttaataaaataattatttttttattttaattgaaaaatgttcaattaaaaaataaaattatttattaaaaaataattattttaataaaataattattttttattttattttaattgaaaaatagattgaaaaataagtaatcagtttaattaaaactgattacttagttgtatcagttaatttaatgggacacgctcaaccaattacaccccacgatttaaaaaatgttcttctttccgttatgttatttcaatctattcatctatataatgtgattgaactaatgagaagaatacatttttttatatcgaaaaaaatacagttttcacaaaaaaaattccatctgcaatatcataaaattttgagtctattctacggtgctctatagtgcagtgaggttccgatacaataagactgagttgttttatcttggagatgatcgacaaatttcaactgcttgtacattcttagacagttctgcaaacatttttatggcctagtccgcaactcaatccaaaattttcattgggtaatatctttactcattaatttttatttactctaaataatatcaatagcattatattactttagtcattacgttttcagtccttttatcccacatcgactgaggagttaaagcagtagagcctagcgagctataaagccgaaacttggcaattggccacacttttgctaagatcattaaagttttacaaagtcaattaaagccaggctgaacaagtatgttcttttatcatatattaatctcattctacatttcacagctctgttttcttggataattttctaaaatttactttcaatagttattgttctccatgttattattgttttggttgagaatgtataattatatatcagtttggaaaattaataaataacaatgtagaggatttgaacatgtagtattaattgaaaatttaagaagagtttgaaaagaaattttcacaattttaaatttgatgaatagagaaaagaaatgtgttaatagcagcacaaacccacctgtttgataaaagtcttcaaagaatgaatctctcacagtactaattttcacaggtgagtttaattgatcttcttggctcatccattggagctccaactaagaaaagcctcaaagttttcagctttgattcttctcatatacttttgagtattagaatgttaagagtatctagaatagtagcgttatcagcatcaagtctcctcaaacatgcatcatctgcttcggctattgtaaagtgttcgcctttcttcactacttcgtctgttcgacccaaccttcaaaacccacttgagaaagcgattccaggcgatttcgccaaatggggttctcttggattcttcagaacttcgaaattcgcttctgggttttctcccttagagcgtaagccgttggattcgataatggatacttcgagggcgaaggatcggtcagccgaggaaattgcttcaatttgggatgatgtaatgcctcactccttttttgtatttcattttcacttattcctttattcattattattattatgttttcatggattttcttaactaacaagccattgttttgttttttatttttatttttttggttttgtttatatcaattcatatcatgggttaagcaatttatggagtattctgtgcttgttcaaacaatattctgatacactttatcattggttatcctttgatcctgtttcaatgacttagcaacattcattatgcttgagttttggctaaattttggccatggttctcctgaaatggggtagtgaataggtaataaataatgttcttgtttggggacttgtgagtctcgactgctcatgaaaatagtctgtctgttgtttatggcatttaagtaaatattaccaattagtatcattatgaagaatataaatttcccatttactaagtgaactttgaccatactttcctgttttccagtcaaatctaaatgtagtttggtggaaggtaatatttacaagagaatccatttatttgtatagaccatcaagcatgcatatttgagattaatcatatgcttatggatatttgttgactcagttgcccattgattgaattcttttacttaacctgttattaactgtttcatttgaattcagtatcatttgggacgaggacatattggtgcatctatgaaagcaaaactgtatcacttgctggagcaaagagcagcaaactggtaactatatatattatctgtgaattgcgatgttgtgctgttaatgtgacttatattccgttgccattgttaatcttgcagccgctattttgtcatccccgtgtggcgaggatctggctatacgaccatgtttgttcaaggttggtgtttacttaatatagtcgttataatttcttggggtttgtatttttctgttggtaaaatataatcaataccgatacttcgaaccttaattgctaaaattgacaagtaaccaatatatgccctgtccctacttattccttgtgattaagtggttgtttccaaccctatgatgtatatatgttacttgttttaaatttttcaagacattagtcagtgaagcccggtgtaaattgccttctagtgtgaggaggaggccatgaaatgctttgggctgcagtgtactatgtacttgtatataatttgtttttttttttggttacagttatttatcttcaaataagcatctaaaacacacttctagactatttttgttaggaaatggtattatctttttttttattattatttatttacaataaaaggaaaaaccacattttttgttgtttttaggatatgcctaaggcaattaggaatggaaggtgcataaccattggctgaattccatcactcattttatctatgaaaagcatatataaatctcttaattgtcatttgtaatatatccaaaaacaaaaaagagaaaagcttaaagtgagaaaagctttttgagagaattttctaagaaaaattattgggtgtaattggggtgtgggttgagttataagcgctgtgaatattttgtattttttttttatctttgtagtcaaaaatttgccgttgagtttagagacatagaaacctgacaaactttttttatcaaatttgtgcatgtgtgtaatttgtggtattatttttcattctcactaatatgattcatagggaaagttgtgtaattttcctaataactagtatcaaatcatttggtaaattttgtaagtattcagagcagaatcgccaaaataatggttgtaggtagtgaaactcaagatgttcgatggtgtagattaaaaattctaaaagatgcaaatcgaaaattacttatatcgaaaaagctttattaacttctctgaaaaaacgtcacaaggtatgaaagacgaaaactggaatcttcttcacatacaagtccttagagttatttgattgacgttattgttcaatattacttttaacattgtaaaagaaaagactatgataggttttatggcagctctctccaatatatgagaagctattatcctctaacaaagttcatttgatgagacagttattcaatttgccgatggcagaaagcgcatcattaattcaacatcttaatataattaaccaaattgaattcggcagtatgagtactgatacttttgtcttccctgccagatagttgaattgcttgtcacgtctgtgagtagctcattgagaagcaataagttaaaatttaatgatcttcatgatctgttcttagtgaagagatccaatgaagagagtcaggtgaatcatcaacctctttagttttactatacaaagtcaagaggaagaaattacgaccagagggaatggctgcaaaaggtcaaattattcagagatagaaggtcaaaattaagaaattccagtaattttttgaactcgaagaccgtaagagtgttggaattgttggaagactaggcactacaacaatctagtgtagtttgaccatcgagtgtaatttaaggtcaaacttgcactattttatggtctttgagttcagtgaattattaagattccttgatttgacctcctatttctggatctactttgatagtttgaccttctgcgtccattccttttggttgaatttttcttttttgactctgtatgtaaaactaaagagaggttgtttattcaccttactctgttaaatctcttcactcagaattagattacgaacatcatcaaattttaacttattgcttctcaatagagctactcacgtgacagtagcatttcaactatttagtagagaaaacaaaagtatcaatgtttgtatttcatcatcaaattcattcccaaccgaagtcaactaggttcattgtattgagatgttgagttgcagatgcgttttctaaataactgcacacctcatcaaatgaactttgttagaggctgatggcttctcatatatattggagagagctgccacaagacctgtcatgaacattgagcgatttcgccaatcgaataactctaagaacttgactgtgaagaagattacaattattctctttcataccttctgacttttttttagagaagttgataaagctttttttgatataggtaatctaagatttgcattaccagaatttaaaatctgcaccatcgaacttctcgactttcacctatccttcatctgcagccattgttccctctcaaatctgacttctttagatcgattcagtttttacatagttcattaaatgctctaatactaattgttaggaaaattaagcaattttcctaatgaattagattagtgataatagagaaaacaacaacatgcacaaatttgataaaagagttcggtaggtggctatagtttctaaatctaatgcaaatcttttactagaaagataaaaatatacaaagtgtttacaacacttataactcacaacccacctcaataatttttcttacaaagcttctttctttaagtttttccattttgtttttttgggatatgttacaaaatgacaagaggtttatataggctttagacaagtggtggaattctcccaatgattatgcacttttcattgccaattgcttaacttaggcattctaaaaataacaaaggatgtggttcattctttttattttaacagcaaaaaagggaaggataatgtcatttaacaaattttattgtgaactatctttcatcaagaactcaatcaagacttgtataatatttactcttaaaatatattttgcagtacagatgccacatataattttcactggtcttgaagattacaaggcaagaggaacccaagcagctccctacttcaccattacttactacaaagagtttgcagaaaccaaggacctggttcttattcgaggagacgtggtattcaccagcaagctcagtgattctgaagccgaatggcttctggagacaacacaatctttttatttgaatgacacgagatacaaactggtcgaaagattcaacaaggatacccgtgaattcgagttcaaggatgttctgcgagcactggaaatgccggatatataatggtttccatgcgaactggattgttggaaatcaaagacaggtttaatattagcacaggagtacaaacaataccaacattactagatttgcagtagaggtagagttctgtttagaattttgactgttgccttttataaattatgtcttctctcaagatttaatcttttcagctgccattttaactgttttgcttggttacactgattacagccagctgaggttttctaccacagtaattgtagtccctttattgattatatgctcttttttaagtgtatattgttcatttgatctattattttttgttaattaaatgaggtaataataccactttggtggaacactttttggctatacaatgaccatttggtttcatgtcacattttacaatgcctatatatgtttcttgttgtatcattatttaacaaatggaggattgctattaggtactgtagtggttagcaccacaatgaagatttcagttacaaaaatgatcagcggttttctattatcgttattaaagtaaaataataaaaatgatattgaattgcattaatattgatatataagtatttgtctaacaaatatgtctctaaaggtagagaaagggggggttagatgaaaaggaaaatggtgtgttaataatagtgtattagtgtagaaaaaggaagaagaaaaagaagaacatggtgttgaaatttgaataggccgagagttgaaacggaaagaaagtgagtaaagaatggctctgggtatagtaggacaattctgcaactgcaaacatggcagagtttgagagatattattatgtatacacattgctattattataattaggctaattaggatttttttctcgtcgaactttaagtatgtatcaaatcatactctaaggatttttatctaatttttagtaaaaaaattctaacatagatgaaagttcaagaagcatgatttactaaatgtcaaagttcgaggggcataatttagtagatatgagaagcatggtttagtacataaacaatcactgaaatattaaaattgaatggaattagacaaaagttcttaaatctaacaatctcaatagttcagggagaatttttaaaggctaaaaaagttgaggggacaaaaatcttaattagcaatattattattattattcttattatataaagaaactaatgaagaaaataacacaatgcaaaaaaaaatataatctaaaaatcatattaagtttaaaaatcagttttattaatattaaaagaaactatatattttattaaaagaggaaaaaaaaaactaattttattaatagcataaaaaaaatatacacaatgtttaataactaaactttaaaaatgatactaactttataattcaatttcaaatatataaattttatataaatacctaataactaaatttctaacttcattctctattttgtttaattttttattttgcttgctcaaaaataaaaagactgatttaagcatacaatagggaacaaaaataaacaaaagagaatcagcaactaaggtaagaaaaaccaataaaagaataacaaaaaaaaaaaaacaaaataggagagagagagagagagaaattatatataaaaaagggttatttgcggcaa

SEQ ID NO: 238220 - DNA, 795 bp, Cannabis indica
atctcaagaaaaatgtttcctctcatccatgattggttatcacaagtcaaacagttttttcaatctacaataagctcatttgtgccccttgatgcaggatgaaactaaaattcgtatcaatactaaagactactttctagaccttgcccctcatataagcttcattataataaacctttttcgccatttccaaattctatggaaggaattctagcttgagatttgagggtacaaatagaccatcaaagcaaaagtatacttgaacttagattattgctacaaacatctagagatcaaatttatgacaacagagtgaaacaataaaacaataaacaagataagtactaaattacaattgccaaacttcaacaaaacaaccaaactaatcacctgaaccgaaaaatgcaaacttgtgatttgggttattacatactgtgtatagatatagatatcactaaaatttcaaacaatataacaaatgcttgtttcaatagaaaaacacaattacctgttggcatggagcaaagcagcgggtcccaaatacttctcgggattccaccagtaactggggcaggatgtactacagcaggcgcatagaatgcactcgtacatcccatcaagcttagctctatccttcttggttttgaagaatctcctgagctggttcagaagctggagtcttcgcttcaacacggctcaatgctcttatactgattatagaaaatttggtcatatccaccaccaaatcctttaatcacaaacatatgcggcaaacggcgtgatcatcgtggacga

SEQ ID NO: 238221 - DNA, 1186 bp, Cannabis indica
aacacgtaggtctatgccacatagacataaataggcgtgtgagcgtaacacgcgagtctgtgtcatacagacaaaaatgaaatggcattaatatttatgtgatgtgttaattatgattatcgatatattttactgtcttgctgggcttggctcacgggtgctctactgtgcaggaaagggtaaatctgtttctaatcagccatgagtgtgggagctgggcaatgaatgtacatgttcgggccacactagaccaagcgggttgagatctaccagtgttgaaacttttgtaactctattttgccgcttaggtcggctaagcgaaaagaattgtaatattttgtaaaacaattttcgggatcccaaaatatgtaacttttgtttgtaaggttacaattattacaagtttatttttattcctttttcgtttaaagtttaatttccacgcttattttattagtaatctcatttaggggattagggtttcttaatcatcttgggtagcgtgcctaaatgttagggcactacattttagttggtcaagctaaagacttcacaatgccaggtaatgggattctattatatgaaactcgagtttgcattctgaataatgcggaactaaaaaataagattctcgaggaagctcataccactccttatatattgcatcctggcactaccaaaatgtatcaagacttaaaacccttttattggtggtgtgggatgaagaaggcgtggtataatatgtatctcggtgcttgacttgtcaacaaattaaggctgaacaccagagacatgcaagattgttgcagcctttaactcttcttgaatggaaatgggaggatgtcaccatggattttgtggtttggttacctagaaccacgtggatgttcgattccacatgggttgttgtgaatcgatttaccaagtcaacacatttcttaccagtgaaaataacctttatagtggatcaatatacagatttgtatgttaaagaaatattgaggttacatggggctccgaaatccatcatatcatatagagatccgaagttcacatcaaagttttggcaaagtctccagcgagccatgggtacaaagctgaaatttagtacaactttccatcctcagacagatgttcagtctgagagaatgattccaatatttgaagatatgctgcgagcctgtgt

SEQ ID NO: 238222 - DNA, 1081 bp, Cannabis indica
aatttgtaaataatcatgatcatgttcctccttgtaaaatagaagtaccaagaacttgaggctcaaactctccaagcaaacattcatgttatcacctaagaaactatgatttgttaactccaatttctcaatagatgggcagcccaacaagaatttaaccacgccttcttcctctgcattctctgaattccaaacgtcgtacaatatcaaagtttttaagcacggaaaattaaatgaacaagaagaatccaaccctactgatttcaactccgaaatagtcaaatatcgtgcattatctataactttaggtaagcagtaattagactcaaagagacgatgaccaaaattctttaggcctatctgaagtcttatttccttaaccttattattatcaattacaaaggctagccatttatctatgatgacattcttgttttttttttataacaccaaaatgttttaagcttaaaactagttatggtgagtgaagaattgtcaataataagatgcatagctttcttgcgttgttctaagcaattattgacatcattgtaaaacttttcaacatcattatcaccacaataatgagtatcattatcgttaaaaaagagtatggggagtgaatatggaatggatttccaacgctttaaaagaatgcatgtcgaaaccatatctttaattgggagaaacgagagaatgtgatggattagttcatcgggaagttccgaaattttgtcattatcacaaccatccaccaccattgttgttgtcatgatcttaaaagattcaaggaagagatacccttataattgttgtatacgtaattatattttgttttagatttctatatcaatgcatgcgattttgatttagttaaggatatacttcatttataaggttttttttaactgattatatgatttgttttttattattattaatattattcaatttactttcataatttaatcttttttttttcgtgtttgactttgtgatatttgttttttaaattttattaaaaattatatatgtttttaaaatttggaaattataattttatatatatattagattattt

SEQ ID NO: 238223 - DNA, 657 bp, Cannabis indica
ttcatttctaaaatcttaattatgtgttccaaatgaaaattctaagatatgaacaatttagatcattgcataagacttatatataaataaatatatataatataattattttttttttataatgtatacatgataaatattcataatatcaaacgcatttactaaaattataataaatgtaatctcaatatatgtgattctaaaatttttatctattatagaattaatgaaattttctttttctttcaaaaactaaatttataaaatattgattgataattttttaaaataaaatgcttaattttaattttttgcccaaggccggcaaactacttggactggccctaaatgtgagaaataaatattcataatttagttgagatatatggtatattatcgaaggtaatggtatattatcgaaggtaatgagttcaaatcttataatacttttttgagagtagattccaaaaatctaaaaaatctaattggtcccggtatattttaagagtcagcccaactaactagtctcatatcaacatgtcaagatgtataccaaatactatactattactagttgtgtatgagttaaagactctgtactagtttttcatttgtaatattaaatcctacgtacaatgtgattctaaaacttaaagc

SEQ ID NO: 238224 - DNA, 787 bp, Cannabis indica
ttcaaataaattttaccatttcaccaatttatataccatatttaattaacattaagtgagtagaaaaaatatttggatagggatcccaaaaaattattttactttaggctctaaataacttaagattagtcctgactgtagttaatagttttctatataaattattaaattaaaatatataaaatttaatattgaattacaccaacaaacaatagtaatatcatttttgtggtgttggtatgaattactatgtttcataatttaataattttttgtacaaattatttttttaatgcattatttagaataatgctaatttatatataggttaattggaatttttactccctaaactttaacatgtaccaaatcatgttccgtgaacgtttttagtcaataaaaattcctcatgtactattaagattgttggatttaagtacatttatccagtttaattcaaatttacttattttgtgattgtccatgtactaaatcatgtttcttagactttgatatctaccaaattatacctcttaatctttgacatgtactaaatcaagccctctaaacttttatctatgttagactttccttactaaaattaaaaaaaaaaatccttaaatctaacaatctcaatagttcaggagaaatttttaacgaccttaaaagttcaagatgtaaaatcctaattagccatatatataactaaaaggtatacattattggaaaagtctacaatgcacccattaaagaagtgttttagtagactccctttctcttttaatat

SEQ ID NO: 238225 - DNA, 1024 bp, Cannabis indica
caaagggctgaatagggttatataaactctatggcgttagatattttgtaataaccggcaccgtaggggacacgcgtcagccaatgcgtgctcctatagagtcggttattacaaaataaccgatgccatatgtagtgttattaaaaatttaatactctatggcgtcagttattatgtaataactggcgccatatggtgtttttattaaaattttatttagtcgcattctatagcgtcggttttttattattaatttaaaagattcattttgtagtagtgcattcaataaaagacatagaaataattccttaccggtggagactaagtaaatttctcaccttaaaaagaaaaagttgaaatacattattaaaagaaactaaacatacacgtagcaataatataatatacataaacgtacatgtatatgaactaaaatttacataaattattaagacatttcaaaactacactacatagcacgccccatgccttgcatggacttttccattaatattatattaatatgcttataatttttttctctccacgacaactcattttttataaaagctaacaccttgtttatacatttatgtaaatgtaaattcattcacaaatctaaatctagtctcaattcctagccaaagaaaagatgatttagtcacatatatatatatatatatttatatatatatagattggatctctaacatatataatttttagcacatgcttaattaatcatataataaaaatttgaaatatgtttgatttatttaaacttggtagacaagggaacaaaagctagcattggaaaagaaaagtaaaaccaatttacccgtggaaccatagattttatttttaatctctttattacaatatattagcttcatagaatttgagggaagaagaagtggctatagactcaactttttcatacatatattttatcaatcattaccactattattactatactactataactacaagcattgaagaagttcattagaaaaaaaaaaaa

SEQ ID NO: 238226 - DNA, 1072 bp, Cannabis indica
aaaaacgtgtggttttaaaaaagtgaatttataattaatatttttaaaattatatgatcatatttaagttaaaaaaaacgtaaaaaaacatatatattttaaaaatatatatcaattatttaaattttagaattaataaatatatttggggttttcaaattttataggactgttttattcaattaataattataaacttaataaaaattaaaaaaatgagagaattaaggagaatagaaaaaaaatagttttagaataattttagagtggcacatcaccgcatcatacttctcctttatatatatatatatagatatatagatagatatatagattatgattccataattacggtaatttatcggaaattttttataggttgtttgttttagaagagacgggttaaattttaggagacacggtaactaaaaatattaattattctattaatttttaataaaaaatggtagtattcggtagtggtcaaatatgtggataaaaattaggataggcactgttttttttaattaatgtattttgaaaaagttaataatttaattatttttattttgttaaataataatttgaaatttttgttattttattttattttattatacaaaataatactttatattgattattcgtcaaaataaaacttaataataatcttacttagaggtattattactattagcagacttgttacatttttcgcatctcttttgatgctgaaattaaactggcttcagattatttgttgtattaaaaaaatgacaaaaattaagtttaatgtattattttgtactaatttaaaaaatacagagtctaatttactatttaacttaaaatgtaaacttttgcaaaataagaaatttaaaataatatttatcctaaaaattaatagggtaaatatcattttggatcctgtgttttgtaaagttattgattagaccatctaaatgacaaaatagaccttgtattttctaaaatggtaaaaatagaactctgagattaatttttgataactttttttaatataaccaacttgaagacaattcctaatacgaac

SEQ ID NO: 238227 - DNA, 833 bp, Cannabis indica
atttctctatgcttcgattgtggtggatgcaattcagagagggcgcaatgacaaagtacagagaacatttttgggaatattaaatattctattgactctatctatatttggttatgcgggattatcggtcctgtttacttaccgcctcgaagattattaagtttcctacttggttgttgccaccagttgattatgtcaaaatcagttgtgatgtcaaaattgaatgcaataccacgtgcgatgtggccatagagagagatcataagaatatgctttatgggtggctacaagtatgctcaacttctctgattatctcattggagaagttgcggcttgtatgctagccatagagactgtcatttcgcagtatcatccttttgtgttggtggaaaatgatcctgtaaaagttatcaagactctaaagggtaccgccaactgttggggattgataactatgtgtgtccttgtaaacatctctctacttttatgttaagttatatattttttttatttttagaacttgtaatttcacgattcataatgtggtcaagtgagcttttgccaacaatattatcggtatgatagagttattttctataacagattctatcttttgtaaggaccataagatttaattttgatatttatttataaaacgctttatttttaataaaaaaataagagataaataaaaaaaagttagttagagtataaatttaaattatagtattttaaaaaagaacaagaatatttaatataatatagatattttcagaaaaacaaattttaattataggaatattctaataatgtattccattggtctcaaactc

SEQ ID NO: 238228 - DNA, 942 bp, Cannabis indica
gaaatgatccatttatgttgttgcttccaatatctaaaagttccaagtctttacagttgaccaatgattttggcaatgacccttccaattgattttcattaacattcaaaactcttagtctgtttcccttggcaaaagctggaggaatgattccatcaaacttattcttcctcaaatctaacacttcgagagaggttgaatttcctagacagggaggaatattcccactcaaattgttattggacaaatcaaggccttcaagcgaagtgagatggcaaatggatggtgatatttccccaacaaatgaattgtttgagattgaaataaacactgtggaaggtggtaggactggaagatgaccttgaagtcggttgaaggcgagattaatgtattgtagagtcttccatggaatctgatctatttgtgtcaaagagttgtgagaaatatctaggaataccaatgaatccttacccacattccataaccattggggaacactgccttcaatttgattgttggagagatccaagaattcaaattttgcaagcttcttaggaagtaggggaactcacttataccacatgaagacaaatacaatgtagaaagagtattgggaaaagtatcattattataattattagatacacatgaaaaactattattagaaagattaagatatttgagctttttcagttttaaaaattggtctaattgcacgacaccactcatattatttgagaaaagatacaaaccagaaagattgacttgctgaaaaattgacgttggaaagaagccttggaagttattatcatataaatgaagagacattaaggaattgtgttggaattcctgaatgctaccactgaatttattccaacctagatctaaatattgtaaagatggaagggaatatatccaagaaggtatgtcccattaagctcg

SEQ ID NO: 238229 - DNA, 1442 bp, Cannabis indica
aatagctaaaattttctaaaattttaaattttgaattttaaaattttacctaattaagtaaaaaatacgttgcctaattaaaaatattaagaaaatttaaaaatacgtttatatataattatatctaaatgatacactaatggaacaatagctaaatttttttcttaaagatctaaatctcaaatcttatttaaaaattttaaaaaatatataacctaataaaaaaattaaacatacatgtattccacttaaattaccaaattgaatctaattataaaaactaattatacgtgcattgcacgtaacatcaacctactggctactatatatactataaatacaatatacaactataatgtaaaaaataagaccataacaattcatttgcaaaaaaatacatgacactaatacattgttttttataagtggaatgcacaaaaagaaatatatatgtttacttggttcttttttaaaagaaaaatgctaaagctaggtactttaaggtaccaaatattataagatgtgacatatatatcatttctacattttaatattagatctcacatattttaatttaataaatgatataaaaaattgctaatcaattataaaatgccacattaatataatattagacatcttaaaatacaaataacaatactctttttgaaaaacaggttcgcaactgctttaaaacaaagtacacaaacgttaaattttgtttggcagattaattacattaatgaaacgtgatactcaagcaatattaattgttcaaacaatatgtgtgagctagatttgtagggaaagtacgcactacaattaaccaataactactaatgtcctaatgttgattccatccaagttaatacatgctcgtgctaattcatttatactatatatataatataattttattgtgtgtgatacagaattatacataagccctaaactaaataagctctgttgtcatatattagccatgtcatatcaagttttagcctcatcacaaaatgacaaagtatcaaaaattgttcgtccaacaacaacttatcaaccttctatttggggggagagatttctccaatatagtatttcagaccaagactttgtaagatcatttctttgtgatcagttatttatttgaaaatttcaattagtaataccattattaattatattgcatattaaaaatatattatgatattttattttatcataagaagttgtgttttcttaataaaaaaaagtgttttgttttccatataaatatgttgaaatgtcaaacttatatatatatagagatgtgattttgtcctattattgtactttcacggattgtaatccgtgatgtacgtcatccatcagatgagggtgttatttgatctcacggctgagattgatcaaggggtaattagggttaaaaaatagaaacgtaccct

SEQ ID NO: 238230 - DNA, 706 bp, Cannabis indica
atagaacactagaggaacgttgataatcaacgtgctgtaaaagagcagcaaagagaaaatcttgcttaacgaatctaaaaagcctatagatctgacaataaaacaactactctgagagttacttcgactagagctagaaacaaccctcatgtgccaactgaccatgtggaaacaagtgctcaaggggaaacccttaatgcgtgaggtacttctaccattcttggtagtcgtacttctaaatgtgtagtagacattaaggatccccaaagggatgcaaactacgagtgagcatctgaaaggacttagactcgggagcacattccaatgtgccatctacctgatgtggaacagtcacttattaaggaaacggtctatcagcgagcgtccaaaaggactcaaactcaaaaacgtagtgttggaattttatgtcctaaataaaacccatttcaatataatgttatttgttatcaataaaagagtagaattcatttatgtttacatgtatttttcatgcttatggtttaatatacaatttctgttaaatccagaacatattctaactcacaattacagtgatgtcaacacaatggaaggtaatgtgattatatgtttacaaaagattatgtcccatgattcatcagtgcactagatttacactgatgtgatagttagcgataaagttacttacacattggataagtgtatg

SEQ ID NO: 238231 - DNA, 720 bp, Cannabis indica
atttggttacatcggatctaagaaccaaaaggagaatcatttggagggggttgagggagtataccttcaagaaatggtgttttgttgcaggctccaattgagatcttgaagtcgcgtcgccatggttggaaatttcgatctgtgaggattggagtggcaagaactaagcctagatgatcagcattactcaggtaataggggcttcgaatgtcctcgtatgcagggcgatcggtctgagtttactgaactgctggtggagctggtgacggagctcgagtattgttgtcagtgaaagtttgagatgggaggtgatcaatcggagcaggggcatcgaccacaagatcgatggtggtagctgaattcattgctcgtttcctcaccattgatgaaagcttgaagacttattgagtttcttctgataccgtattagaagagagaagatgaaaattggttttatattctatgtaatgatacttgaattgatacagaaagaagccttatataagcagagtaggaaccgacttatatgaacaaaggactaactaacataacagaattataacaaccttaactaactcaatagttacacttagatttttgtaacccgatctttatgttaggttgaataaaatgtacctgttgaccgagattttcgtcaactattaaaatataattataatattgagctgcaagaaagtgagatgaggatttttacgtggt

SEQ ID NO: 238232 - DNA, 850 bp, Cannabis indica
cgtgactcggatcttggcccagacttagacctagcctaggacctggtctccgaacctcggatcttgcctcggctatagatcctgacacagatccgacttaaataaaaacaaaaaataaaaatgaaaatgaaatttagagaacacaattttattttttgaaaaaataaaataaaaaacaaatttctcttttcacttttgtgatttaaaagttaaaaataaaattttttacaaaacgccaccttagttttaagataatttgtgtcattttagaaatttgacaaaatggtgttaaacttaaaatgtttaagaagcccaaactctattgagctataaacaaagctcagcccaggtcttcagtccagtttatcgaaagtcatcatttcagcccatcacaacattacatttaagcaaagcccaatagcttgatatcttgagtatctaccaacagtttttggcccgaaccaatacacagtaacaacctcatgggctgtcatctcatttcaggccctgcctaattgcctcatttatatcttttcacgaacaaagtagtctagagatgtaaatgtacacacactatggagtgactttatcagtttcattcttcatttaccaataccactccccaaacctcaatacagcaacatctcaatttttctttttacaacttaattagcaaatatcactaacaatgctacaagtaatatacccacaatatgaaatatcaatttaaacagttgatattatattaatttcttagaaaattacaactaataagcagaattaaatcaactaagttgaattatgaaaagattagtaataacaagattaacaaatcatgaactaggaatca

SEQ ID NO: 238233 - DNA, 587 bp, Cannabis indica
aaaaatgattgaactttttcaaaatttgtaataaaaagtaccttagaatcaacaaaaagttcatcaaatggcttcaaaaatctaaccaaagccccagtgactaatgattcaccacgtgggacaagcttggcgtctgtagtatgagcaaagtcatagtctgcacgcaatttgtcggcaacaaccatgaaattatcaaactcctcaccggaaaatttggggaacactcaaacctgcaaatgcaaagacaattagtcaaattccatgccatgtaatgatgatgaggcaaaaagataagggtataacataagcagcgagcacttacaatgactatcttcttgtcttcaatgataccactggaatcttcaacagtcttaatttcagcagaagcggggccactctgtttcttcaaatattcaacaataccaaccttcacgtggtcccttgtattccttaacattcttaccaccattcctaaaattcttaagtgtggggaaacccttgatgtcatgttctgaaatttaatgaaaaaatagactgctttaccaattaagttaaaatcaacacatagattagtaggcttctagttc

SEQ ID NO: 238234 - DNA, 1324 bp, Cannabis indica
gtatgcatcagtttccaaatcttctcattgacaccactaaatatctgctttttatcccttaatgtgcatgctggcagaccaagaagtttcatgacattcacttattgacatagaaagttgttaaatatttaaattaaaaattaattattttaagaaaatggttaattatagttaatttaatttttaaaaaaaatgaatttttatattttggtaacatattattacaagtcaacaagaatgtaactgtcatagattcatagttacaataaaaatataatcattgaataatcactcatataaatatgataaattttataatttatttactaaacgaacaaatttgaaattgcagtaagagaaaaaaaaaactaatgatagtgcaatctagataaataaataaataatgtgaagaaaacgaaaaaggttaaatagggttatattgggaaatttaataattaaatatggataattttgactttttaaaatatttattaaaagggaaaccaaattctaaaagctaaaacttccttaaacctagcttttccatacagcttatttaaaaagttgattttagcttacccaaaatccaaaaccaaacaagcccttaataatttttaagtaaataacaattctaggtttttattatcattattattttttcactatatattggtatctgtaattcattggattttctagtcatttaatatatttttcagttgaggaactttctttgttcattgttctttgttgttggttggtattggtatttgataggtcaataatttatggctgaagaaagagttacaacaacatccatggtggaagacttcgataatgaagacagaatttcgaaactacctgatacactcattctacatatactgtcatttcttcctactactgatgtcattaaaatttgttctctttcaaaggattggaaatacatgtgggattttgcagtggcagaagtagaaaataaactttgggagggaataatgtaaaagaattaatttcgggtggtataatcgttattttttactatttttatgtttatataaagaccatcataatcacatgtatgatttaatcataactagttttgaagtaaacctaaatacatattcttgaataaaatcatctacacaatatatttgaatcggttgaactttttcactagggttaagttagattgtcattactcttagctttccatccttcaaatcattatcattgactattggtttaagcttatgttcttgaaaaattatatatgtggctaatatagtgaagggtaatttttttttgatgggaattatatggt

SEQ ID NO: 238235 - DNA, 2628 bp, Cannabis indica
ttttaatttatactaaaatattatttattgaatgtccataattacatatacttttacataaaaatattacataaaatataatttaatataatactatactatacaatacggctgcataccaaacaaactcattattatatatttattgtgtttttactaaaaagatttgacactaaatatgttttagtcctaacaataagtactattaccattaaaaacgaaatttaggacaacttgtatcttattaatatttttctagtataaactagttcttattgtgactaaaaatgatctaataacaaaagttatgttctgattaaaataagaaacatatatataaatccatcataacatggcttattgaaaacgttaaaaaagtaacgtatactgattagatttagatgatcatatatataattatatatatattggaattagtagtagagtacctgtgagaatgagtaagcaatcagaaggaaatctcatcttttcaacaagaaaatacttcatgtaactaacatcgttaacacttcctttacaatgttgcttctgaccaagataactcacaccacaaagcacagctctcctcctcccaaatgaagaagcagaacccaagccaggtctcgggctcggcctcggaggagccaccgccatcggggctggtggcatctgaggattataataaccgctatatcctcctaaagctgtattcacggttatcatgttggttacaacgtttctaaacttagctgcggcgttgtggagatagtcctgcccaccaccactaccatagttgttgttgttgttgggtcgaatttgggtgatggattggcagattgggcacttaaagtttggtgcttcgagtggaactagaagttgtgtcccacatcgacatcggacacatctttctcttctaccagccatatatttttgctagatttagggtttcagaaaacaaaaaaaaattgatgttttaaaatggggttgaacatatatatataatactatgtttggataaataataataataagtattgcattaattattaagactaaattttttaatactgttgtatgttgtattatttaatacataataaatgatttgttaattttataaaggtttgttttgtatatttttgaatgataatttatgaaattattttgatttatattaaaatattttatataagtcgagactaaatatagtattatatatgtaaaaatatatagtatgtaatacaagttaaaataatattatataatataatataatgtaatacaatgcaccaaacacacttatatataattcattatctgatgcatttttattggctgataatcactacgaaaaaacacttacttttagtgataattttttaatcacaacataaattttttgtgaattaatgtgacttttagtcacaacaaaaaattatctttgactaaaacatagcatttaaatacaaattttcactaatttagttttagtcacagcaaatattatgactaaatatacatttattcacaacaaattgtaatttttgtgacaaatacctttagtcactgactatttagtcacaatataagaataataatttataattagttacaacatttttgtacttttagtcactatgactaaaagtaaatttttttgtaatgaatctatataaagtctaaaagtatatatatacactataaaataatgatttgtgtagtaaaaatatgcatctaaatattatatgtgtgataacattattttttttttcttttaatttaaatagtgaatcatttactaaattaaatatcataattatttgaaaaattggtttcatatataatttcttttatacaataattaaaatcactaaaaatatgcttaattaaatcaaatatcacaaacaaaagactgtactatcatttgacaaactattccgaaaaaatttaggcaatataagtatagaacagcaactaatacacctgtcgcaatgttaagtgttaaaattggtgtcatattttaagaaaaatgacgttaaatgtgatcttaaatgtgtttaatatcataaaagttggcaaatttattacggggtcatatcaattttattttattaaataatatattgaaaaaaaaaatgctaaaaggcaccagtagtactaatcatcctcttacgtgttaatataataacttttcgagagtatcattaactaattttaagggtgctagccactattggtgcccaataacaatgcttaacaaaaaaaaataggacgccaacttttgtgatgttttcgtgcacttatcattataattaataatgaacaaattattttttttcaaagataagtatattggtggcaataattttatcgatgatatgactacacactttctatatatagctattagtttgtcggtcaagtgctttcttttcactagtataatatacatatctttacacatatattccaatgcttgttgatgcacaataatctcttgctggatttaaaggaataagagcaccagattcgttttactaatattgtcattgcatatatttttcttttatcttttttgactttggcatatgtttatataatatgtatatgtatatataaatagaagga

SEQ ID NO: 238236 - DNA, 880 bp, Cannabis indica
cataatttaaatgacagaaacagacttcaatttcgttgttgcatattttggcaagcttttacattgggaaatcctttcgagataaaaggtattttggggtttggtttatggtaaattttcttctgacattagtattgtggaagataataggtatcattcccataagggaaaccaaatattttcctttaatattgtagggtgcactaggaaagctacgatagaattggatttgggagtaattagaggtaactacacaatttaacacttttttctaaccatgtaattacaactgtgtaattagaggtaattgagggattccgattttgcaccccccacccatgaaaattgagtgtaattacactgtgtaattactaaacattttcccaaacaagaaatttaggaacttatatgtaacacagtgacttccaaacacgctttgaatgtctaatttctaggagtaattacttagggttgaccaaggttggctattttatagctaatacaattaaaattcatcgtaacaaaaatcatcatagataacaaactcatcctttctacatggtatcacagccaagttaaaactcttggacctgtgggttatggggccacccaccatgcttccgctgtagtaatttcaatatctaaaacattgatttagaaatatagccaatttcaatgtgaaatcagtcaatttggaaaacatacacgcattgttttctgctcacttccctataaatcacctcatccatttacactcactcatagtgacatatgggatccatcgtgagttccaaatatttctaactcaatggttcattacattcactgatcatcatacacgtttaagttgggtacttctttttatagataagtcatatgt

SEQ ID NO: 238237 - DNA, 1493 bp, Cannabis indica
tagtaaaaaaaataaaaaaagaaaataaaataataccaaaaagaaatagacaagtaaatgagatgatacattttaattattaatgaaaagtaaaaatggtataattgtataattgtaatcatacttaaatatactttaaaaagttacacatttcactcatttataaagagagtgtaaaagagagttcaatataaagtgtccttagcattcctcttgagtacaatatctacaaaatatctttaagaaaaaaatattctttcttatttttattgtttaaatgggacaaaggaatcctatgcaattgggaattgtaaaataatttaatgacaatttacaatggtaaataatttgcaacaccacaaaaaaattattatataaaaaatagagattgtatattattttattaaataaagcaactaaatatattaattttcttagtttaattattggttaggttattgattataagttaatttcctacaatgttctagctatagctaggaagctatatgattatatgatgcatattttaatgtctcgggagggatcataaaggagcattgctattaggcactagtggtgcctagcaccttctcgacatattgtattgcgattggctaacgatactccctaaaagttattatattaaattatatgagacccgatacttagttagaccaatagcgatattgacacataagagggtgctaggcaccactggtgccctttagcatttctcgatcataaagtgtgtacataccaaatcgactatgccttaattatatgagcttaattaacatatttataatggccttttacgaacgactttaattcaattttacggtggacggtggacggtggaaggttcccattttatttctagctacttggctgattttcacatgccctaattgctagttactgcatgcagtttcttaacgtaccgaagtggcttataaataaaagttaattaaattacacctgatcaataaacaatattttttttgatgaatcagctttaatttcattactccaataaaccatatttacaatcaaagagcatcccgattaaagggacctcatctaggaaacacctgatttgtacatttgtatatctattttccaaacacttgctattacatctataaatttctaaaccactccaagtcttttgtctcaacctgtttcggccatgtgctatatattctatgctttaccatttctttgactgtacaacttactctatttacatcctcatctttcccattccatatcttatcattcctagctctccatataaggtacactaggcttgccactacagccgaaagggtgttcttcttgaacttgctgtatttgcttctttcaatccatctcaagagtcttgataaggattgggtagaaacgttccatcccaaccaatccttaatcatctgcaagcaatgttgtgagaacgaacaagagaaaaaaagatgatcacatgtttcttcctg

SEQ ID NO: 238238 - DNA, 854 bp, Cannabis indica
tcagtcaactgtggaagctataaacaactcatttagccttcctacacttagagaggatcaagatgaaaagaaggatcgcactaaatagggagatcctcactgatgacgccattgcacaagagttggggcaagagggaactcttaggttgaaggaaacacaaaccaaaagttcctctactggccgcaacttaactcgaaagccagagcctggacatattttgttaacgccagaataatgccgacgtcacatacttcatcattagactacgagcgttgtgtcatagtttatgctgtcatggccagaatgacattcgacattggctgggttatcttgagaaacatcaaccatttctctgagatcaagacaacagcaggtctagtacacagtgccttaattatcgcattatgctcgcaacagggtgtgcctatgattgaaggagacatcttaaaagcacccatgcagaccatcttacgccggatctactatgactttccccttgcatcattagagcctccagaagacgcaagaaaatgccaaaagggtgatgccgatgtcgaggaggaggacccagcaggtgctggtaccagtgaatcagtgccgcctattccccagcctgagccaccactagactcccgcacacaggacacttacgatagactggatcacctcatcaggcaaaatcattatcttgttcagtctaactagtaccttgtccaggcccaccaggcccaagctgcttattacaactcatatctttagcagcaacatgattttgctcaaaggcaagtccaagagttgaattctgccttctcattgtggacaatggaccccgatgctctagccatttctcgca

SEQ ID NO: 238239 - DNA, 796 bp, Cannabis indica
ccaagcgaacaccagtggaacacgctattaggattaggggaacctggtaggcctgctcggccatccacccctacagagggaaaggaaaattcgcctggtggagcaagaagactcttcagatgatgatgtcccacctataattgttcgggaaaatgcccatgctcgcgtccagggtattttggcttgcatttacttctcttgtattatgcttttcacatatattatatcttcttctaactgcattattttatctgtgcagaattgtctcaaaagatgctccaggccttaaagaagagagtgggagacagtttgggcctatcccctctggccaagaagtctaaaggtagtgagactccgtccaaggagaaggagccaattgatgaggtcattgaccttttcgaggagcaacttgttgtggaccttccagttcagaaggtcttaaaatccaagagttccggaggagggagctcagacaggtctgaacaagctaggaccctttcaacaactgtggcactgagcacggaggccaagaagggtaaagacaaattccagtactatctgaaccgatcacttcctgaggtgagtgaccaactgtctggaacggacaatgagctatccttggagcttgtcttaggaggggtcttgaaggaagctactagggtaattatctcatctttttatctcattctcttatgtatagctcagactttaacattttttcgtacaggtcaatgtgaagatggcttatgcctattcctgagccaaattagttgctgccaagaaccttgccaccacc

SEQ ID NO: 238240 - DNA, 1201 bp, Cannabis indica
cctccataagctttaggcaagcagactttatcccaagaagcaacatggactttgcttctattgccatttacaccccaaaggaaccctctacaaagcctctcaatttccttggtaacactctgaggtaaaacaaaaatgctcatccagtagtttcgaaggccaatcaacacagagtgaataagttgaatttttccagcaaaagaaagatgcttacttgcccaattatgaagtctctgagtgatcttcttgatgattatgctacaatcttcggctttccacttagttggacgcaaaggaatcccaaggtatttcattgggaactttccttcagcaagctttaattcatcaatgatgctttgtttgatcaacgggctgactccaccaagaaaaatctgagacttatcatgattgatgtgtaaccccgaagccttactaaactcctcaagaacagaccttaaagctgcaatagactgttgagaacccttgctaaagatgatgagatcatccgcaaagcaaagattgataagcctaagctttttgcaaagaggatgaaatctataattagagttattagcagccaattgaagcaatcgagtcaaatattccattacaaggacaaagagtaaaggagaaagaggatcaccttgacgtagccctttttcacctttaaactttccttgaattcttccattcatgattatggagtaagaagtcgaggtaatgcaagtcatcagccatttaataaatctctgaggcaaattgaacgctgccagcaagcattcaagaaattcccagttcaccgtatcataagccttgctaatatcaatcttaatagcacaccgaggagagatgtttttcctgttatagttctttaaaagatcctgcagaatcatcacattatgagcaatcgatctaccttgaacaaaggcaccttgattctgattagtaatcgaggggagaactttagccaatctagaacagagaagttttgacacacatttgtacaaagtagagcagcaagctattgggcgaaagtcaactgccttggttgggttatcattcttcggaattaaagaaatcatggatgagtgaagctcggctggcatgtaacctgtaataaagaaatcagagatagccttgcaaacttccttcccaatatcagcccacatcaccttgaaaaaaccagaattgaacccatccg

SEQ ID NO: 238241 - DNA, 612 bp, Cannabis indica
attaaaatatttgtattatgctaaaaaatattttatgccactattaaacatagcaaaataaaaaataaatatcatctgaagaataatattataccatacaacaaaacagaaatacattgtacaataaaatctatataccaactacccacaacaattcataaaaagttaaaaaaatcgacattccctttcaaataaaaaagattttaacaaaactaatatagatataccataatctttaatacaaaatatgaaaaaaaattattgatatttttttatcacaaaaaataatataaataataaatagtctaaaaagggacatttctttacaaattttgaatgatgatatgatgaggaaattagactttataccattcttatattgtcctcttttatttttactctattttttaaagtttattatttttacctcttttttaaacagtttactaattttgccatgtcacttcaatatacttttcatgtgattccctcatgtcagagtatttgtacaatacaaataaaaatagatatgtttcaattaaactagcaaaaagtacgtgcgaggcacgtatactaaattttatgttagttttttttctatattatttaaaa

SEQ ID NO: 238242 - DNA, 3284 bp, Cannabis indica
ctgaatggatagtaatcacggatgcttcttggtctaaaggtgaggcaggtctggcagcagttgggataaatagcagtacaggggtatggggacttcaaaaaataaaatttcatgaagacgaactctgctcttgaggcagaaatcaacgcgatctccatggcattggagtggattttccaggagaaaggaaaggtgataacgatagcttcggactgtcaaatcgcaatccaagctctggcaagcaaccattgtctcaaagattagaaactactgcacaagtctttggaaattttagattatagaagcaaatttaatagttgtaagtttatttatattaaccgtaatcaaatccaatttgtggatgctttagccagaggtgttagagcctctaaacaatctaatgttgtgattcaaggggagggtgatccccctgtgatcaccaattttctctttacttaatgaactatagttcttttcaaaaaaaaaaaagaagtagagatcaattagttttagttctgatgaataatcgaagtgtatcacattacaaaatatataaaaaaaaattaatttggtggacgattttatttaaatttatttttttgctaagaatttatatacatatagtattaaatattatttagaatttatatctaacactaaattagtatttagtgtagatgattaaactaagttatctatacttttaggggtgacaattcaggtcatgacctgcagatttgatacaaatatgacttgagatttaatgggctcgatacaaaataaaaattatttggattgtatttgtattttataaattttttgtgtcatggatcgtatttgtgtcagctatctaaaataaatttaagaactctatacgacaaaaatacaaaatgatgacactaaaaataacaatttagtttataatccgccaacatgacacgagattttgtgagttcgacatgacacaaaatttatttgagtcgtgtttgtgtccgtgtccgtgttttacaaattttttgtgtcacgggtcgtgttcgaactgaacaagacccaaacacaacacgtcaacacaaattgccaccataacatactctaactagtttatatatatatatatttatatataatgataagtggcaaacgacacccgtggttcactaccgaaaagattaattattgagccccacatgtttcagtttgagaaatcttaagaagcactcccatcaatttctctactctatgctttataatctaaggggcagctcaccaattagcagcttgagctgcctcaaactctttgttatagtttttttttctactgggggctggaattcattgtttcctgcatagactttatgatttgactaatttaatatttataaattttatttttgataataaaaaattctaatttttattattgaacatagagttataattcatttattcatcctcaatattctaaagcaaattaatatatattattattacatattaatattactttttcttttttgagaataaatgaataatttcatttagatatgtaatttttcatgatatccatatattagttaagaaaaatgctaagaggtactttaaggtgctaaacaccacaaaaagtaacatatcataatgggtgcacttcaatattgcgttctacacattattatttgataaacaatatgagaaaccactaactaaatatataatgtcacgtagatatggtattgggcaccttaaggtgccaaataataatactcactaattaattataaaaatttattagcagaaaagaaaaaaaaaacttctttaactagcacattcatacaagtgttcacattagtagttatgcaaacataatagtttaaaagtacgtttaaatttgtatcaagatcaagaatacagacatcattcatgacaaaaatttagttaaggatcaaaagataccaagaaagccactaaaatttggcaaaactaaaaatcaaccaattaactcagcaatagtaatgttgtgtgccttctttttaactaaatttacctatttccatcttcttgatcactttatgtccatggtatataaaagaatctagaatacccgaaacagtgaaaacacctccaactatagcacaaacattagtgaggaagtgtaagaatgatatatactcctcagcaaaagttaccttaattggagaaagatcataaaagaaaaatacaccaggaagaaactgaatgttgccatattctgaagtcctaatatgctcagttactgaaaactgattagattgaataacttgtccagacacatgtgtataaacagtaggtaccaccttgataaaatactgatacatcccattaggactaggtgttataaattcatgtgtccattccacaccatcaagaggattcaccacaccaggaaaatattccccaaaactcaatctattgattttgtgacttatattaaaactatctttctgaaatgagagaagatcatgcacatgaatgtttgattgttgaaaacttttcccaggtgcaaaatgaaaatttccagcaaccttattaacttctaagaatccatatacattacaaccctcaccttcttcatctttgattttttgtaagaaaccttctcttttgcactgatcaatcatatcaggatttgacaatgcccaacctttcttcctatacgcttcccggacttgttcacaagtattacaacaattttcatcattaacattatttgatgttgcttttgcaccataacaagatccacaatatgtctcattactattattatgactgccaccatgtttctgcaatggcttgtcaatctttgatgcaccaattccatcttgttttgttatttctattacattaccacgggaatctagcctctttttgattacatcatgttttatatccaaatgttgctctccacttatgtccatggcatcaagactaagtatgaaacaaggaaaggcagggaaggtcacatcaaactgcagtttcagacattaaaaaaaaaagagtaaagatccattagttttagtttcggtggataattgaagttatcataatacaaaatatataaaattcctaaacttagagggtgggcgatttttgtaagaggattgctaattataacctcctattataacctttaagtcaacctccacgttcgaaatcatatgtcagaatattttttttcaaattttttcatagtgatatttgttataattacagtatcattcccgtaaatttaaattaatatgcatacattt

SEQ ID NO: 238243 - DNA, 1286 bp, Cannabis indica
cccagctccattcggacaactctaagttccacccgagcatcatcagcatccttcctgcccaagtccacctccgccctcatggtgttggacatggcagcattcttggaggcagcagacttagctcgggagtaggtgtaagccaacttcagaccagcctacacagacgaaaaactttagaatctgagccaagtaaagaaggattaaagaaaattcaagaaagactcaccttggtaaatgccctcaagacttctcccatctgcagctccaaggaagattcggtgtcagcgccagccagcagatcactcacctcaggaaccaactggttcatgtaatgagtgagcatctccttgcctctcttggcctccgggagcattgacgaaggtggggtatgagcctacatctgctcagagccactcttggccagctcggatcctccctttgactgatcagggctgtttgagcttcctcctcgagaatctttggacatagtagatttcggaacagaagggtccccaacatttagctcctcggaaatatcaatcacctccccggccgatgccttttccttggatggggttgcctcaccgcccctagatttcttggccagaggagatgagcttgagcttcctccaactctcttcttcaacgcatcgagcatattctaagacatgtctgcacagaataaaagcaacattgttagaataataaaggcatcagaagcataaagcatcgtaatcaagaagtttacaaaacaagacggagtatcctgcgaagcgtttgacggagcaagactcgagagttcatcatcacctgacaagtctcttgcctccaccagggtggccttcccttttcctagcacgggagaaggtggtcgagcaggtgaactgggttccctaattcgaatagaatgttcaacgggcctgggttgggccagaagtttcttcctccttttgagcggagtcacctgctcttcctcggccttatcttctggattcaaaggctcatgagcatattgtttggcccttacacctcccttcaacttagcttcacgcttgagttgaatgaattcattctccttatgagctccctcagcccggccagcaacggatttccgctttctctccttcaccggcttaggaatgaaatcctttgggtaaagctcgtattccacaaagttgtcctcagaggtcaacaaaatgatatttcgagcatcccccagcagcaagacaagcttctgagctctattccggagagtcagtgtgaaaggacggcggtgatatgtgggg

SEQ ID NO: 238244 - DNA, 1149 bp, Cannabis indica
tttttcaattttcggtttcgtcgttttggttccaacagtgtttggtaggtcgatttaaacagtttttttcagttttctagattttattatgctcactcctaataaaaggtataattgttgtccacaccttatagatatatttttgtaaataaagtgtcaatttatattttctatgtaataattccatatatttactatatattctcttatttctgtatatatctttattttaaattggtcaatatttattacatatttttagcaattagttagctaatttatagcacaacattactcttgtatattgtatttataaccatgattgataatgagaaaagacacggaatcgatttccttcatggtatcagagcaaaaagttttacaagccttattacattcaataaatttattattacaaagagaattgataatattatcgccaggatgacctaaacgattgtgccatatatcatgagacatagtagtaaaacctgaatgtgtgggtgatgtggcttgagaatttgagaagagaggatataagtccccaacactgtcacatctcattagtctggtccccgtctgtaaataattgattgaaaaaccaaaagggtcaaaagaaatagaaaccatattgtcagtggtaaatttacgaacagagatcatatttttaatgagtttgggagcatgtaacacactttgaagaacgaaaggaggataagattgggataaattagtgctctatcgtgaccaacaactggaattaaatgaccactaccaacaacaatgttatgatttttattgcttgaattgaaataagacgagagaatacctgcatccgccgtcatgtgagatgtggcaccgtgccattgcctgttttggattcatgtgcagaacaatgaaagacatagacaaccaaaaacacgtaaatccaagtaagaagggtcactttgataaaggatttgtatgggtgaaaaataatctaagacctttgaaggaagaatatttagaagatatgtcgccatagatagagcatgatgccaaaaggacggtggcattgaagcatgagctagaatggtccgaatgatattattgatagatcttatgtgtctttcagctttaccaattcgggacgatgtgtgtggacaagaa

SEQ ID NO: 238245 - DNA, 1182 bp, Cannabis indica
tataaaaacacagtatttttgtaaatttctcttaaattttgggaccctaaaaaatatataaaaaaaatatcaaaaaaagaatattatgggttttttatttttttattttgggcccccggaaagtgtgggcactaggcacgggcctagctcgcctatgcatagggccggccctatatatatatatgaatattaggatgttgtgatctacaacaatgaagtttttcataggattttaagcataatttttttgcctcaacaactaattaaaatctttagctatatatcttttacataaatagatatagctatagatggctctaattatatatatatatatatatatatatatatataatatattggtgttgcatggagaaacgatcaagacccttataattgcttaattagtgtatcgtctcttctgcctttgatttaatttgtctcacaatcatcaagcatcaaagtaatgtccacatacatattttaaaatatataatacataataattataatatacaatataactcgaatgtggcagacaaaattagggtttctccctaaattatatatatagtataatgtattatatatattattgatagagctatataattatactattatactagctagtgcataaatacttaagttcccatagctcatgattatatatatatacatatagatatattatatggtaatatatatgatatgccaagtgacgtacattaccacttcttgtttttgcttgatttgtcattttaggatccgcttattattataattacaataattttcaactgattacgtataattttcttttaaattataattaggtcaaacatgattaagactctgcttaattatatatatatataggtctaatctaatcctaattatgaaaaagaaattagaaagaaagaaagaaaaatagaagtgggaagagaatccaatatatcctagaattgtacaaaagcgccaatggttttctaatttaattttcctaataagtatatgagcaattttaatttgttcacttttcaaagtgttaattttttttccttattttttgttcggtatttatggatttgataatagtgtgtttgaaaccctaattaagaaaaaaaaaacttttaagtttgacttataagattcatttaatttataaactatatataagta

SEQ ID NO: 238246 - DNA, 864 bp, Cannabis indica
cattaccgcgagaagcagcacctgaggatctagagccaatgtcctcagtggtaagaaactggctcacagcagcagcaagggactgatccacattctcctgctgagcaggaagttcatccagtggaaatgagtttgaaagatcaaacgggttccttttgaaagtcgatttggcaggagctttaagaggtattttataaggaagatcaggtggaaatgcacgatcatcacacttttgaaggtaagtaatacactttgtaagtgtgtgatcaaacatgccacagtaataacagatatttggcaagttctcatatttgaaagtgagccacttctcacggtggatactcttgaaatcaaccatgattccacgagtgatgggtttagagatatcaatgaaaacacggactctaagaaagagttgagaaactttgaagatagtaagcttgtcaacctccaggaaatcccccacctcatccccaatcaacttagcaagttttagagatttctgaccaaaaggaatagaaggacttgtatccaaaaaggggaatatctgagctggttatgcagaagagtatccagaccagcagggtttgcaagtgaccaaacagtggtcaaaatgccatggctgaccctcaagcactctttgcatatctccttcacaatggaactccaccatgaacatacccgaaccatattcagagaaagttaaagggccccgagtaatccaggcgttcctcatagcaatttcgaaccactcaggtttgatggttctaggggaaaggattctaaacacaagacaaaaggttctgctagtttggctaacccccccagtatcgtcctcaaggtcatgaacaacagcttcacgat

SEQ ID NO: 238247 - DNA, 1242 bp, Cannabis indica
ttttgtatgctactgtatattgtggaaaacaattcatttaatagtatattagtttaagtttgtaatatatgtatattggtttaaggtatattgtttgtatatcatacgatatattaattaaaaactaattgtatgcttaaataacatattagacagcaacaacaagagcaaaatctaaatgaataaaatatataataccttttatataataaaaaaatagttgacaaaaattcagtagagagattttgatcaaattttttataatttctattaaaggaataaaatatataatactttttatataataaaagatattttaagtattaaaaagtaaaaaatgacatttactttattatttaaaaaaatggacattaaagttaaaaatttaccatttacttccatttctctttcacaaatagaggctgctcattccttgtaagcccaagcccaacttaataagaattctcctcgtagtcgtacccaaacctaaagacacacacacacacgtattctctcattcaaaaagtgtctcactgttcgatatttctctctccggtggtccttctcctcggcggcgccagcctgctatctctcttctttcctcctttcccgtccgtcttcatctctctccggtctctatcttccacggcgaccgctgcaacctaaacggaacgattgctattttcacactcacaaggtatagataccatctgtttggaaagaaaattatttgaatgctttactcaaaataaaagtggaatgacatctgttgaaacggattaaactatgaaaaaaaatatttgtagagtctttaatgtgagaagttttgcgccttgtagactgaggcatatatttttccataggaaattttctctcaaggttgaatatgagaacagaatgaaaataaattgtgaggttgaataaattatatgaaggaaggactgtatattggagttggtgatgaactgtatattgtactatatcagtatttgttttgctgcttttctgtcctgtttaacaaaaagagacatggttaactaaatattaagtcagtgtttattattttttaagagacatgttagtatttttttgtttttcgttctgggcattaggtggaatatgcatggttgatacattctaattaggtctagttacaaactaagttagaacataaaaaagggaaatctggagtactataagagaatttcctttaacaatgcagatatatgaatctggtatgtg

SEQ ID NO: 238248 - DNA, 1391 bp, Cannabis indica
ttctttggggtcgccatttgcttcaaaaggggttggtctggaagattggcactggaactagtattcccttatctgctcctaattggattcccaacattaagcaccctattctcttgcactctcttcatcaatctcaagcttttgtctcttccttcattaatgatgactcaacttggaacacccgtaagcttaaacattacttcccttcgtaccaagttgatcgtatcctcacaacccccattgatcctctatcctcagattcgcttatttggggctatcactcctcaggtattttaacagtaaaatctgcttaccatcttgcctgcactcttcattctgttcaagttccatcctcttccaatcctaatccataccttcattggtggaaaaccctttggtccattcctgtcccttcaaagattaaacatttcatttggagagctttccatcatatattgccatgttctctcaatctctttcttaaaaggagtctccctaaccctttttgctcaatctgtgggttcgacaaggaatcagtctctcatgcccttattggttgcacaagagcaaagtctatatggaaatcttcaacatttaaacagttttacttgacttattatagaagtgacatcaaggaatttctgttacaggcttatcaagatttgcctaaacatgatttccaagtctttatcactctcatttggcaaatttggaacacacgaaactctattctgttcaacaagcatcatactactaacaatgtggaagaatttgttgttaattacttgcaggagtacaaggatgtacaacattctcaacatcatgacactcagccatcagaaatttcaagcatcattcagtcctctcatcagcattggcttccttcttgtcacctgatactcctgctctgtttgtagatgcagcccttgaccatcatgcaggactaactggtgctggttttgtttttaaaaggggatatcagactgtgttggcttctcaattccggaggctgcctggtgttgtctcgcccattttctcagaaggccaggctctgttacaaagtctcaagtggtgcatcgattcccagtatactcctcaagttgttttctcggattgcctaaacttagtctcaaaagtaaatggagattggcaggacaattctgctctttctggtttagttgcttgcattcgtttgctcttctccaacttccgtggtgcttctttgcagttccttcctcggcaatttaatgtggaagctcataattgtgctcgtgaagctctcaggtctagagaagtgagctagaggaagtccatcttcttcctctttggctgctggctgttgttgtttctttttcctcttttgcagcctcttgttctcaaaaaaaaaaaaa

SEQ ID NO: 238249 - DNA, 1662 bp, Cannabis indica
agtgactttcagaccaagggaacctatcctcgacaaagaaacagtgtactaagctgtcctctactttcaaaaggctggcctccacatccaaaggttggcctcctcttggtaaagtcataatacctgtaggatcctcgtaggcacatgaccacccaagtcctagcaggaccatggtcgaccaggattgatagcatggctggccagacctcccttgtaggtctatgagcggtggagatttacctggtaagactctatgtatagcccaaaacgtggacaacacgctacatgcaaattaggccatttaacagcccaacaactgatggaaactatctattttagagggtgagtttagtcttttgtatttaatcaatttaatatgtaaatatctaagggattcattgtaaattagggttttaggcttcctctaaaaaggccttaactctaacctagaaaacctaagtcactaagcctcccaatcactctaagttagaaaccattgtctcttctttctctctctgttacactcccaatagggcctcctctcgtcatctctctcacacgcctgtaaggcaatatagctctctcattagagatttgcctactcatttatgttttgtatccttatagagagctatattagatcccacctataacgatctaaatagtattatctctaggtatcaatacaacaagaaaggggagtaggtcattacctgctatcaaaagggggccaaacctatataaaaaatctttgtgtttatagtttttcattttgtttgtgtaacatgtggcaagcattagatttatacgaccccgctgtcagttgatcactttttgagatcaacagtttggtgctttcattgagagcgtggctaacgtatctgatcaaacaccattgttaacacaagaagaacaccagttgcaccatctacgtctttgggtctctctcgagacccacagacttcagatcccgatgttcatggtccatcgacaactggacttcccatgaacacaacaaatgtggtcaatcttgtccccatagcaggcaccacgattctagccactatagttggctaggatgatacaggcatcccgggtggatctgaacagtcagcccctatctccaatagaaggacctccacaagtgcctccaactaaatgaagaatccatggggggcatcccctaagaaacacaattgagtttcgccctaggtactatgcaagagagatgagactaagaattggcgagccccacatggacttaggagaagatctcgagttaactaaacttagagaggccgtctgccaagctggcgtaattgaagaaccatgcgttacttactgcgatgtacttgctcagtagagacgcgaattcctcaaaaaaccacgcactgctaattgtgatgtactcgctcagtagagatgcaaattcctgagattgatggatgaccaagaagaaatcctttgatctcaccatgcagagttagatcgccgcaatagagaggccagtgatctgataaggcagttccaccaaagaactaataaaagaggccagttgctcatcagagatccacttgaaggaagacttattgatagatcagggaaggtctattggcatgttgatcaacctagttccttaggaactaggacagatcttccctt

SEQ ID NO: 238250 - DNA, 1465 bp, Cannabis indica
cacataattaccaacatagtatttagcatctgatatgtttgtcttgtgattggttaataatgttttttaaaagttattacattaaattatatgtaacttaatacttagttgtaccaataacgatattacacattagtagtgttaggaactacttgtgatttttaacatatctcattacataaatgagatctatttggtaataatgtattgtagtatttttaatacaatacaatgtttatatttgatttatattaataggttgtgtaaaattatataattttttactataaatttgttcacactttgccctcgaactcgtatctggaccttcgacctggctatgaccctcgatcttgagtcttatttttggacttggatctcggatctcagatcctaaatcgtgcagcctgactttggattccgatccactttctcttacctctgttatttattctcacttaaataaaataaagaaaaaataaaaataaattatgaaaatgtttttatttttaattttaaaaataaaaaaaataaaaatagttatgaaacatatttttatttttatacatttatatgtgtgattttaaaaaatttaaaaacaaaacatattaaaaaaaaaaaagaaaaaaaaaacaaattttgattaaattttccaaaaaataagaatacgcaccttaattatattaaaagatttttattcaattttattaacgaatgattcaggaaacacgatttggtatatgtcaaaattcgaatggtatgatttggcataaattaagggtcggggtacagtttagtacatgaagaatccagtaaaattgaataaattagataatttttttttttgaatttaataatctcaataatttaaatttttttaatgacttaaaaaagttcggagacacgatttgatataaattcagcagcgtcaaatattctaagtagccctttttttcacttctcgttgtctccttctaattggtttctttccctatcccagccatcgacactgggtgttcgcggtgtgagtggtgcgggttgtagccattttttcaaactaaactacatatgcggtttttataatttctcaaactgcaaccgcaccgcgagatcttaaaactgcaaaaaccacaccgagaaaatacagtgtggtacggtgcggtttgagcagtttacactatcatagttatcaaatattataatgaaaatttaaaaatcaaactaataaagctttaataatacaaaacaaaaagttcttatttaagttttaacaccataacatgtataataatcatcaaattgttatattgaattctctaaaaaataaagtaatagacacatgtatcatatatatatatatatggaacacttcttaatgggtattacccatgaatggttactaaacaaatttaactataaatattaattttaaaaatatcaaacaatcgaattttgatctaataac

SEQ ID NO: 238251 - DNA, 819 bp, Cannabis indica
agatcacaatagagtatcgtatcaagattaaaggaaaaactttctataacaaatattagcaactaggagtaaccaagcttgtggtacttggtttgatcaacatgggacaaccaggataagtaatgactataaactagaaccgttattacgtttcctacttgccggttatctccattaatagtatattaattaaacttgttattatgggacaattcttatatatattttaaattttgtaattattgtatacaataaaataagacgtgtgataagatatcaataatatttcttatacgttgattctaaaaatatgaaatttgcatttagtgcgaaatggattggatgaacacccctattaagaatgataaagtggagataaaactctttaaaaaaatgaaataaaataaaatagaataaatttctcactagtagagtttgagaatctcttttgtttttggaacactctgtccactttcttaaaaccttctcctaaagactcaaaaatatttttgagttttaactctacttgttgttcctgaaattcattttcatcaagaactttttcttttttcttttcttttcctttcctctcttcttttcttttttctcattagcaacatatatttcttccacacgtttttctataactattgaactaagttgtaatgttccaacaatagtagtaagtgaacttatctcttttttgatagacaatatattgttctcaatacgttgtattgcttcattaagatgaaatattttatttggtccagccatcaaatcttcatcagaacacatctaaacaaaaagaaaaaacca

SEQ ID NO: 238252 - DNA, 3416 bp, Cannabis indica
caacaaaggaatggtgtttttaatgagttgggggtgttgtgtttgaggatgttatagttttattgtctaaattttcaaggttagttttgttccatgtggcttgcaataaaaattttacaacgcatggtttggcaaagcatgccatttgattagacgataagctatcctaatttaaagagataataccattataaattgttgtattattaataacgtgtgattttaatcaccacgtcaaaaaaaaagacaagggtaacaaaaaattggttaattttgcaaataaaagaaaattataatgggctgtagtagttacaaagaacatcacgtaattaatttggtagtttggttgccatttataaattaaaccagattataaggtcatctctaatggctttatttcatctcaaaaaaaaaaaaaaatcatctctgttggtaaaacttaagtttagtgttaataaatcaacaccaaataaattactattttagctactatattttttttttctaatttacaattacaataataaaaataactactaaattttatattctttattattctattatttattaatataataaaatatttaaacgaaaacatatataattatttaatttttttactaaaaagtatttaacaattaattaaaaaaataaatgtgatctatagtgcttattaaatttggtgggacacgtagataaatccatttataaatttagttatagtgtctcattgaattatatatatattgtgaaactacattatttttagtgtttcagagactgcattacaaaaaactattacttttagtgataattttttagtcacaacgtaaattttttgtgactaaatatgtcttttagtcacaacaaaaaactacttgtgactaaaatatagtatttacttaaacacaagttgtcactaatttagttttagtacaataagtattgtgactaaaaacacatttaggcacaacaaattgtaatttttgttactaatatttttagttacggactttttagtcacaacacaataataataatttataattagccacaactttttttatctttagtcacaagttttagttgtaactaaaaagtaaaaaaaaaaaaaacttgtagtgcatcaagtagtatatataattggttttaaaaaaatagtatatataatttggaggtgaagattccgaagaatatctaatatacgcactgttattaagggtcggttgtcaggtaaggtgggctaagcatccgtcttggattctaaacacttagatcatctctaatggacggtgtatattttgagttaaatttggcctaaaatataccataaaattataattggcccctttttttttggtatttgtgctccaatgcataaggtacaaattagttataaaagctaatattaccagtagggattgtaacttttcatgaatttgccaaagttgatgattccaactacttgctgtcggtcccacaggtcgtgtgacatacactaagataatcttttttctttaagagttggtgcaagaaagcctccgaacaaagtcattaatacaaagagaggaagaaacccccaaaaattcgtgttgtattgtattagtggaggcggtagaagccttaatatataacgcgatatgatatacaaaataattaattttatttatattattttaatatcttataaatatatcttatttaaagtgaatgaatattattaatagttggcaaagaggtaattaaaaaatgtagtatttattgtgggctaaaatttagcccatgcaatcttttgtgtcaaatttggcataacttttagcttgaaccaaatttgaactctcaacctcttagttattaaactaatcaaattaccattaggctacagcatacatttagcattaaaactattattatttattttattactaactatattttaattttttttctaaaatggagccctgagcggtggaggcctaagacagcctcctccttcatcttagctcagggccagccctgccattggagttaaattttagtaaaatattcaaaaaaaaaaataacaatatactacatttatagctctagagatgctcttaggattctaaaattatgaagaaaaaaattatatatgttaaataatagaaaactataataaaatagtatttagtttagtagtatagagtttctttcaaactaagaggccaataaatcaattctcaacctcttcttttctatttttttttagaatcagatcagaataaattaatggatgaatgtaactgaataaatgaagaaaaaaaatagaattaatatttgcaatatgttatttactaaaattattcaaatattgaatgttaataatttatcttatttactttatcaggaaacataattgaaatacttaaatttgttaaattatcatttttaattaaaatataatgtatagtaattattttataaactatatttgaaaggagaaacttgtcaataaatatttaattttataaaataagataaaaaaaaattgaagtcattatattccttataaaattagtgggagatgtatctatttttttttattttctatttaatcaatttttggaatttttaatttttataaattaaaataaacacatatacagaaatgactaacttaccatcgattcacattatttattaataaatatgtgtagttatgaagaattgaaccttgaaactctaaaagttttacaaagttttgtctctacaccaaaatactagagctattattttgatgataattaaattatttatatactttaggaccgaccctgttatgtgcaaagttaatggaccccttacttagtgacaaagttgatgtttggtccaccaagaccatctccaaccttattagataaattagtgatttattattaaaatatgtcttacattgtaaaaaaggtttgctctaataatgtgtcaaaaatttatctaaatcttaaagtagaataattgtatatatatatatatatgttaaaaaaaaattcttttaaggctcgtttggtacgtcgtattatattgtattgtattgtgttgtgttggattgtattgtattgtattgtattagtattatgtaatgcaatactatgtttggtattgacttgtattaataatttgtgtaaagttataatatattttcaatacactcgacctaacaccaaatacgggtcaggtccgggtctcgggtcacaggtctcgggtccaagtctcaattcggattcaggtctgggtctgggtacggagtccaagtccaggtccaggtcccgggtctgggtctaagtcccggatcctgtgttcgggtccgagcccaagtcccaggtctaggtctgggtctgggttcgagttttgggtcttgagtctaggtcccggat

SEQ ID NO: 238253 - DNA, 1314 bp, Cannabis indica
aaaaaaaaaaaaattaatgcatccctatatgtttctacatcagagagacttttttaacccaatttttttatattcgtgtatattataattatttaagacattttgcaaaattttaaaaaatttaaaaaaaatttagcatgaatcaaattatttgttgcacgtgagactcttttattatatacgcatgtaaaatacactatttgaatatagttttctataatgtcaattattctgaatttttaaaaatttggtacaatataaataaaggtacatccgtgtactcattaagggagtgtattatagaagtaccctaaaatatataaatgtaattagatacttcttcaatacactcctaaaagagatccaccgatgcactcattctttctgaatttgagagaatatttgaatttgagagaatattttagttgtgatattacactcataagactactataacatttttaaaaaaaaaactccaatccatccattgcaatgatggaaaagcatagattttacttttgctattagtatgataaaaaccaccggctatcacagtcactgttagcaactcagcgttgatgcaacgcagcgtttccttcgtagtaaagaaaagaaacattactttgtagctttgtatatctaaatataaatagtgttaaaacggtcaggaaacgtgtggcctatgtatattgtttttcaagttttccgtgtatacaacgtgtgacccatatacatatatattacatgaaatttttatgtcgggaaaattgattaaatttgaaaagatgcttaatattatttaagcaatatcaaaacctatcaacactccctcagatccaaaattcaatgagtatccaaatgtttcggatcagaagtgatccatcggattggagctccaacccgctccaatttaatgaatctttttgacatgcctatctctcctcccacgataggaagaagggtacaagagagggactaactttatatgatgtttatcatatcagaaacacctagctgaaaactaaatatgtattaattcaaagtaaacgaaatgagcatttcccagtacaacttcaagcaatccaaataccattttctgtccttcaattaagacagaaataaaagtggggcgcctaaagaaaatttagaactagaataaccgaaaagtgaactcaacatcttcttacagtgcgtctcgggcagcaattcgtgaggttatagcatctgcaagtgaggacaccccaagttccacgctagatatcttgtattgctggaaaacaacagttattagtcactgaaggctaatcattttag

SEQ ID NO: 238254 - DNA, 1338 bp, Cannabis indica
tttttattattttaaaaaaaattagttcaaatataccaataagaaaatgacacacgtggatttaatgtcttaatatttactaggcggaccctagaccctaaaccctaaaccctgtaactaaaccatagtatataggtacaagttatcactaatttaattttaatcacaagaagtactaacaacgcatttagtctcaccaaattgtaatttttgtgactaatatttttagtcacggactttttagtcacagcatatgaataatggttaataattagttacaagttttttatttttagtcacaagttttgttgtgactaaaagtaaatatttttataataataaagttattagtttttatttattttttttaataaaaacattaattatatattaaattttaaatcaaagttttgtaattgtgcattagaacacaatgcaaaaatttgatgtaaatctaccacagagctatttttgtgccaaatatagcacaatttttacatcttccatttgggatggttttagaacatctctaatggagagctataaattgtattgctattttttacaatatttagttttaacttaactccaatggtaagtaaaatgtgtgctaaatttaacacaaaagatagtttagacaaaaatttagcccataataaataccacattttttaattacctcttacgtaacattccctaaacaaatttttttaatattcagatattaaaataatataaacaaaattaattattttgtatatttttagtaaaattaatagtaatattgacttttatagttaatttgcaccttgtgtattggagtaaaaatacaaaaactaagctttatggtatattaatttgtagccaaatttaactaaaaatatacaccatctaatactaatactgatcgtcttatttacatatatattagtaattaaaaagataatacttataaatataatattaacttttattataataggttaaattagattgtataataatttaaattccacttcttttcaaaatttatttttgtcactatcttaaaaaaaaattataaatttccctccttaaatccttggtccacgaacagtacacgtgtatatatatgcagagaaataatcattatataatatatacccttaaacagtaaaatttatgcaaacgcaataatgatcaatataatagcttaagtcaataaaaaaacgggattttttcttacaaagaataaaaaatcaattcttaatgtatatatctttaacatatattttattttattcctgttactattctctctgttttttttttttactttttttttttatggtatattat

SEQ ID NO: 238255 - DNA, 1174 bp, Cannabis indica
aaaaagtgcattaatctttgggaagaatttataaggttttccttttacaaaataatttataaagtgctattattataaagatagtgtatatagtttttttaaaaaatattaaaggatattcatggtttagggtgcttagcactcttgtgaggtgtaatattattattggtataatttcatattgaatctcacttattttaatttaataaaaattacataaaattactaaccaattataggatttcatctcatagtggtgctaggcacctcggtgccctataataatactctatttttgtagcatgtgccaaattttacataacaataaatatcactttttttatttactcttttgctactcattataatgtattttttatattaataggatttttatacactttcaattaaaatttaataattttgttgacttttttataaaaagtaaattaatttacccttatacaatggtaaaatgttgatcaaatataatgtttaactattttttgagttaaatttaacacaaattttgtaatatttattaaagatggtctaactagttgttcaaaaaaattattaaaggtttgttgtagtttttcaaaaagggatcatcaatttctataattaaaattaacttatataataattaaatttatggatttccattgagtatataaactttaataggcaacatatttagtattgagaaagaaaaaaaatacatatttaatatttatagtacctaataagtaataaatcataatgagattgatcattcaaaaaaattactaataagattgatcgagtaatatctagtgagtcttattcgtcttggttgcaattctacacagtgacttgaggaggatgagcaagccaaagatcactctcgattcctgaaaaactcttcttcatattaaaatattttacttaaaaaaaatatattagaattcagaaacaatcttaccatcgagtactccccatgttcgaaagagctcaattaggaaatctatactgtaatatatatgtacttttttataactgatagagtaatttgtctcttatttccatttagttgaggacttttgaagaagaataaatttttgagtagttactttgccactttgtaagaatatattttaataaaaagaggacaataacaataatatagccggtt

SEQ ID NO: 238256 - DNA, 712 bp, Cannabis indica
tgccaaagagtggcaattttgttttgcatcacctgaaagtcgatagcccgattagtgagaaatcgacctaccaagagccaccgatcatcaatctcagccaagccatccgcccctgcttcgaaaataagcccctcctcatcatcatcatgtattgtaaatgcctcatattgctcttccatgttgatcaagtaattccgaattcaccaaactgtgaagacaaaagagccaccaaacaccaaactaaaagattcaatcttagacaaacaaaccagtacgaacggaataatcagaacaggccaaccatgtccttcgacaagacttttttcctattaaaatttttgtaactctttatttgcatttaatagtatcaaaagtagataaataagcttaaagatttagcaatgggaagaacaatattgaaccaatttatttatggattttgacagattgatttgcatatgtagtagatagccacaccccataaccctacaacctcagcttgtttctctctctacctctaatggcgacttcgttgagggcaatgtcctccagctttctcagacataccaaaactcttccaattccaaattcttacaaccccattttctcccgaggattttcttccaagctctttgtcaaaggtaagttaattttaatttttctttaaaagatctaatcttttcattttcttagtaataatttttaaagcagc

SEQ ID NO: 238257 - DNA, 1407 bp, Cannabis indica
tgccacactagatttttgaactttgtggggatctccaaagaattgactagatcttagagaggagaacaccgctctcgatctaattcgtactatgttggcttttgagtagtcaaattcggccctacacactatggtgatgtgtatcagttggccgcgtctagatgatgtatttatgtaggctcttttgtactcaaagtcgatcaaaggcattgataggccttggccttatggttgttgcctggtcatgtggccttgatggaaactatggggatctatcccgtatgacaatattgtcgtctcttaagtgtttgtttcgtgagcagctgcttgcagtactataccgactattcccttcaaaatattcttcctcttagtgacatgtgtggagggagttggaccaattgctccagttgaacatgtctccatgacccatgggaagtattcgtactgtcgaccgtcaagacgtcaagcaaagtacctacaccaagcaccttgttcatcacgaaagtatttttgagtgtggagtagttcattgatcttcacccttcgaaactcatactcttcacttttatggtagagcttccagggtcttgccctaagtctgatcgtctgtccttttccctttgcggggtcacagggtggtctagcgtcatgaggattgtgaagagaatcccatggaggagattggtttcgcacattattcgaattgattcgaacagaatttcggtttgtcctatcaactgcgtgtggtagacgtataggcctacgatctcgagtttgagtccttggatgctcgctcgtagctcgttttcctaacaggtgatttctccgtgtcaggcagagatcctatggatccacatttttgagtctaagtccttttcggctctcgctcgtaatccacttccttacgggaaatttcagtgcctactacttgctaagtaatggcgtgggtaccaagagtggtatgtcgctttgcatgttcatggttgattgcttgcttgaacttatgaattccttgaaaaacaaagttctcggtagaggaagtcaaacagtagacgagaaactcaaattgtggctttcaatgaaagcaccaaaatattgacgctaaaaaagtgggcaacatcaactcgctagatcggcaagatgactaataagtttaagtaaataatttacatagatacagaatttatagtagttcaccccttatattgcgatagtcattgggctgcatcttctttgagtttttatttctcatgagatggtaatgacaacaataggctaagtatcaaaaactccaaactctagagagagaagctctgaccttgtgggtagttttctaaatgtgaaaaataagctaatggagctctccttttataggtgaaggaggcccaaaaaaataggagaaaa

SEQ ID NO: 238258 - DNA, 973 bp, Cannabis indica
taaaataaattccaacacactcacagttctaaaactcgacattggagtctttgccgatgaaccatacgatgttatccttaataaaatcccgagtcatccaaatccctctggccaccaaggaggcgttttttggagttttgctgctcaaaaagttggaatgagagcagtatttctccaggatcacattaacccaaagcgattgatgtttggtagcaagcatccaaccaagtttggcaaggagacagaagtttataccagaaaagttgcgcaggcctaaactgccactggttttgggcatacatatcttgtcccaactcaaatgagccaaatacctcccaccatttgtagagcctgtccaccagaatttctccattacttgaagccacgatattcattagctgaaggttatatgcacactataaatagaggccaaataaaatgaaaaggatatcagattttagagtagagtaaatacattttgttattttatttttctctcttattagtattttatttatacttattttagtgacaaaaatgagtgtattaaaatagtaatattgacgaggttagagtgtagctattgtactttttattcttaatattgatattgattcttttgtgctttatctccatatctcatttattaaattattcttcattttctaattttttttctaaagttaatagtatcttttatataagtacagtcatgcttttcttatgtaagttatgctattaatattttggaatatttattatattatatgtcgtttactacattctgccaatagtggtattttatcgatttatgatataaaatatgatatactgtcaagttagaggtgagattcaatttatgcaagattaattaatttacacttttattatatacatcttccagttgtaattaatggtgtagaattgcaactgtattttgaattaatatcagtattaaaataggatttgcata

SEQ ID NO: 238259 - DNA, 1267 bp, Cannabis indica
atagagagtctcatcgcgcgaggccattttaagcaatatataaaagggcagggcaatgtacataactagtcgaatccacccaacaacctaagaaaccaaggattacaacgtcctcctattgaaggagaggatatctcggttatctcgggaatactgcatattgcaggagaggaacaataacgcccaaaagaggtacgtgatgaaaataaaaagtgaagagcctccgattatattgtggtataactttgcggatttattgggtgaggtacctttgtgactgagactttttgattgtcgactcgtcgtcagcttgcaatatactactgggtcgtccagtattaatcgaactaagggcaattagttccatcaagcacttaccactgcagtttcagacaccaatgggtgtgggagtagtgtgaggtaatcagatactggctcgggaatgctatcgtatagagctgcaatatagaaaagtcggtcgccagccaatggcgatcctagtagaagaaagcgaggagaagggcaaagatcttgatcctcagattttaggtgaaagaagattactgaaaccaattgaagaattggaagaaattattctggacccaggaaatcccacaaagtgtgtttacattgggaagaacctggttgaacaattgaaatagcagctaataagtttttcaagggcaaaccaggatcagttcgcctggagccatggagatatgataaggattgaccctaacattatctaccatcatttaaatgtcgatacaaattacccagcaaagagacaagaaaggagacgcttggattccgaaagacaagagacgtgcccaaaggagtgttttccatacctcggacctcgcggagtgcttcgaaatattaaggattgttttccttaggaaagcttttaagattcatagtcgacgcgaggggcattgaagcaaaccctgagaaaatcaaagcttagttgaagcggtagttggaactagggtttataaattggctcgattctactaactggtaaaaggcagtcatagttttacaaatgcctcactgggacatggaatatttgcgaccctactgccagtgataaaatgattattactcacattttttatgaagtgttttgagcctcggttatgaataaagttaatcatttccatttttattcaagtaattacaaagtgttaccctttcaaattacttgaggggcatatgtgtatgattaaccaaaatttatttatctggaaatatacatgatatagtg

SEQ ID NO: 238260 - DNA, 1005 bp, Cannabis indica
taagaggaaaactatggctttcaattcgtcttttaggctgtttactttagccaatggcttatggcccctctcctctttaaatcagtgtccaaaaatcataattttgtttaagagttcatttcttttttgaaaaaaaatatatgtatatactataaataaattatttataaactatttttttttgaacaaaattaattcattaaacagcaatatccgctaacacaatagactgaagagcatgtggaacattgctctcagtaaaaagacgatcagaccaaaaacaagcaccgcgagcaacacaatgtgcggctttgttagcagatcgtttaacatgacaaatagaaacattatgcagagaagaaagaatcaattgacactcctgaacaaacaaaccaaaaactgatggaagagcaaccgaactattaagagcttgaacaactgcaatacaatctgtctcaactagcacattggacaaattcttcgacttcaaccaactcagggcctccttgacactcaatacttcagccacagctggctgacaagccccagaatgcaaagaggaactagcttcgattaacttcccatgacaatccctaatgaccatgcccgtaccatattgagttgttgcctcaaaaattattattttctgaaaaaaaatatatatccactcaaatgttttcatattaaatgtaatattttttcgatatgctactgtcataagcctagtctagtttcactttcacaccaaagagaaattcacaaatttgaaacatcatttacctaatgtcaaaaaaaaaaaaaaaaaaaaaaattataactactttcaaaaaaaaacgataacttattttatatgtaaatgtaaatgataaatgtattgagaatgtaaaacgtaaatgacgaatgacattgttggtaaaggccaaatgttagtgaagcaaaagcaatttaaaattctcttgagaagttttgcaattggtcgagataacaagtaattaaaactttact

SEQ ID NO: 238261 - DNA, 1150 bp, Cannabis indica
aatataattttaattatttttttcgaacggtttagtaaatagcataataaaatattattttcgattattttttattttcatatttgtttccttaggatattttatatttatagttttcggacactttttattacataatatacaaattcactatttaaccaatttttataattatttcattgtaattaattatcgttaatatttcgtacttttgtgtgtatttgcgtgggtttttcttttttttttcttgggtaaaaaaacagtaaaatacaaaaaaacaaaaaaaatacaaaaatactctgggttggccctttgaacaattatacagaccacaaacaaatatttacaaaaataccacatcctctaaactttcagccgcacggaacaaaacaatgaaaaacaacaatcctcgatcgttcaaagcagcaacacagccgcacggaacaactagtctttcttagagtggatctttgatgagatcctagcctctcctagtaattctttgattgaaccaccgtatcaggtcactggcttctctgttgcggcaatcaagctctgcttggtgagatcggaggatgtactcttagtcatccatccatctcaagaatttacttctctattaagcgaatgcattgtaatcagcagcgcatggctcttcagtttggtcggcttggcagaaggtctctctaagcctggctaactcgagatcttctcccaagtctacatggggcttgctaacagcagacttgcctattcttggtcatgtctctccagcatagtatcgaggacaaggtcatttcctaggggcagttccccataggtccttccttcagtgggaggtgctagtggagggtcctcccttggagacaagggctgattgttcagatccaccaggatgtttgtgtcaccctagccagctgtagtggccagatttgtggtgcctaccaagttggtaggattgaccacatctgcagcgttcatggaaattctagtcgtgactgaaacatggacatcaagatatagtcaaaggatcttgagggagatctaatgatgcagcggtgtagtcggagttctcctcatgttaaccatgacgtttgattagatatgatatcaactcgctctcaatgaaagtaccaaactgttgacctca

SEQ ID NO: 238262 - DNA, 1524 bp, Cannabis indica
ttaaaaatcgaagaaaatagatagagaaagagaaggtttcgttgaacgaaagagaagagagggttttattattcttgtgttcttcaatttataacttaacatatatataacttaacttatacgtttttaatatatataatatattttaaactgataagaataataataatattaataaaaactttattattaatagttatcttattattttctagctactaaaaattttctaattttagggtatttggtcaacttcgagtaccccaaaatacctcagtatttttaaaatcaactcacctcaataatcccataatatttctaactaataccgttgtaatatttttggcctccaatcgagtctccaaggtcgcgaagatgaaaatatttttatttcacaaataactcatattatatccacatatttcaaataaatctctgtaattaataaattacgcttatttatccacgtattgggtcttcaagatcgtcgaacctgaaaatatttttattctacatatagctcatattacattcacgcatattatataaatctccgtaatttataaattacgcttatttactcacttatagcaaatttaaattttatgttaaaatagattagtaggctcataatcttacttattacttgattaacccataatataaatataaactctaattatttaccattaggcttatcgggatattataaccatcccctccttatataaattttgtccttgaaattaatttaaacaattcgggatattacctatacatttatgattctaactctcaaattactgtttctatcttgctgtttttctacaacactttcttaactagtggaattgtctcattacatagtacttcctttttctagtccaaaacatggatcagatgtttttccatgtaataaatttatgtaagcttaacatcgtcacagcgcagaatatgggttgagtttgatacatattttctcaacatggatatatgaaacacattatatattcagaacaatgcaggagtcaaggctagctaataggctacttggcctacttactccagtgtaaaaaagcctaatgaatttaaggtttaacttccctctctacgtatctctttcatagggaatacttggaggaaaaaacaaaacctcctatttggaattcgataatcctacggtttaaatcatcataacttttctatgtattcaatgaagcgagcatacaacttgaattcactctatgattttataagttcaatggatcttttcggtccattgatattcttttctcacttgtattactccagtgaataagtgtctagtatttctctcgttccacacttattaaagtacctaaccgatggtacatttaattatcatctttagaaaagtactctttaacttttatcaattatgttcacaacctttttctaatattccatttatcctcctagaatacccatctttcaagaatgaaacatcatactatttttgctctaatctccataattctcaataac

SEQ ID NO: 238263 - DNA, 620 bp, Cannabis indica
aaattcttgttgccttctattacgagcccacactcgtctttgggttgtgaaaatgtcgaggaagatcttggtgtgaaatctcaaagattgccatatgaaaagatagcataccagcaaggaaggactttaagtttaatttctttccttctgtcttcttgttcaatttacatacatgtgtagaaatagatctgatctattaggtatttttctattgcgtatgttgcagattataaaacctgatcaagatcaccataacaacaaattcaaggacaacaataaaaatgacacatgaattaaaactgaaccagaaacttaatgaaaattgagcttgaactaaagatgaatgaaaaacagaaatgtcataaaattgaattgaaactgagaaaggaaagagtacaacttgaatcaccaatgttgaatacaagaattacaaatgaaatctcacactgagagaagtcacttcaagagtgaacaatctccatttacaaccctcaatccactcaaaaaaccagctgagaattcagcaatgacaatggtgattccctctttctttctgatttctttccttacacagaatctctctctctctctctcaatcttggacactactaacttagact

SEQ ID NO: 238264 - DNA, 1658 bp, Cannabis indica
taagttttcttatctaattttaataagttagttttgattttgtgattggttttagttttgtttgtgtattcttgaatattgttatttctataacaacccattttgagggtgagaatttacacaaatggtatcaaagctcagggtttagagttcaagaatcacattcaatcaatcaagactcatcttcaaatttatttcaagaataaaactcaaactttcaagaatcatattcaagcaatcaagaacctggttgaatcactacaataaggtttgaggtggacaagttcactggttcaaataatttcagtctttggagaatcaaaatgaaggattttctagttcaccaagggatctatgaaggacttgatgctgaagccatggaattgattgaagacaggaagaggaaacttgaaattgaagccatggcatacagtgccatcctcctcagtcttggtgaagaggttttgggggaagttccaaatgaagacaaggccttgggtctctggcacaagttagcttcaatctacatggagaaatctcttgtaaataagttgtatcccttaagaagaagttgcacacatttcaaatggatgagtcaaatgaattgagaaagtatctacatgattataacagaatcattctttatctgaataatcttggggtgaaaattgatgatgaagactaggctataatcctgttgagttcacttccaaagatgtatgtgcactttgttgatacaatcttgtatggcaaagatactctgaccatgacaaaggttaaggctccattgaattctaaagaaattcagaagaggggggatgagaaagatgagaccaatggggaaggattacttattgttaagggaaaattccccaagagggaatacaagaaaaatcagaactcaaatggctacaaaggaaaccattccagatccaattctagaaactccataagagggccaagctctaatggagctgtagaaaagcaatgttattattgcaaaaggagggccactttagagatgattgtgggtttggaaggctaaacttaggagagaaaatcatcacaagtccaaaaggcatgcagttgctgatggctatgactcatctgaggcacttgtagtataatctgatgcacttgtgatgtctagattagattcaggtggaggttggattctagattcagggttttcatttcatatggcaccaaacaaagaactatttaggactcttttagagagtgatgggggcacaattcttcttacaaactataaagtgtgtgagatcagtgatgtgggaacaatcttgttaaagaatcataataaagtcatgaagaccttgcagcaggtcaggtatgttctagatctcaaaagaaattttctctctattggtacgtttgataaattaggatatgttgtcaaagttgaagaaggtataatgaaaattgcataaggcacttaaattgtgatgagagaaaagttgagtgatcgattgtatatcctggatggaaagacaatatacaggtagtgcaacacctgttattaactcaactaaacacagtgaagcaagcctatggcacctcaaattggggcatgtaagtcagaggggacttgaggaaatgaacaagcaaggactattcaaagagaagctaaaagaaag

SEQ ID NO: 238265 - DNA, 3095 bp, Cannabis indica
atgtgttcctacgggtgtctccgatgaaggagatatgatgttttggaaaaaggggcaagttataccctaagtttacagggcctttcgagattcttgaaaaggttggactggtagcatatcatctagccttgcctccagctctttcaacaattcagaacgtgtttcatgtttttatgttacggaaatacgttatagatcctatgcatgtgctgaggcatgagaatcttataatctgggctattgctatgttattgattatgctttttttactgagtctgtcgactcacatatattgtttgcatgtgtaggtaagggcaaggctaaggttgagcacccgtgtgagcgagcagatgaagattgtacatgtcgaggcggttaagcctagagcgtacggtctttgggacagctgggcatcttttgtatagttgctaggcgacaacttttgtactatgcactgtaaaacttttgtaaatattttgttaacaggatcctagtttaatataagtgaattattttaggtatttataaatagttaaataaagttctaattattcacgattttcaataaactcgttgattagaaatgagctacacaattaaattaagaatcacgttaacacgcctaaactagtagggtgttacaatggtgctcagcacgtttgctgagtgtttggtggtgctcaacatgttcattgaatcatttcatggtgcgtagagcctatggtgagtctttttttgatgctcaaagcctatgctgagacttttatcatttccatggtcgaagccaaggatgttactctctaactcaaaataaagatcaattttacttagccctgagctaaagcttttgttgttttggttctaccatttcgcacataatgttattgaaattcctcatgtatttcatttattcttgaaattaacaacttcaaatggtagaaagttagttgcaaaataatatttttctgtagtatattctatttatcaaaaataatatttctttaaaggcattgagttccaagtgtttagtaccacccttccagtgctaacttccttgaggatgtatctcactttgcctaggacctcatggatccaatatggtccatcctagtgtggctctagattctttgaagctaccgatcactttttgagcacccattctcctactgaaaaggttctttagttgagttgagctcttagatgcttctcgtttgctctcaaatatttcacttgtctgatttgggtgatttgtcgaacttcttctagcagatcaagattatgagagatctaagcatgattctgatcctcgtcttttacgatttcacttcgtaaggtcagtaaacctatttatgttagaattagtgcttccattccctagaccgtggaaaatgatgtttctcgtgttgggggttcttttattggttcggtacgcccataaaacctttggtagatcttcttgccacttagctttactgctcttcaagtctttcttaatattattgaagatggtcttatttgttgcctcaacttgtccatttccttgtggatatgtgatgaaagaaaagtttaagttgatcttcaaagtgtcacagagctctttaacttttgtattctggaacggagtaccgttgtctaccaccaattcatgtagaatcttaaattgacaaattaattatgtgtttctagataaaaatcaaggtctttaccttcgaaaccgtcacatattcttctctgactacccacttggtgaaataattgattgctaagagcacatatctctttcctcttgcagctcgaggaagttctccaaccacatccattccccatttagcgaaagtccaaggtgctattacactgttcaatgcttaagctagtctttaaaagcttagtgcatgcctttgatacttatcacatctttttgcatagaaagtggcatctgccatcatgtatggctaataataacatgttgctaatgcactttgagctaggcttctttctcctgaatgattcttgcacatcctttcgtggatgtcaatcaatagtctttgagcttaaccaggtcttaagcattgtaaatatggtctgttgaagatttacgatataattttcctgtcgggatgacatatctttctgattttatcttcaagatttttgcctccactttatctcttgggagctcgctcttatctagataggtgaatatcaaatccatctagcatggttctaactcctctatctgaaaattttggtaaggttgaagcttctttctaaggtcactttaaacctttaagtgaattattgccatcatttttgtgcaccgaagtgaagctcttttttggagctcattagctctttgattcatttctcttggtaccccctttatttcacattataagaattcatcctatagattagtaataattcccaagaactttttcatcctaggacaccttgtatcaaattttctgcctatttggtgaaccaccaacatggaatcataatgaatttgtactcttttgatcaccattgcgagagctagttccatgtcataaatgaatacttcatattcagcttcgttgtttatacaataatctttgatggggagttttcaactctgagggaaattcctttaaaattccaattccggctttaccactatttactgctttgtcaacatgaattttccatatccattcagattccaagagctcaagaatgaccttttctgggctggagaaagagttgatctaccctgcaaaattttccaatacttatcccttcttagcctttttagggagatatgtcatgtcgtaggctcccaattctatcgcccactaacccattcttctgaaaaggtcaggtttgttcttctctgaaacgtacaatgctaattgctacttcactgacttctaggtacataaaaagctcctcatttgttttttgaggcgggcagaaaaggtggcgtactcagatagttcttgatctgttctagagccttcactttctctattccctggagtttatttaagctcttcttaatacaatcaaagaaagatttgtatttgtcaaacatttttttgttgggttttgtgccc

SEQ ID NO: 238266 - DNA, 2654 bp, Cannabis indica
aaaagactctaaatgcattaatagtctttaaaataacctaacaaattaaaattacactaatcaataatataaagaatcaatttaagaatataaatacgtaaattaatcatatttataagacaaatatggactcatcaattgcctcccagactcctactccatccttgtcccttcctagacctcaattttctccaattgtctagaaacctactacgtatgacctcgtccctacgcaaacctatttctctaggtacggtgcgacacaaatcaagtgtagtgtggctcccggatagtccaaatttgaagtcttggattctagtgcagggcattcgcggggtaaaagaggaggtaagagtcatagtcgtaatgattcagtgaaaaaaccaagaaaggagtacgatccaaagtacactaaatatacaagtctgatagatactcgggagaatgtctataaagcaacatgtaacatggtccattaccggaagcccccgtgcatgtcaaatggctgaaggaacaggcgagatcaaaataagcaatgttatcacgcggaaaagggccacactacgaatgaatgtgagtacttgaaagatgagattgagatgttggtctgagtcaggcatctggggtagtgggttcgcatcccaattatttatcccggacatggggtagtccaagggcacatgatgcttcccggacagcaaggtgctgcaaatccccttcccggacagcaaggtgctgcaaatccccagcaggggtagtgcgccctcaagctcccagaacatcattacctgttctccctactccaccagttccggctagggtggctttgcttgcttccagaccatgaaccccatatcctcctagaattgctccaccacctgtaatggacatgttgtaataattttgagttgaccacagcttgctagaagtacacgtaacgcgcagaagagatatctaaaagaagtagaggatggggaaatgtgtgaattggtatagtctctagcacaatgtccaaggatgatgaatctccctattatcccaaattttgtactctgacgtggcatcacgagaatggtgacacgtggagtccacttggagcatctgctcgaaatgatagaccgaacagaatgtctcgctgtcacatccagaatgagatattcagtgagtcgtgcagggcaatcaacacttagcaaatttagctttcgcatcatgagtcatcagctcaatccctacaactcagggatcaacttacgtggatatggtatatacacgatcccactatcagtgtacttgacctcaatcccacgatccttgcaaaccgtcgcctatacgagcgttgcgaatactgaataaaatagacgatggctgaaaaccgtcggggaaatagtatgggccacggtttaaaaccgtcacctatagtgttcactataggcgacagtttaaaactgtggcctatagtatacgtcacggtttaaaaccattgcctgtactataggccacggtttaaacggtgtcctataatactataggccacggttttaaactgtcacttatagtaaagtttttagtttaattttaaattttatatttttagcgacgatttttgcccgtcattgggttgtaaaaaaaagaaaaaaaataaaaaaaaatctgcttttttctcctgcattaatcaatttttactattttatatattgtcactaattaaagaggataaagtataaacataaattgaaaatgaataaaaaattgaaatgcatacacactatgtactcaaataacttaagcgttagttatatgaaagtaactagttatagtgtaaagtataaacaaaaacagaaaccgatcatcatcgtaatagctcttgtcgcactgcctgtgctcagacgtattcaatccactaatcacgcagaagatttatctcgtcatttgagtacgaattgctcttaccctgcaaagaaaaaagaaaaaaattatatgctaattagtaaaagaccatgtactcttcaatcaacacaaaggactctatatctaaaagttaaattaaaaatatgcatcaattgttaattaacatgtttaattgagactaatcaattttctcaaattctttaacatatagcataacattatccaattaaataataatataccaagaatgaggagatcacttagagaaccaccgataaaagaggaaaactttgtcggaccaccgagaaaatcaatgaactcctaaaaaaataacattaacaatttaaaataaataataataataataataatagaaacctgaatttatgtatgggtcaatcaaagtatacaaaatataaaaaaagaattcaatgaaccaacaacaaaagtcaacatagaaactagaataaactgataaatatttcacaaatatgaaaacactaaaacaacactactagaatttatagtaagagaaccagacagcaaaaagaaattctacaatgaaacaaaagaaacttagaagcatagcatattattgaaaccatgtattgttgtcatgtattctgattcggtttgcgttttgaagtatgataaaataggatagtggaacaaaacaaacaagcagaactagaaattgttcttcaactcaaactctcttttttactattggtttactttgttgtttt

SEQ ID NO: 238267 - DNA, 767 bp, Cannabis indica
ttttaaaaaaattgaatattttaccatgataaaaaaaacaagattcaaatattttattacatgtgtgattattttttcatacatgtacagtaagtaattgtttgaactttattttggtactgtagattaattattcaaaattttttaaaaatttacaagtcgtcttaaataactccgacgaacataattgtaaaaaaaaaaaaaaagttagactaaaaatctctcattaatatcaaaacagataaaagtctaccttaacggggtgtactacaaaattttcattaatcatttaatgtaagtttgattcattaattcaatttgaggctaattaatcatattattaataagttcgattgtactaaatagaatttacttaaaagaaagaaaaaggtgggggtgggtttgaactttgaagtggtactgtggttagccgtattccttctccacatgcacataggattcaaaagtttttgtttggttagccgtattgtgacttttaaatatgattaacctaaaacattattatgaaatagatggaaaattgttatcctttctcaattgaacatcctaatttagtcataatctaaatattatacttccaatatttcttcctctatattgtgaaagagagcataattaattatatataatagatgtttgacactaaaccaagcacattgtagcaaattttgctttcaaattaatctcttaaatttcaaggtttaagattacactttaacaataaaagttaaatcaaaacaaacaaa

SEQ ID NO: 238268 - DNA, 1025 bp, Cannabis indica
tatatatataattaaatttttataaaaagtagttagaatatctctaatattatatatatataaataagtcaaattaaaatatttaaaataatttaaataatttatttagtattaattagtttaaaaattatttacaagagtaaataaaattaaaaaaaaaaaaatcattaagttaaatgtagataactaacttaggccttaatttagaagaaaaaaattgaattaaaaataatagtcaaattttaataaattagtaactttataatgaaaattaagtgttaattttaataaattagaaactttaaaagcataaaaaaatattaattttaacaagttggtaactttaaaataataaaaaaaaatgttaatttgaacaagttggcaactttaacatgataatttttttaattttaacaagttggtaaattaaaaattaaaatagttgatgaataagtaaataatattttatttagtaataattaatttttaaattttaattattctagtaataaggcataaaataaaatagcataagacattgtaaatagtataaaataaattgagaataaaaatttgtaggtggtaacataaaatagcataagacattgtaagatagcataaaataaaattattatcttgatttgatcttttagttataaaccaaagataggatagaataattgcttgaagatttgggatgcaagcctgttaactcacctatggaggaaaatttgaaactgtgtcaagatgagaaagacacttatgcagacccaaccttatataaaaaaaaaattaagtgattggtaagttgcaatacttaaccattactaaacctggcatatcttaatcggtaaataagttgagctcttcaaaaaaaaaaaaataactcgcaagcagtataccaagtcctataatacataaagtcctatccttggcaaagtatttttatatttgctgcatcagatttaaagttgaaagcctacacagactctgactgagcaacttgcaataaaataaggagatcc

SEQ ID NO: 238269 - DNA, 1410 bp, Cannabis indica
agtaaggtatgtacctgaactaaaaagaaacttgctttcaattggtgcttttgatcaaaatggctatactgtcaagatagattatggagcccttaaagttactagaggatcacttgttattattaagggaaagcaaagaaatagcatatactatcttgatggttacactgtcattgaacctgctgcaccagtaatagacaagtcattagaaagtagcattaagataaggcttcttaggttaggtcatgttagtaaaagaggtctaacagaacttgataaacaatgagtattcaaatgtggtctcaaggacaaattggaattttgtgagtcctgtgtgttgggaaaaagttgcaaagtgaaatttccaaagggtatgcatacaattacagagaagctaggttatatccactctaatctttggggtccctccaagattcaaacacttggaggtgcaaactatttcttaagcatcatagataattactcaagaaaagtctgggtatttttgttgaaaataagaacctagcctttcaaacctttgtcaatcagagaatcatgatagaaaaacaaataggatgttgcatcaacgtgttgagaacagataatggtcttgaattttgttcagatgagttcaaaagttattgcataaaggagggaattagaaggcacaacacagttgttaaaaatccacaaccgaatggattagctgaaagaatgaatagaactcttcttgaaagagtaagatgcatgctgaatagtgctagtttggagagaaagttttagggagaagcattcaaaacagcctgctatctcattaatagatgcccctcaacagccataaactttaaaacccctcaagaaatgtggactggtcaaattcctaagtatgaacatctcaaggtatttggatgcacagcctatgcccacatcagacaagataagctccaacttagagccattaagtgtctattcctaggttatcctgatgggatcaaggggtacaaattgtggtgtcttgaacctggttttaagaagtgtggcataagcagggatgttgtgttcaggaaagatgagatggtcatgaaagtgacaaataatcaaactgaaacagtctcaataaaagacactaaccccaggcattttacaacttgaggtggagccaagtaaaaattcagatcagacacaagaaatgcagatagaagaaagccaagataattcagatgatagtcaagatgacctcagcaactatcaactggcaagagatagagacagaagagaaaggccacctgatagactagggtatgctgagtttataacatttgcactcactgttgcagatgagattgacagttcagtaccttcaagttattttgaagatgtcaatggtaagaatggtaaagcctggttaca

SEQ ID NO: 238270 - DNA, 1071 bp, Cannabis indica
tcctcccatcagcagctccaaagcagagtcattgtcggcaccggccagttgctcactaatctcaggaaccaaccggttcatgtagtgggcgagcatctccttgcctttcttggcctctggaagcattggcaaaggtggagtaggagctcccatctgctcggatctacccttgatcagctcagatccaccttttggttgctcaagcctgcccgaacttcctcctcgagaatccttggactaagcaactttaggagaggaggggtttgcaacagttagctcctcagaaagatcaataacctccccagcaggcacattttacttggtaggggccacctcaccgcccctggatttctgggccggggaaattcgcttgagcttcctccaactttctcttcagagcctcgagcatcttctgagacatgtctgcacggaacaaaaacaacatggttagagaaaatagacatcagaatcataaagcataatagtcaagaagcttaaaaacaagacagagtcgtatgcaagacgattgcccgagcaagactcgaaagcccatcatcaccttacaagcctcttatctcagccataacagctttcccttttcccagaatgggagaaggcgaccgagcaggtgaattaggctcgttaatgtggattgcatgttcaataggcctgggctgggccggaagtttcttcctccttttgagcagagtcacctgctcttcctcagtttcatcttcaggattcaagggcttctaagcatactgcttggcccttgcacctcccttcaacttagcctcgcgcttaagttgaatgagctctctcagcccggccagcgccagatttcctcttcctcccctacattggtttaggaatgaaatccttcaaataaagcctgtacttcacaaagttgtcctcgaaggtcaactggatgatattcccatccatccccccagccagctgagcaagctcttgagctctatccctaagagtaagagtgagggggagggcggtgatatgtagggatttgctgaaactgagtatgggtggtgcccgatgccatccacttgaagt

SEQ ID NO: 238271 - DNA, 607 bp, Cannabis indica
atttgaccaaaactaattacaactgacacaaagaggaataatcactagaattgattatatcaatgaacactggagtaattatagaatgaataaacaaagattatttgattaattaggctcaataaataaatctaatttatttgagctttgaatataggttcatggtccctggatcgctaccgtaaaaccaataggtactccatgctcaaatcaagcacattaaacttgatttgtatttcgttcaagaaaaggttcacaatcatcaaattgttgtaaaacatgttccaactattgatcaacttgctaatgatctcacaaaaagccatttcaagtcaacactttcctcaatttatagagccaaactcacaatttctgttaagcttgctagtcacttaggagttagtgctaactgttatgttatttcagttagaattgttagcttcctcttgaattagttagaattacttctttttttttttttgaaagaacgtcaagttcattaaacaacggaaagatagtcgggagtcacagtgggaattccctccccttgcaccaagttacttgttaactcatcaaccaagtttttttttttttttactttttccga

SEQ ID NO: 238272 - DNA, 1062 bp, Cannabis indica
tttttctgaattacttaacatcttctaggatgtcgtaaataactatgatgtacacgatcaattaaaaaatattaaaccagaaaagtctctcgaatgtccaaatagataggagtccattgatactccttttaggaggtgcattgtagaattttttatattttatataaaataaaattattaaaatagagtgatataaaataaaattattaaaatagagtgactttatttgaaccccattaagtacaccctgatattaaaaaagaataagttgaaaataattttaaaaattcctctaaatatttttgttttaaaaaaagttcacattatgttgtgttagtttcaatacttattttatatttatatttttgtttaaaattatgtatatttttttattttttttctaataaaatttcatataattatttttttttaattttttgtcataatatttataatatttatgaaaaagaaaattgttaaaatactgtgtttttataaattttttaaatgtaaatatttgtaccctgaaaactgataaatacaaatattctattttaatatttttgttttacataaaatatatatctttaatatattagttttgatcaccaatttatattcttaaataggatataaaacaaaagtaaaatatattttaaatattataacaataaaaattatgtgaaatttttatcaaaaaaaaattatatatgattttctttaaaaataaatatgaaaatataatcaaaataagtattgaaattaaactaaaataatttgagaagaaaattaaaaaaaattaagagtaattttaaaattatattaaacttaatttttgtaaggattaaggtgtacttatcttgtggttatagacatagtttagtgattataaatttttttctcggagaggttccaagtttgaatcctccttctcaatgtcagaaaaaatgaatttttttacttttacactttaaaacattttttttctttgtatttttacggaaattcatataaaaactcacatagcaactaacggggtaacttaaatcccatttaaaatcc

SEQ ID NO: 238273 - DNA, 6305 bp, Cannabis indica
tcaacagtatgtatttttagttttagttttttttttttttttttatgtgtgttgctttgtaaatataaaaatatttaatttatttttttgacatatttttttaaatacaatttttttcatttttttaaaatattaaaattatattgttgtctaattaattttttattgtttaaattatatattactcattatattatatattttactttaaaattataaaatttattacttttattattaattatgtaataattcatttaatttctaaaaaaaaagcataatctagctgtcaaaattaaataaaaaataattccataatacaaaatattaaaaaataatttcataatacaaaataagtaaagaattgacattgatttgcatattacaactaaattgatgtttaattttattttattttttttttaattattttcttgttgttgtccatgtgctttatagttatttttagttttttatttttactgaaagacaaatatttttataattttaaaactttaaaataatatttttgaaaacttaattttgtaaaaaaaaaaattgacaataaaaatataaaaacacctttagttaaggttaatgcctcaactttatgatggcataatcacaagaataatgcaattgtttaaaaattagcccaaggctattgtcactgcacttttcatttgggtttgggagagaacataattacaatatccagcaaaataaattacagaaggggagactgaggaaatggatctcaaaatttttgggtttctgcatctaacacacattcacacatatggtacaatgaacagtatagtagaaaagaatgccctttattatcttgtgtagtatagcttcggcgaccagaaaatttccatatggtcacgcactcggtttatcaagcagtttcttttctttgcttgtcatcattctttgcaaccaattattaaaattttgaaccgtgaagatacattgccatcaaggttaacaaggtcatgggccttattcttcctctttgtgggccaaagaattcaattgtctttccaactgcacaagaaatagacaagaatgtgaacaagtatgccccttctgacaaggaatgctaggttcataatcgaaatatatagacagaaatctttaaatcataactagtacatgagctgttttagagcatttttgctggtacaagttgtcaccaaccagtcagtaggggaggattgtctctatcaaatttatgtagcacacttttattattttagcaagtgatattataagattcagtccataagaaatcaagtaatgtgtgacattttttccccaatcagttaattatctaaaaaggccttatttcagaaagacttttccatttcaagaaaaaaaaatgccaagtttaacaaaaaaaaatttaaaaaaggtaatcaatgaacaatccagaaaccaacggattttgtaatatgcaaacaattaacactaacaaactaaacagtcttgcatttgaagacgggttagtgcacaaacctgggcatttttcattttctgtctctgcaattcctcaataagactcccaacgctgacattaaaaatgggtatgagtcgaatgtaaagataaaaggtaagtagaatttatttggttctgttatgtacctctgttgcaaattgttcacctggttctgcagctctctctcccgggataaagcataagatgtctgttaacaaagaaactagtttagccattttaataaaacatttaacctgagagctcaaaaggggtttgcgtattagacagctataggtttaattaaatctagtaatgtgctactacaaaaaaggattagcagcacccccagaaagtttgaccatgtccccaacgaaaaattaaaaaaattaacaatgttagcaagcaattctaaaaatgctgaacgattctatgcttgatataaacaagctttcccattcccaatcttttcaaaaaagggtcaattatggaaattttaacagaaaaaggtaatgctacatcaatagaaattaaacagaggttttagaaagaaataacagtcaaagcacaataataggcataggtgcgaaattaaacattcaaaacagaacgagagtttgatctatacctgcgaaaggtcagaagttcctacatcagtgaactctgcttgcttgcctatatcaagttaaatatgtcaaaaacaataaaaattatggatatggttaagggaaaagcataaacaatgagaagatgagaagctttaccagaggtttgttccacgtacttcattaatttaattatttcatcctgttcaaaaagaagaagaaactgagacttaattatcactagactttaaagcaaggtaaaatattacagttagtgacaaaccctttgcatagtgttctgctgcaaaatgcattgcagtgatggaagaacggctgaggctgtgaggtttgcagatgctggactggttaaaccaccacagattgggttgaagtaacaatttgtaagaccctgtagcataaacaagaatggcaatcgttatacagccatacctagaagatatattgatcagattcgctttatcatacattagtccagcgttaattattaacagaacatagcacggcactaaacgtaaaactaagaatgaaatcaatgtggcaaatgctaagacataggaccttcatgcacgtataaagcaataactttatggtgaaaaaagtaacaacagacgtgaaaaccaaaaatcacagcttcagaaaagatccaacttattatactaacgctaacaacatcaatcatgatgactgataacttgtttatgaatttgtaccttgggactcaattccgctgaagtgactttaaaccgacccttatgttggacaatcgctccgtctgatgtatcctcagctgcaaagagaggataaaacagaatgtaaaatttattgttagaattatgtttgcaatataatatagcattcagaattgaatttccaatgaaaaagaaaaagaagatacgagtaaagacacaccagatggaggattattgacatctcgcctctgccgatacgacagtgaaccactataatttcgctctgattgaaattttgattgtggataatcccttcaaaataattttagtatacacaaatcattaaatattatttaacgaaagatcagcagcaagcaaggctcgggtaataaaacaagaaccaggtaatacaacaatataacaaattacagtagcacataagagataataaacacaaagatattgtttcatagctcctatcatttccccacagtaccctctcagtagatacctatcactaagttttacaaataaactagatcgacgacagacatgtaaggggaaaaggatctctgcactgattttcagaaagaaaagaaaaaattaattttaatttaaagaaagcttacctattaccttcaccaacaacccttttaggtgaaacaacattatctggaaggagtgtaccgctcaaaaactttttatgctcagctacaatatgacgtgggatagatgaactttgcccagaacattcaccatcagttctaccattttcttggcacatagttcttggactagtggcattctcatcatcctcacaaatatcaaagcaacctctgtatcaacaatggaatacttataagatgaatagcaaggggttttggaaattactaaaatacacaagaaaagaaaacaaaaatgaaaactaagatagaatgcacatggttaacaaatagaagaatttaatctcctgctaacgcaaacaaattgaaactaataatgcaaacattctattggaaaatttatggtgtaagaactatagtaatggatatggaactaagatcgacacattgatactaataatacattctattggaaaattaatgctgtaagaacaatagtatgcaatgtacaacaactatgactgccccagaccagattgaaatatagtaataaaaaaactagcataacaagcaatgtagcaaactcatcatacttaagtgcctgaagaggtttaataggaaaggaagcaagtgaactctccaaatccttaagatcattaaacccatcctgaaaacaatgaaatggtaccacttgttaattcactaatataattaaatatcagcataaggggaacataaaaataaaaatagatacttctgagagtctctacacctcctgattagaagtaggatttgattggttggccatttcaggtgacagcctctcttctggaatcccaacatctttatgctcatctatttgcttcttcatcatctcttcttcatttgacaagtcatcatcctgaatctatgggcaattaaggtgtttttactacatgacaagaaaaacagcaaataaaagcaaaaacagcgtataccaaatttattttaataaattccacttaaaaataaaaacatgtaaacacaactaggtaggtaccaacaccacttacaagggcagcctgattcctcaaatcctcaaggttaaaattccaggcactgattcctcggatgtactcttgctgcaaggtaataattaagttaaattcaaagtagacagaagtttggtaaagttaccaccccccccccccccaaccaaaaaaataagccatgaaatataagcttacaaactttaaatgaattagcctttgtacaataaaattaaaaaataaaccacattggttacaacctgcgataggtgctccttatccccatagagtgcactattctgcacaagaagatcagcttcctttgcctgaaagaagaaaatttcttcagaaaaatagtagacaaaattatttaatgtgagaaccaacacagaaacaagaaagtataaaagcctaatcgaggatcagaagaagaccttcaatgtcctaaaacgatcacctaatggagcaagaccgtctagaatggtgcgggccaaataatcagtagaacgtgcatgcttaaaaaaatggtgctttaaaagcttttctgaggttgggcgtttttttgggtccttcactaagcatgcgccaacaagctctttaaaagactgcaaaacaaattctcttaatataataaataaatacgtaaataaaaagtaaaattaagtgaacaccacagacctttgaaaatctcttgtccctttcatagtcaagacctggtggagcattttgtaaagtcatcaacaaaacctgcaaaaaataatataagaaagatttgaatttaatagatgatagtagcctaatgactcagctttcaatgtaaaaatcagaaaattagaaatttactttcattggtggatacttggaaaagggggcatgaccatgagcaagttcgagtgcagttattccaaaagaccaaatgtctgctctgtgtatgggatagaaacggggaaagatcttataaaatttcaattaaacatatgtatgggcactgaaggacatacaagtacgtaaacatatatcaaatatgcaacaaactcacttaaagtcgtatccatgcaattgctgcataacttcaggagccatcctgagaagaaagaaagaacaaaaaatgagtggtcacacacagaattttgaaatgttgaaacaaccataacaacaggatctagagtattggcaaacccgtatgaagaattaaataaagaaaaagaagaagaaaagaataacaaccagcaaggtgttccaacaaaagtatttctagaacgttgcctatctccagtgtcaaacatacatgctgaaactccaaagtcagctaacttgactgcaccattagaatcgattaaaatgttaccagcctgcagaagaaaactaacaatttcaataaggccaacatttcagtaccaaccccaggataagcagccgtatatatttaatcaggggaaagaacaaacatataactatccagcttaatatgtaattgataatttttttaaaaaaaaaagtaagatacagcagaccatcattgattaattaatgatgagaacccaacccattcctaaactaaggccagcattcatataagacaaaaatattccttaagcatatctttaaaaatactaaagtgttaatagttctaagactcctacaggtaatagaaatctttaaaaatactcccttcaaaagcactaattagatcagctctgtgaccgtgattattattattttaataaattcacctcaaaatacttatttaatgttattcttcaaataacttgtgtgaaagaagccaaccataccatttagacacttaaaaacaatagatattataacatctaacctgcaat

SEQ ID NO: 238274 - DNA, 787 bp, Cannabis indica
tatgacagtataaaagaaaaaaaagagggggacagtataaatgttaattctgccgtgtggcagtaaaattgaaaagtattaccctaaattcagtatttttgtaaaatgcccttagaaaaggagaaatttgagttgggataagttgaaaattattatatttattacactttaactaaatataactctaaaataattttaatagataaataccatctttaataattaaagtactaagtataacctcaataacttattcaagttagaatccataacatacataataagaaaatgattgataaaactaggtataaattaaaaaataataaaataaagataagaattaaaataaaaaataagtagaaagtttaatttcctcgtttgagtttctatacataataggaaactatatttagaaaaaaaaaatccctaaattttacactatatcagaactatcttttttttttctcgtaataccaaaatattctttccattctgtccatctccctttctttctttctcttacacaatatccttgacgccccaatccctctaaaacaaccaccaccccacatcttaggcaacagtcacctccgctggtgcttttcaactccaacgtcagcccagcgccccgcagcccattctccctctcgatctatttattatcggttaccccgcggtcttcatcaccgtctttatgagtatattctttagttacaatatatatatatatatatatataatagggatatgagtttgtcctgttattatactttcacggattgtaatc

SEQ ID NO: 238275 - DNA, 942 bp, Cannabis indica
attgctctgaagtcgaccaaggcggtcggccaagggtggcattgtaggcggtgggacagtctaccacaacaaagctgcagtacttaaaagtgctttgtggggtgttaggacacagggtaacggggagccttacttttcccattaggatgagtgtcatcccattgaatcctatgagctgtgagccgctaggtgacaggtccctgtcaatgagccctatggtcatgaaggcttctttaaataatagatttacggagctctagttatctaccaatattctagccataaccttattggcgatgggagtttctataactagagggtcatggtgggggaaacgcactagtttcgtgtcttcttccgtgaaagtgataggttggtccataagtctgggtctttgtgactgggagttgagtgacctcccacacttcatcgtgttttagggctccagtgtaacgcttcaactcgttcctggtggtttctccaatatgaggcccaccagagatcatggccactcttccatactggtgcttgctgatgaagcgcccctccgggaggtacttgctcctcgagcataccccctgttcctccctaaggcaatggggctcccattggagttgggtttaagtgcggtaacctacttttgatctattcatacaagtgatctaatcagattaggttctcaattttgtctttcaggtttttacacttgtttgtggtgtggtcaatgtcattgtggtattcacatcttttattgggatctctccgagagctgtccctgtacaagggtggagacttttgataatgtgtattttcccagtgctgaagtatacacgctcttgagtatctataagctcaatgtattgtatgtactgggggtataccccctatgctgtcgcttgtccttagtccgggtactacgccttgacgatctcttactccggg

SEQ ID NO: 238276 - DNA, 930 bp, Cannabis indica
ctatactttcttcttttggggttcttatagaaatttatcataaacttcttgcatctttaaataagattttcttatttaattttttactaaacgaattgctaatatggttgttcatagtcttgatggagcatcttagttttttttcctagatcgagtggttgaggtacaatcttgttttttgactgatttaacaaattaataaaaacttctatatttgctttcaaaaaaataataataaccacgtgaaaaaattctattatttgatccagtaagaagttaaatatttgttataaataaagaaaatcagtaaatttgtctcttttaattaaaattaatatagaatgttgatctatatataatacactggtaattaaaatgattattctagtacatgcactttatgggtttgacatttaggagtttttaaatttaatttttttataatagtgtgtgtgttatacttttttaaggtaacttaaaaaattttcttaaaaaaagtaaaatttaaatacttaattataaaatatttgaacaatattttcaatactgtaaactattcaaaattttcaaaaaaatattatatatctaaagggcgtgtttggaagtcattatgtaattactatgtactctatttaaaatacgaggtgtatttgaatataaaatggtaattatatgaattcttaatattttgttcagcaaaatagttagtaatacatacttaggaaaataatattttttagtagttaatatttaaattgaattttttttaaaattatacttaattctcatggggctataaaaattgaagagtgtgattggaatgagctacttggggagtatgggggggctgtagccctccctaaatgttatgtttttgtggatttttatatatattaattatgtaaaaagaaaatatacaagtttaatcaa

SEQ ID NO: 238277 - DNA, 735 bp, Cannabis indica
aaacccggtgatggttcagaggtttggattaaaccggctgaaggtatcaagttgaatgtcgatgcagcgattttcgaacatgatctcaagcatggcttcgggtgtgtgatcaggaatacaaaggcgagatgatttctgttttttctggtgctaagcaaagcaaagttgcaccagaaattgctgaaattatgggcataagagaagccttaagttggttgaaaaatcacaatttctctcatgctgctgtcgagtccgatagtttggtttgtgtggatgctattcgaagcaatgagaggctccattctggtttcggatttattgtggaagagtgcaagtttattcttcaaaatttgttaaatgttactttatgttttgtcaaacgttctgcgaatcgtgccgcgcattttattgcccgacactctttgtccctagctgaacgtatgttccctattaatagtgttcctttggagttgttgtctatccttttgggcgatagctcttcttaataaaaacacttcttttcaaaaaaaaaaagagagtaaaaattaaatatttttaacgcaaattactcttcaatttttaaagaaacttgaaaaaggaaaatttgtgtacaacaaataattgaccaaaagcaaaaaaacaaaaatatggaaatatttgtacagctaagaatatttcttacaaaatagtgtaataaatatttatttgtagtttctacatgcatttatttcattt

SEQ ID NO: 238278 - DNA, 687 bp, Cannabis indica
gtagctgaggctaaggcaattttgcaagcactacagtgggcctcctttattcatctccttgttgatgttcttaaaacaaattgtaaatctattgtagataagttaaattcttgtaattggggctctagtcttttggatgatcttctattatgtattaagaacttattatcttcctgcctaaatcaaagcttggtgcatgttaaaagggagtctaacactctagctcatagggttgctaagtggggttttgggcttgataatgagtttttgtggaatggttctttgccttccctttagtcttgtgtgtcttgtatgattcctttgtaatacacaagattttatttaaaaaaaaaccaacaattatatctcaaaaaaataataattgatttattaatatttatattaataaactaataaaaaattaaaataattagataattagggagagaaaaatataatttattacataatagtaaaatatcaatttatagatttattaaataatagtaaaatatcaattagtagattatttatgctttaataaaatattaaaattgagagaattaaggaaagaagagaaaaatagttttgaagtgattttagaatgacatgtcaccgttgttgtaaatatctacaggttaacaacaattaactctcaaaaaaataataattgatttattaatattt

SEQ ID NO: 238279 - DNA, 1512 bp, Cannabis indica
taggttcttgagaatggaatgattcaattgatggaagcctgttatgttcgaccttggtccgcagatttcaatgtgattaggttggtaaaatcggttccgctttggattaggttagctaaccttggtctccaacattggggaaaaaaacattgagtgctattgttagcactttggggaagccgataatagtagataagcacaccaaggatcgaacacgagttcaattttctcgcgttcttgttgaaatggacatatctgataacccggatcgcacttgctggtttgttaatgaatatgggcagttggttgagcaagaaatagaatatgagtggcttccggttaaatgtaaacattgtggtggatttggtcatataatggctgaatgtaggaaggttgagaagccgaaagaggaagctaaagtgaaagaaacaaagcaagtaacagagggggctgctactggggttgtgattgcagccgatcaagttactaatgttgctgctacagttgataatgttatggcagaggcggttcaaggtgttagtactacaactgaaactgaaagtaaagtctctaatgatcaggataatattttaagcttttatttaattttttccaactctcctctctaatttgtataattcacactatattgcacaataagtgcatgcctagtgttctcatattgaatgagatcatttacatgcatcttatactattttttcttatattttttttatggcaatatttttttttatacttttttttttattattattattataactgtcttgtagtgtcttgatttgagcatttattaaacaatttttattatttttaagtgtaataaatgtatgatgtgattttgtattgtcacattagtggcaactttattttcttttaactaaaatattgtattatattttagagataatataaatttataatttgactttgacagattttttctttctttaataaaaattgatgataaaaaatttgataccttaaatattaataccctttcatttcactttaatcccacttttccattattctctcttggtcaaatcatctccatctctttcaaacttctttttgctgctattaatatgtttcaagctctgattttaagttgttcttttcttcttcttctccttcttcttcttctttttttcttttcaaactacatcaatataaaaaattagatttgaaagttttataagaatattattgtagtgtgattctttattgttgattccacccatttgcccacaaatttcgagaaattttttcttcttctgtaagttgagttttttaattatatgtatataaggtcataccttccatgtgtttgacaaaatgcctaacatagttaatattctttattagcctaaagaaagagggcatcttcaattgtgctatttattttttcatctttaagttaagcttcttcatgatattattattatttttttattttgttgaactaaatttaatgaattagtaatttta

SEQ ID NO: 238280 - DNA, 889 bp, Cannabis indica
ataaaatattcatttatcagaatcaataatattatttatttccttaattagaaatattctaataaagatctgataaattggtcaggaacgtttgcgacaaagtataactaactgagaatccagtctatacccagtactctagtcatactgatgtggtagcaattaattcatactatctggaggcctagcttatatatgttggtatctctgtacacctcgctaatgccatgatatgctaatctgatggccactgatttgcctaacatatatttggtggtacctcggtgcaactctatgtacacctcgtagcccgtaggtaccctgatatgttattctaacagcaactaacatgcacaataaacatgtatacatagatacaaatcattggcataggcacaaagttttaatgccaatggcgtaggcacctagagaatagtcaacgcctccaggcttggagcaattctctcaaagtcctaatgccaatggcttagacgtaaagtcataatgccaatggcttaggcaaaaagttctactgccaatggcttaggcaccttgagaatagttaacgcctctgggcttggcacaattctctcaaagtcctaattccaatggctttggctcaaagtcctaatgccaaaggcttaggcacaaagtcctaatgctaatggcttaggcacaatgtcctaatgccaatggcttaggcaccttaagaatagtcaatgcctccaggcttggcgcatttctctcaaagtcctaatgccaatggctttggcgtaaagtcctattgccaatggcttaggcacaaagtcctaatgccaattgattaggcacaaaatcctaatgtcaatggcttaggcgcaaagtcttaataccaatggcttaggaaaaa

SEQ ID NO: 238281 - DNA, 856 bp, Cannabis indica
atatttatattttttttattattaacaaaccacggaaaattagagttttttataaattacaagttataaaaatatagtttatattatcataaattatttttatcagtataaatttataatgtaggaaaaaataattaaaaatatataaaaaatttatacaacatatttttttatatagattataattataataaattagattataacattctcattattataatagaatcttaaaaattcatagcactttaaaatatatttactaaacactcaattcagtttttttctacagttttgctacaactgttttttctcacagtacaacttcaactgtttttcccggagcacagatgtgccaaactggccttaagtgtatgataaataaatgtgtaacctatagttttaaactacactttgtaacgtacatgttgtaacttggagagaagttacaattcgttatcacttgtaactcttttgttgatcacacataattaatgtaataaaataattcttacacaatttgatttaaagaatttaaaattatgatgatatagttgttacaaaatggattaatactcatttatgtgagagaaatgaggtgtggtgtgtttgaattctaaatgcgatcacttaaacactataaaaataggtctttggtgctcatttagaatgaaccaagttttctatcaaacaccattcatctccactccaggtatgatattgttcactttggcataagtcctcacggttttgttcttgggcactgttaggctatttttagcctatgttttggatccaatttatgtgcattcttagctgtgttgggacggaattacgcttgttttctatgttttca

SEQ ID NO: 238282 - DNA, 1943 bp, Cannabis indica
atgaagttagagaaatcaaattcacacctttgcatttttgatttctagttcacctggaaatgaagagttttgagtctctcatttccacaaaacaacatctccgagatggtccgattgatcgagtcttgcaaagcaaacgaaaagatgagacaaagtgctagagctatggtgtgaagggcgaaagaaaatgtgaaacttaaaaggtgatgaatatcgtgggtatttagttgaatacaaggaggggtgcaaggaggggtgccttccacgagaagtgaagactcagatcattcaccaaaatggtatatgaagatctgacggatggggagctgagaagatgcatcagatctgaacgtttaacatccatcataacatgcattgtgaaaagtacttattaaatgaagggtttgctcaatcggttcgtcgccctttcggtgtctccccagacacacaccttgcaccgcaaattgcaagagtcggcatttaaagtacagccagtgtactacgagaatgatatcctctaccaatgacacatcaactgacggctacttgcacgacatactgaaaaacttgaagatatttcacatgtcaaaagctaatcatgaaaaagtgaagaaatactacaagctcccagaccgcgagacgtcctagaagcttggggataaatcttgtccaaatttttgtaagcttgacatgtggactctaactaggaagtctagatgacaattggtcggttagcgcctttggccacagttctagatgggggagccccagctctcaaaaagggcttctgcaaaagagtactcttatgcaaggcaaggatacgaggagcattcgtaattcgtgatctttccaagtcccggaaactaaagccaaatgccccgtaatgtctaggagtttcctcaagcactctaatacgggtcacaaaagaattcaagatgagctgtagccccgtttagtgtcacggggaagctctggtcatatgtggtagattgcagacatgacaaccatgctttttcaggtacgacgccaagttttgtcccccatgttatgccgtagtacagagcatgcacgcctcattgtacctgcccgagttatccaacggacatcgataaggccaattcaaaaagggaagaccctggagagacacgtgtcaggtgatccgatagtacaagctgactcctttaaatggcatgtgatgaatcagccacctactaaatcaacaattggattttgccttgcaagatttgcccaacaagcacatgaaatgagaaatggcctgtaaatacccatgcattccataagacaggggcgactcttggaagctaaacacactgttgaaaattgactaatgaatcttatctgtgagtatggcctcgaggactagtagcaatctgcaagtgttatcccatttttgcactatgacgtggcaacacgtacgagtgacacgtgtcaaacattccttgcactttggtggagatgaatatcccgaacatactttaagtagcacatatgcacgcacaacgtctacttacccaagcagggtaaagggtagactacccgagcaaaaagcaattttggttttccgagctatttaccaggacttgactacttcagaattgatatcgtggagtctaagcaggaagataatccctgcaatcatgggattgaattagagggatacggtaggctgtctcaatcccctattttttatattctatttatgtaatgaatgttccttcctattatagacattgtaagaaaaaggaaaaccttcctcatgcattaaggccctataaatagtgatctagcttcattggaaaggggatcgaaagaatttctttagagagagatctaagagaattactcagagatttcattgtaagagctttgagagagaaaacactgtgttctttgttctcgagttaatacaatctaagaggagt

SEQ ID NO: 238283 - DNA, 598 bp, Cannabis indica
ttatggagttttaggggtttgattttcgtgtttggaaaaattttgtggatagagttcggtgcttagttgggtagtacattgtatcatatgcaatatatgcaccatcaatgaaaaccaatgcttggatcaaaaggctgatttttctcgagtttctaaagccatttataatagtttttacgtgaaaatatttgatgaggactctaaattagtcccttagcaattaggctctatgagaagttctgttactgttagttcacattctgatttgatatttgaaatttctaaaccattgattaagtgaaagcttgagcttttttcactctcttgatgttttctggttctgctttgttaaagtaaataaaatactaaagagttccattcaaaagaatactaaagagtgacaacaaatatttttgattgagtttgcccatatagtgtagtgtataactattgcaaattctcatatttttctgtttacaagtgagaatttatcaaactgtgttaactgagtttcatggtttcatgggattactttgacttagtttatattgaaaaagaaacatttgtccttcttgtgacttgggtccctaaacttgtt

SEQ ID NO: 238284 - DNA, 767 bp, Cannabis indica
tagtaaataataaaataaaatattatttgtgattatttaatgttttaaactgattcatttcttcaattgattattctggtttcaattatattttagtaaacgtagttgcaaataaatacttaagtttaatttttgatgttaataatacataagctgtatttttaaaacttctataagtatcattctgttaagatacatgtgtcgtttttttaaaagtatatttaaattaaattttaaataacaaataaatattagtattattatcgttaaaaattaattagttattaatttttttttaaatatttatattacaaatttctttataaattaattaattattatcaccctatatttatatttatttttttaataaaaaattattggatttaatatttaagtgtttttccctaaatttactattttgtatctaactttcttgggtagcttggataatttttttaaggtgtctaatgaattaatttgaatattatttggttaaatattagcctttttttaataaaaataatccgtacgctttattatttatttttttcctccaaaccccatttagctaacatcatatttggtttattgtaatgataatcgtaatgaaatcatgattattattataattataatgtttagtttgctttaaaaataatataattgaattacaatataataatgattacatcatataagataattttcattacattgaaaagactatgtaacgaagattacatcacaaataactaaataaagta

SEQ ID NO: 238285 - DNA, 2085 bp, Cannabis indica
ctggcaactcactgtgattttcacaccattagagataattaggcgcaatataaatggcaagaaagtgtaacagtaaataatgaaaatgttgaattctaaaactaaaactaaacatagagaaaaaaggagagtctgtacagagtatcacaatcctattacctgacatcaatgatttcaagcaatttgttctgatatttgtttccaagaacctaaaaattcccccaaaagaacacagaaatagtaccacaagtaagcgagctgatagattactatacatcaaagataaatattacaagcaacttgacatacatgaattttggaagtcgttttgggatctagaaaactcttcacagtgttccacagcagtctaaatcctggaccagcattgatgataaacatttggcatagagtctgtatcattaaaaatgataaaggaacttcatatttatacaaaaatataatatccaaagcttatgattaaatttagcataagaaccaagtacaacattgataaaaatcgagatgactgcagttacatacctcgggatagttgtctccatcaatcttctgcagacgcatgattagttctcttgcagactttgtaaagttcttcaaacccttattaacagaaaagtaaaaatggaaagagcatataaatagatatagtagttcaattgtagcaaatatgagtagcacagacaaatggttatatgcaacataccacgccttgaacatctaatattgtagtgcttgaatctatgtgtttctttgcagcaatagtacaagctggaaactttgtggcaaaagtttcctcaaattccttaacatggtactttacataccggtccatagttgtaacttgcattagtctattgggatccacttttcccaatctttcaatataaatcggtctgccctccttatccacaccgtgatgcccatgggggtaatacttcaaaacttcattcttctctttgaagtcaaactcctgaaaggaatatagaaattagcccacaggcacttcactttccaataacttcaaattcagaaaatgaagtcagctgcaattacctccctgatagtgtccgcaccaaattcccttctccactgaagcatttcagcccacatatgctttgctttctcaagatcaaacttccttgctttcaagaacctgccaatggtataatcccaaagtacattactacttgcactaaaaaattgaaggtgcaccttttacttaattgaatgcatgaatggccaaagtcaatgaagaaaagattccaaacctcagcatcatatgataatcatcatgtttttcaggtagtaattcatccaacattagtgattgtcgaaattgatcgacagcctgtagctcttcagcatctcgaacatcctcaatggaaacagagcttactcgcccgtcacttttacgtctactgctttttttcttgagggaatgcttaaatttagtggaagcatttaaagctttctttttcaaagacccgattctagttcttctttcatcctctgagttttcaaagtcagacttcctttcttttctctcgtcactaccagaaaacccttcaaagcctgccaggtaataataatgctaaattaaacaacagaaggctatatacaacaaatcctacaaagattccagtgaccaataaaagcaataatcttgacaagaattgaacctaattcaacaaagaaatcgtcaaaatagtgttttctctgaattttgacattggacaaattgagacaatcagatattcaggtaaggtacattttcaattacatggctcaaaaaggtatttgggtaaatattcaacaactaaaaattggcaaaatgaacacttaacatatctctgatctgttcccccaaaagaacagaaacaattctaaacctaaaaggcaaaaccccccaaaaaaacaaaaaaaaataaacaccaaacgaagtagacatccggtttcgataatcacattcccccaaccaaccaaaccgaaaccctaacgaaccacaaaagtaacacacaatcatgaacaaaacccaactcaagaagaagaatacaaaaagactaaaat

SEQ ID NO: 238286 - DNA, 1146 bp, Cannabis indica
gatggcgcctacgatccaacaagggacataccgatcgtgaagttagaaaatcaccatcttaggcgtcgattggaggaagaaaattggcataatgtcgaattagagcgtgaaatagccgcagtaagggcaacgcaaaggaatagttcccgaaatcaacttgaccttggaagaagagatttacgaggcaaacctcgcaactcctaaaccaaggggcaggagacaacccagagatataatctcaagagatgtaacttgaggaaactgaggaaaatctggggatgtagcctgggatatgtggaacatcggacggaaatcgccaagcctctcttcaagctcataagaaaggaactcacactaaacacctatagggggaagaaggtgaatcaaaccttaagaggaagagcaaggttccaaaagaagcaacgacaagagtgacctatgagaacatctgaacttgagaaaacctgatcctcatcaacaactcggtccaaaacaaagggatttactgcatttgtgaatggacaagttagagaataagttcagagagcatcaagtcgggaaactcggaagccaatcgggatatgattctgttgtaagagttcaagtcaaaaagcctcaagatcaagaaggaaagaaagattctgtaaaggctgcccaaaggataggtaaacaaaaagaaaacgcaacaaaatataatccccctttattgctgcatataccgagctcaatgacactcaagaaaatatctacctcgcacatgtacaggaaatcgttttcagcgagctaaagcctatgaaacatgcgaggcttaaaagggacccaactaaacggtgtgaatatcatggggatattggtcataccacgaaagagtgtcgtcagttaaaagatgagatagaaggtctcataacgcgaggacactttcaatgatatgtaaaggggcaggacgatgcccatgaatcagctcaatctgcccagtaacttgagcgaccaaggattataactctcctctgtaggaggaagggacacctcggttatctcgagagggagcgagtcacaagaatacaaggggtagttaatccggtatagcaattttgtaaaagaattgcgacgtgagtagaaatctgccaactatggttgccatatcaa

SEQ ID NO: 238287 - DNA, 809 bp, Cannabis indica
gcataaaacccaacaatgtcaacctgggccaattctaaggagttttttagaagagtcttctgaccatattatcagttttcgtcaaagattaagattcaactactttcaggaagcaaatataacttctaagaggcctaaaactagacccatcgcacaggttgatacctggtactgggcccaacatctaggttgacatattgtcaaccttggctgtttccaatactgtttccaaaaaagtgttctgggcatttttttttgttttcggaaataacaaagttataagtgaactcaaggataaaatgtcagctacaagggtatgaaaactgagcccaacgccgaggttgaattggtgctaggcccaacgcccaagttgacaatcaacctggtgcgctagtttttatcactcaaatgcaaattctactccgacaattctttcaaaaatggtaaaaaaaattaggataagagaccttgtcatcaagttcaataaccttggaagtgtcaaaaaatcatcccagaagcttgaaaagaagcccctagcgccaaggttgacatatggcctagtgcgttgggttctgcttatccaattctaattatttctcgaacgctcatctaattttttataatgattgagagctatgaagtcaaaagagtcaaattcacaacttcttattttcacttttccgacaaagtcacttattttgaaatcggggagttttgagtctcccatttttgcaaatagcaacatctccaagaaacgaaaaccagcttcaccagaacacaaaaactggctaagtgatgtccaaatatca

SEQ ID NO: 238288 - DNA, 911 bp, Cannabis indica
gtagttcatcttcttcttggtattgttggtagaaaaagacaatgaaaggtcgtatgttctgtctgatttcaactttctcagcatcaattaatctgtcttgaaaataccagatcaatgcagccacaagccacaatgacccaattaaattagtttcacatttttaataaaatatgtttataaatttatattggcatccaaaagaagcatttgattgataggttgaaaccatacttctgaactttggagctattagagcagaatgtaagcttaaaaaggcatttgcttctaattaattcatttagaaaataaccatagcattctactttactgcgcaaaagaagtagaaaaattatttaaaaagaaaaaccaaacatcaaggtgtacatttttcaagagatataacaatcaaaatcatatagcaacggaataatattactagaagaaccatcattggtatgcttaatcaaaaacccagattcatctttgcaaactagataataatcatttgacttcaaaacttcctattccaacatttaacaaaatgaaaatcttggcgaaactgaaaaccatctaagaacaattccattgcaggagtaaaatgttacacacatcaagcattcaaaccattaacctaaatctcacatcaaaaaacagcgatagtaaaatccaaaaaatacaagaaatctgagagtaaagttatttcaaaattgaaatgtgaaataataatcacctggtccttgtgtgatcgtgatcaaggagttgccgcaatttcttgcctcagaccaggaaggaaaacttgccgtcgagttaaaaagagaaggatcgaggtgagagtgccagccactggctcagtctggcgagagaggtggtggagggctttaaggctttttctttttctttttctgctcatg

SEQ ID NO: 238289 - DNA, 1835 bp, Cannabis indica
agaacaaacatctatcatctgatacaatatgatattgagcaaccttatccttttgttttaagtctattcagcaaagcaatccacaccacaaaacatgcttgggaatattgagtctattccaagcatgttgctccaatggtaatgattttcagcctgattgtacattttgtaacctacagcaatcatatatttattattgataaagatagcaggatcaattcgatttttgagctcattcttgagttcaactaagcagctttgttccaatcaactatactcaagaaaccgatccctcctgctgactttggcttacagatcttagccaaagcaatgtttcctgacccaatcatttgacttgcacctttccataagtaacttctacatataccctctatttcatgaactacctttgttggaagaagcaatatttggctccagtaagtatgtatggtcataagaacagaactaaccaacacacttctccctgcgaaggacaaatttcgagaactccatgttttaattcttccactcatcttttcaataagtatcttgcactctactgctgaaattttcttggcacatataggaattccaagatacttgaaaggtatctcttgcttagtgaaacccaagacattaactactctttgaatctctttctcctccatgccactacaatagattgccgatttgctattattaggaagcaaaccagaagtctgagaaaacatcttcaaaccctgtagcatgagatgaatactgctgaagtcacccttacaaaataataacacgtcatctgcaaaaattaaatgtgttagcttcatggacctgcatctttcatgataaccaaattccttcttctttcccactactcccattattctgctcaaatactccattccaagtacaaataggagcggggacatgggatctccctgccttagccccctcttggcttcgaaaaaaccatgaagagagccattgaaaagagggagaacctcggggtagacacacattgcatgatcaactgtataaacttcttaggaaactgcatagaaattagcatctcctcaagaaatccccactcaagtgtatcatatgctttctgaaggtctaatttaatcatacagttgggccttgaatgtttccttccataatgccttagcaaatcttggcatatcattatattatgggcaatatatctaccttgaacgaaacctccttggttctgagcaaccaaatctggcaatatatgcttgagtctactacaaattaacttggtaataactttatacaagacattacaacaagctatgggtcgaaattcactcactttgttagggcatttgatcttcggtatgagagtgagcactgttgagttcacttctttcaatatctgccccgattgtaaggctgataggattgcttcagatacatcttggccaaccaaatcccaattatcctgaaaaaaggagctgctaaatccatccggaccaggggctttaatccctgggatactaaaaactgcttgcttaacctcctattttgaataatttccttcaagataaatggcctactgactagaaacaaccgatcccatctccaccaacttctttttgacctccttcctatcttgcattcgggttcccaggagattctcataaaatttagtaaaggcttcagtaatctcagcaggatcttctactctttctcctctcatgttttgaatcgaggggatattatttctggtccttctttctcttatgtatgcatgaaacattgcagaattaatgtctccatcttttaaccatgatagtttagccttttgttgcaag

SEQ ID NO: 238290 - DNA, 916 bp, Cannabis indica
tagatcagatcgggaaagaacgatccatttttcagctgcaagagattgatgttgtggagagaagaaatcgggttagagaaagtcgtcagagtattggttctattattactcagccacatgtgtatgggagagaagaggacaaagagagagttgttgggtttcttgttaatgatgccatcaactgcaatgataatggtacttctgtttactgtattgttggtttagggggcatgggaaagacaactcttgctcaattggtcttcaatgatgaaagagtcagtattcattttgagctgaagatgtgggtttgtgtttctgaagactttgatgtgcgtagattgatcaaagctatcatagaatctggaactggatgtgcttgtgaagcaatggagatggatcctttacagaaacgacttcgggacatgcttcaaagaaagaggttcttgattgttttggacgatgtgtggaatgagaaacatgatgaatgggacaagttgaaatatgtgttggaatgtggatcaaaaggtgcttcggtagttgtgactactcgtttgaaaaatgttgcatccattatgggaacaacaccaatgcatcactacttgactggtttatcagacgatgattgttggtcattattcaagcaacgtgcattttgtaaccgcagagaagagcgcccgaaccttgtcgaaattggaaaagagatagtgaagaagtgcaaaggagttccattagcagcaaaagctttaggaggcttaatgcattccaaaagtgaagaagaggaggtgtggctttctgttatgcgtagtgagctttggaatttaccagaggataaagctcccatcttgcctgctttgaagttaagctaccgtcatctttcagtagagcagagacgttgcttctcttattgtgctatatt

SEQ ID NO: 238291 - DNA, 1221 bp, Cannabis indica
ctccgtctcttggcccttagaatttaaaccagaagggtacaatttttggacttggaagggttgtaagattaattattgtacaaggtgaaggctcgccggttgttctcattcatggttttggtgcttctgcatatcattggaggtttagtacttagtactcatcttactattcttcccttgttccaaatttctaattagattgctaaggaagtagtgtaaagttttgagctttacgtatgagattcagatatatgtttcatttacttactttgatgatgaaaataattaagtaaattggcacgtggcaatttttaattggtccaagtcattaaatttttatttttttaaaaaaattaattaaaatataccaataaaaaaatgacacgtggataatgacataatattttaacggttaggtacctaaagagtttcaaaaatataacttaagtattattaccgccaaaaattaaacttaggtacttatttgcaactgagagttaaacttaggtatttatgctgcaaattactctaataaacaataaagaattgaaactatttgcaccagtcaactaaatgaaagaaaaaaaaaacacaaaaataaaaatgattgaaataaactcacaaatataatcaaaacaacacaaatgcataacaatgatctaaaaaataaaatataagtgtgaaaactagtttcgaacctagaaacaaaataataataaaaaaatatacaataatatcataaaatgaagcaaccccattaaccaactcttaatatatatgaaactaattttttttaattctttattacacaataattatatcatcataagaaagttatatttgaaacaaaaataaagaccaacctacaataacaatctttttattgatgaagtcaatggagaattttagtcagtttaaaaactgaacaagaataaagcactcaacttaagcaattgtcattattatcattattaagatgatgtaaataagaagggacactgttcaaactggcaattacaactttacaagtaacttagttggttttcctattattccctaattcaattcaagtttcacaatcatctccaaattctaggttactcatataggaaatcagatttttgagacttaaaaaaaattaataccaacaaactcatgaaactcttcaattttgacagtaaaaaaaaaaaaacaaaagcaaaagaaggaaaaactattaat

SEQ ID NO: 238292 - DNA, 965 bp, Cannabis indica
tatttgggcccctaaaatgagtaagccctaggcgcgagcctagcccgcctatgcctagggccgacccttattataatttggaataaaattactaattttatgtaataaatttacaaaatatatatatttattaagatgtaattatttttatatagaggtatactttgttaatatgagacttagaaaatgtataactaattacaatttagaggttattcttatttataactagcctaaattagaacttgattttttttataacaaattagaggtacgttattcgtaaatagagtattcttagatagaggttctactgtataagttaataagaggtgtttaaacctttttatttatagttatttatcaaaattttttaaaaacttaatataataaaataaaagctgagaaaatgaattaaataaacaaaatagagaaagaaatttttatgtggttcagatattaatgaaccctaatctatgagtcaattgtattaggctaagtagcattgaagtattacaccaattttcttgacaaacttaagaacccaatatttttactatagtgtttaagtaataaattttcaaccttttgtatgaaggtataatgtagtatttataggctaggatctaggtatgggtatactcgagacccgctagggtttgcgtgtaaacatgacccactgaataaatacatataatacactgactttgagcccacgagttgaggcccagcccaggggactgtgatcttcagtacgatgggggaccactttgatgtcgacaggtggcatgcgtttgccgcctctgtgtattgtagctatcagagtagtggtcgccagacaaagcgtatgttccctttggttgtgtgcgcactcttatggactgacgcatgggaaaaatccctgacattgtaggattcggtgttagaggattgccacgtcagctttggctttcgagacgtctctt

SEQ ID NO: 238293 - DNA, 580 bp, Cannabis indica
ctcgcaatagaagcttctttggtaatattttctaatcaagttagtttttccttatacagacaaatcaatttcttttatgtatatttttgtgctatactagagtaataatttttaaatcgagatcttaaatatcccatacgtcatcactttttcttcttagtttgagtccatgttgataatgataaggacgaatattggtatttattgattttcattaagtcaattttattttcttcttatttgattttttggttagaaaaattgcttaacaaaaaaagattaaattgttaattaagcaacaatttaaatagagcaaatgaatagttcaagcaagatttctattttccatagaaaaaggaccggctttgaatattagcctaataactaaaccaacgaagcaaaataagctaaattatatcgtggaaattttttaaatatatgaggatcgagttttagtagaggactaggggtaggccattaaaatatgttaatacatctataatcgatttaacttgtattttttggttaaatgtatgatagatcttacttggctgttcataaatcatataaaagccaaaat

SEQ ID NO: 238294 - DNA, 1020 bp, Cannabis indica
aagccgataagtcgcatggccaacctttttagtgataaggtatggtccgtcccaattgtcaccgaaaactccatgtgctaggtttttcgtgtttggcatgactttttgcagaaccaaatcccctactcgcagagttctctctttgaccatagaattaaaatagcgaccagtttgctgctgataggccgcattcttcaaatgggcctgatcgcgtttttcctctaaaaggtcaagttggagcaattgcttttccgcattttgactaatgttgaaaacatctctttgtagggaccctgccccgacttcgactggtatcatggcttcgcacccataggaatgcgagaagggagtttcgccagtcatggatcggggggttgtattatacgaccatagacctgcggaagctcttctggccatacccccttacgctcttcgagttttcccttgatggtatgcataattattttattcacggcctccgtttgcccattgctctgtggataagcaactgctgaaaatgcttttttaattcctaactaatcgaactgttttccattatctcagattagtttgtaagggatgccaaatctgaaaatgatggaagtatacacaaattcttgcaatttaacagttgtaatagtcgcaagggcttttgcctcagcccacttggtgaaataatcgactgtgactacgacatatttgactctgcccttccctttgggtaattctccaatgaagtcaatgccccagaccgcgaagggccaaggactcgttatggagtttaattggcttggagtttggttggcatacgtggctatccgctaaaatttttcacatttcttagcgaagtttgaggcgtctactcgtagtgtcggccaataatacccttgccgcattatttttaatgaaagggaattacccccggcgtggttgtcgcagatgccaccacgcacttcgtggagtatgtaatcgcactcggctccatcaatcatttgagcaacggttggctgaagcttctgc

SEQ ID NO: 238295 - DNA, 1653 bp, Cannabis indica
cgatgaaaattattgaaaaaactgagcacgttacaagtaatcttgtcatattagtaaatctagttattcaagttagaaccgttttagtaatccatgtatatatcccatgttagtttggttgtatggtattttactcgttattccagtggcatcatatttctttcttactttttcctccgttttttattattaatttttaataacaatgtatctatatatatatatatatatatatatactaagtaaaaagttagatgcgagtcatcttagactaaattttatgctaagtattttctactttatttataagtgatacaattaaaaagaaaaagcatactctcatcataagagtgatcgtcgccttcctccgctcatgtctccataaagacgaaattataccacatactatatatatactatatatgaaagatatactcatacatgagtatatatatactatatatgaaagatatactcatacatgagaatgttaataatataatttcaataacataaatgagcaacaatcactttccacgcaagaatttgttcgcaataattgcttctttatcttcttctgatacaaaaatactttatcaagaaacacaaagaccttaacagttcattattttattctattattatatatacagaaagaaaacccaatttcttgacttacaattttaccactaatgcaactgatgatcaaaattatcacaacaacttcaattgaaagcacatttttttttacaaccaagtgaaattatgtaaactatattttaactaacgatgtgatttcaaaactattttttaaaaataaataattaatcaaaacataagaatttataaactatgtcaaatagactctaaaacaaagaaataataatccaaaacatacttaattaattacctttattgtccaagtcagaaataaaatgaaagaactgataatgtgaaaagaacccatttttcataaccaacaaatcaaagatcacccaatagacttttgagtgcaattttttttcatcatatgtaaatgaaaatgaaagaaaaagaccttgtaaacattagacaaaatgaatttgcacccagaattgatgatgattccatggattgttgttgtaatggctgaacatgtggttcgactctattaccaattttgaagcagtgttgttagctgttaacgtggccgtggctcgtctttcctcttttttttgattgaattccacaagcattgcaaagtaacttttgaaatgaccaatataaaattaaattaacctctttaattaataaaaacacaactaattaatcattattaaattaattaattaaacacttacctttgggcctttgggccgtatcttcaaagaggggtagaggtagtgtcacagttgaggcagcgccgagccaaaagaggatcattggcggcggcgttgttgcaactatttaggccgttacaaccagtgtatttgtgatcctcatttgctgtttgttatttggctgtaacaattcccaatagaaattcgaaacatgagaatcgtttcatcgtccactatggcacattctttgctggtgtttgttgttattatcattaggggtgttcatgttgggttttatgccctaaataaaattcatttcaaaataatcagattt

SEQ ID NO: 238296 - DNA, 655 bp, Cannabis indica
tgggaacactaagtttgtgccaggcagaaatatgacactctatctcaagcaagaagagaaaggtagaaatgttttactttaaatcgcccttgtctctcagcctccatcaaggaatgatgatccaaggaattcctcagcttaagcagctttctaaaataccagctaaagtcacttttgagagtaagacaccaaaactcctgatccttcaagtagatatcattaatccatctcacccaagacagtcttgtttcgttaagagagcccaaatgtacttagcaatgagagccatattcaacttccttccttctctaaatccaagaccaccatactttttggataagccaaaacatgctcccaagaagcaagatgaactttactacgatttcctttaacaacccaaaggtaatttctacaaagtttgtcaatcttagttgtcatcttatgaggaaggataaatatgcccatctagtagtttcttattcccaacaaaatcaaatgaatgagttgagctctgccagcaaacgaaagatttctactagtccaattatggagtgtcttctaaatcttttcaataatccctccacaattaattgctctccacttaataggtctcaaatttacaccaaggtatgtcaaaggaaaggtaccttcctcc

SEQ ID NO: 238297 - DNA, 1084 bp, Cannabis indica
aatctagaattgacagcttgagatagagagatattaccaagagaggaatccttcataggctgcttgcctttcgcagcagtagatgccttggttgcgaaggcaaggaggtgcgagcagatttgggcaaaggaggctcgggttcgagttcagtgtcctcataatcagtggagactccaaagtcttcaggaagctctttttcagaatggatagacttggattttgtctcggatcgaagcaacagagggatcctccatgggttcttcttcttcagaatttgaagaaaacgaggggggattcaatttcagcttcttggctagaggagctagtctgtcatggcttcgtttcgtgcaaagttccttctcgagagttgcttgctgggcacgggtgcgagaggaaggacttgttggagttgatgcagcaacccccttccctgatgcagtaggaggcgatgcagtagcatttggaggagaccccttcgaagatgaagacgatgaagtccaacatttgtagggtcgcatagattttctaaccacttgtttaggaattcatttcggcttgggcttcacgggctgagattcacgctgaggaaacgatgaatctcctgggtttgaagcagttgcagcagcagacaacaagattggagcagcaggagccctaggttccaccattttccttggatgccctaggttcttagtcttagccatgaatttctgaaaagaagaatgagaaacagagaagcaagaacacaaaggaatagggatcgggtaggttatgaaaataaatgacaaaggaagttggtttatataatcatgtgagagagaaacacaaaaggaaaccaaatttaaaaaaaaaaaagaaaagaaaagagtaactaccagcccacgaacacaaaggaaaccacccccttttttcaaaattattattttttttaaataaaaaaggaaactagaatatcaatgacaaagtacaatgaataagatatcaaccttaaaaacgaaacatatcagaataaaccaatttcgaataaatgttgaaactttacaaacaaagcacaaaattttcttagcccatgattcaagtcacc

SEQ ID NO: 238298 - DNA, 677 bp, Cannabis indica
acctagacccagactcgaacccaaggtcaaaccctggactcgagaccgaaccctggacccaaaattgaactcgggaccggggactcagacccaggattggggaccggacccaggactggggacccgaacctgggaatcaaaccccagaccttggaccctagatcgggacccaagacggaacctgaacctgttaggctatttttagcctaagttttgagtcactttttagtgttgtttttgttctttgtatctacttttaggagaattttacgcttgtttctctcagttttaggttcccggggtgtttaaagaaatattcatgagagttagactggacaaagtcgagaaaaaaatgaaaaaaaattcaatctatctttagcaaagctcgctacggtgatcatgaataatggttgcagcgaagctttctaggacattatattttcgagtttcaatggtcgccacgactaagcattttgtggtcacgacgaccccttcattacgaatttgtgggcagtttcgtactttcacgattttaagtgggaaacctggttcttttcaaaaggaacatgcgatttttgagtcattccttcagaattggagacctagaaacaaatgagagaacttcaagagcggctggtggcgatccaaatcgatttctccaactagttctttcttct

SEQ ID NO: 238299 - DNA, 1420 bp, Cannabis indica
aataagtatgttgatagtctcataattgtaggggaaagatcttgggatattgagctcatttctgatatgtttttggagagagatgttggtttattttgaacattcagttgagttcttctatggaaagggatacatggttttggaacatggaaacgtcggatttttactcggttaaaagtgcttataagcatcttcaatcgagtagaggaagttggctttatttggaagataataactgctggaaaaagttgtggcagtccctcctaaggtttgtcatttcttgtggcaagtgtgttctggaagtcttccaactaaggttcagcttcaaacgaagcatatcaatgtggatcttctttgcacattctgtaacagagactatgagactatctaccatgtgctgttgggctgccatttttctagctcctactggttttttctccaacaatcgtgcctgctgctggtgcgatggaagattttgccacctagttttttggcctgttaaaagggaatcaagtggacgtagtggtggatgctgctatgatcaggtggagtatatggaaaacttgcaatgagttgctatggcagaagaaaaattgggttggtttggatgttgtgaagtcggctacatcagtccttgtaaattggaagattgcgaattttgagtcgcctcatgcttattttgctacgggtgatgttactaatagcaatctttgggttaaaccagatcattttactgtcaaggtgaacgtcgatggagccatctttaaagcgtagcaaaattttggatttggttgggtggctcgggatagttatggtactcttattgaagctatttcggggagtaggttgggctgtgttcttcctaaaatcgttgagataattggtatcaaggaagcgttaagttggataaagagtaaaggttgggataaggtggttgtttaatcggatgctttagttgttgtccaaataataaaaagttcaattcatattccatctcaattcggattgttggtggaggactgtcgtttaattttatctactttaaataatgtccaaatttcttttgttaatcgttctgctaatagggccgcccattgtgttgctaaggggtcttgtttttcgtcagatcgtacgtactatgagcataatgctccttcctctttacgagatattgtaattgtggatgcaagttgattatctatgataaattcctttattcaaaaaaaaaagggagaaaatattggaattaattattttggcattaatcttattatgctttcaaatattaacaaatttattgattatatgattaaggtggaacttcgtcatgtcaagaaaaggtaacaataaatatgcaaaggtaaacggtataaatcaatatatatgcatatattaggggggagctaaactcaacatgttt

SEQ ID NO: 238300 - DNA, 1857 bp, Cannabis indica
actaaaaatggacattataacggcagcaaataggtgttctgaggatccatgttataaaaattttaacccaaaagactatatacaatagcaattcaaaacacaattcaaaatatgtagatacaaccagtccaaaacaactcttggcaactcggcacacatgccggtatgttaaatatgtacattgctggagaagaccgtcatctcatggctgttctaacttttccttgcccttgcctgcaccacagagcatccgtgagtcacatatactcaacaacaaaagtaataaagaagtatacattaaatagctaaatatacatttcattatcataaatgataaaaatataacattcaacagtaggtaatataaccagtcatatgcatataaatagatatgctcacatatttgcattgcctaattaggcaagcccgtgtcataatgaaatatcatatatgatatcattgcaccacctactcaggtgagcttgtgccataacttggcactagtatatcacattgccttatttgaagagctcatacctacacccagtacatagttgcatcacctaatcaggtgagcccgtgccataacctagcaccaatatagtgcgtcatctaattagacgagcctgtacctatgccaagtattcatatatcattgttgcccgtacataacaaggtatgatgcccagtgtcaagatcgacggatgggaagggcaactggaccttgtagctgttcgcattgatgactttgatgtggtattgggaacggagtttctagctgagaagggggccattcaaattctagcaacatggaatctactgatcatgggatgttggaggagtatttgcggcactttgtcaatcccaaccagaagaattggccgcaactactagacgtagctcaattttgtttcaactctcagaagagttcttcatcaaacaagagcccttttaaagttgtgaatggacaacaaccactattaccccacacagtcgatgaataccacggacggaattcgcgggcctttaattttaagtaagactggaagaagaacatagagattgcccaagcatacctagagaaagcttcacagtgaatgaagaagtgggtagatcagaaacgctgacgggtggagttcaaggaaggtgagtttgtgtttatcaaactaaggctagaacaattgagattcctatgggacaaggacatcagactcgtacgcaaatatgagggccctattttagtcatctccaaaattggcctaggatcctacaaagtcgagctaccttcatggatgaagatacacccggtcctgcatgtcagcaacctcaagccgtatcatgaagatccaaaagatccagcacgcaaccagtctaccacggatgacatcagcattcaacgaagcagcagcaaagaaccagaagaaatcctgcagaaagaacagttcgtgtgaagaaaaagaagagaaaagagtacctggtcaaatggaagggccttgctgatgatgagatcaggtgggagaaggcggagaacttgcagcagtttatgtagaagactgaagatcatgcagcaggttcgtcaaggacgccgaataattaagtgggggagaatgtggcgtgttgccccatggcacacccataattgggccattttgtaacatgagcatgccttggtgcttgatcattagtcaagtcttgcaccaagcacctcattggggttgggagtcttttgttgtttagctttctttctttatatttccacttacatatgtatggagagctaaaatcatctatgttcctggaaatcccttaaaaccccaataacctctttagggggggtgaccaggtgacttatgaagc

SEQ ID NO: 238301 - DNA, 771 bp, Cannabis indica
cacaatttatttccgcacattagaatgactaactctaatacaccctcttcacttttggccctgaaaagtgtgggtataacgaacgacctttaagaaaccacagggctgaacgtgacatttgaaaggaaatttgtaggtctacacgatgggaaatttatagattttgaaacaggttaaagacccaacactagaaattggcaaatattgatcgaaaagtcccaaatggaggttaaagggggagtcagcggaagaatctgtttggaccggcagcactttggctcacaacggattacaaacggccttctggaccggagggactttgggctcacaacggatcacaagtggctctgataccatgttaaaattttgggataaggtgaatggggttccatctcaaaaccaactggctatagaaggagtagcccattcatcttatatatcacaatttatttctacacattagaaatgtgggactaactctaataatgtggaaaaaccacatgtattaccaacatttgaatggcgatacaacaaaaaccaatgcaaaagacaagataaaatgacattcaaatctcttagtaaaatagagaaaggatgatttgaaccccatacaagtaatgcagcgagagggctacctagagcctgattttttcgcatagactgtcaaccataaaacgaagaagagttgacacagcagtgatcgaaagaacttgtcttgtcttacgccttgcttcctctagtctacacagaacgtcaacatctacccacatt

SEQ ID NO: 238302 - DNA, 891 bp, Cannabis indica
ttctttccattcttggcccaatacgttttgtctcctctctccaaaacagccagctggtgtgtatttaagtggctgccacatggatgttgattcagctgaagaaaattctggtacactttgtccacgtcactgcctagaatgttgaatttgttacagcaattgctcaacaattcagcccagtttcagcttctatgcccactttgtcctcacatcctttccttttccctatcactttaactcttctttcccaacaacaaacaagcaatatttaattaaataaacacaactaaaataataatttctacaagacttaaaagctagcttactaaatagaaaataaagataaaggttgtcctaacttttctttgcccttacctgcaccacagagcacccgtaattcacatagactcagcaaaaaaagtaataaagaatgatacattcaatagctaattatacatttcatcattataaatgattaaaccataacattcaacagtaggtaatataatcagtcatatgcataaatagatatgctcacatatttgctttgcctaatcaggcaagcccgtgtcataatgcaatatcatatatgatatcattgcaccacctaatcaggtgagctaccataacttggcactagtatatcgcatcgtctaatcagacgagcccgtacctatgcccggtacttaatatatgtcattgatgctcgtacctacgcctgatacgttgccaggaagaaacccaataatggttttgatctatgccataactaagtattttcatatcactaacgcccgtacctacgctcgatacgtcaccagaaatatcacttcacctaatcaggtgagcccatgccacaacttggcactagtatatcgcatcgtctaatca

SEQ ID NO: 238303 - DNA, 1050 bp, Cannabis indica
cttctatccactttgtaaaataatccactgtgaccactgcatattgtactccccctttagcctttaggtaattgtccaattatgtcaattcgccaaatagcaataggacaaggactttgcatctaagttagctcatcgggccgtgcacaaggaatcttggaaaatctttggcatttatcacatttcttagcataggcctatgaatcttccatcatggtcgcccaaaaatatccttgccgtagtattttctttgataggctttgcctggctgcgtggttgccacagaatccatcatgtacttcagacagaagttgtgcaacttcttcttatgtaacacatctaagaagtggcatggagaatccccttctatacatggctccatcgatgatgatataccgtacaactttccttctcatcttttgagcttcgaatctgtcatttagaagttctctagtattgatgtaggctactattggtgtcatccagttcggagctgtatcaatcatctcaatttctttcgcacaggtgatgctgggttcttcaaggaattgaattgggactacattagccttatctgttatattgctgctcgcaagtcgggctaaggtatcaacaattgtgttttcttcccttagaattttcctcagagcgtaactcttaaattatgcacgcagatcctgtatttttcttaaataggctataattttctcccctcgggcctcgtactctcctgacacatgattcactaccaactgtgagtcactacagatctggatgtgttcagtgtgctgctcctgagcaagtttcaagctagcaatgagggcttcgtactctgcttcattgttggatgctttgaatttaaatttgactgccccatgcaggtgttggcccccaggtgtgacaagggcaatacctgcactaaaaagttgatttgtagctgacccgtccacgtgtaatttcttggtaggtctgtcttcattattgttcagttgagattcttgtactggctccaggttgtccttttaactgctttcttctttgcttgtgcac

SEQ ID NO: 238304 - DNA, 720 bp, Cannabis indica
actacagtgggccattcttgggactaagaagttggcgtaaaattccttgacaacttccatgactgccggctctctttgctggacaaaaagtccccaatctcgcttatgaaccgttgcactgacccattcgggcaactcatcaatatcctcaatatcggctactaatccacgctccatataaaactcccgattttccaccttctcgtgatactttgtctcagctgccgggcaatgaaacttaggaatttcatgcagtgatttctttttattcttgttggcggtcttcttaacttttggcattttcttttcttttttcacttgcacactaccccaacacaatgaatttcttctttgcttccttactcactgctgcccctcaacacaataatactcttacaatgcacttcactgtttacaaccttccacacttttccgaaaatcactactctttccaacccacaccactgcaccttcaccaaaatcacctataacactcacaacggccacaatggaatcacactaataactttggatctatggcaattcgtcccaaaaccataccaactagtagcacaataatctgtccgaaaaccacaacacttccaatactacactaaatttccaatttaactcaaataatgacaaccaggcagttcaatgttcaaaaccccaacaaaacttcattatcccacaaaaattgatcacctattcaagttgaaa

SEQ ID NO: 238305 - DNA, 1224 bp, Cannabis indica
gataaaagtttcacaggtgtttttcctgctactggacagtcccaagcacaagctcatattgctcaaacttctcaagggacagatgacaattggtaccccgattcgggtgctaccaatcactgcactccaaatgggcaaaacatcatgacaccagctgaatatgagggtcctgaccagttatttgttggaaatggagctggtttgcctatctcccaaattggtaattcctatcttttatccaattcttctaataaacctcttgttcttaccaatttgcttcatgtgcctgaactcacaaagaatttacttagtgtttctaagtttgctgctgataataatgtttactttgtgttctatcccgatatgtgttatgtcaaggatcaggtgagcaatatcacactgctgactgggagacatcacaatggcctatatacttttgactctagccaacttcacttgtctgccacctcctccccaaacaatccacaaactgctataccatctgctcatatggtcactgctgatccttctcaacccgagccacatcatgttcaatcttctctttgttttcaatgtagcagtagcaataataattttgaactttggcataatcggcttggccacccctctgaaagggtggtgaagtctgttctctctcaatgtaaccttcctcatatcaataaaatttcaaattccatttgcaaagcttgttgtttgggcaaaatacacaaattcccttttcccaaagtgtctgacacatgctataatgctccattacaacttgtgcattcggatttatggggcccctcattcaccacttcacacaatggttacaaatattatatacactttatagatgcctactctagattcacttggctttatcttcttaaaaataaacatgatgccatcaaagtgtttcagattttcaaagctgaggttgagttacaattaggcaccaaaattaaagtgtttcaatcggattgggggggtgaatatcgatcctttactgacttacttcagcaatctggtatagtgcatagaaaaccttgtcccactactccttaaacccgattatagcattcttaagacctttggttgcacatgttttcccaacattcggccatataacaagcataagttagagtttagatcttccccttgtactttcattggctatagtttaaatcataagggctataaatgcattgacaaaaatggcag

SEQ ID NO: 238306 - DNA, 1488 bp, Cannabis indica
aaacggtatcagaacctccataaaaggatttgacagatggcgtaagcccttttttacggcgattacacaacaatcgacgagtctagtgaccactacattatgaggactcacatcaatcaaggaaggataaaggattatatccacctaacccctaagatacctacagtatgggtcatgtatttcctattttgtatctgttaggaatttgtgcccctaagaggctaacacaaaaagacaagtgatccctttctagggatccccctcaaaaatactataaataccccatagagagaatggaaaaggggtcgatcgattaattaaggaatcgaagagagtaaagaaagagagagagagagattcaccaagaacattctctgtaaaaacactctcataaataaaaaggactcgtggactaaggctcattaatgccccaaccacgtaaaaatcacttgcattaaactttctatagttcttctcattctactatttaattggttatcgaaaacctcggtcaacattttggagctttcattgagacttgaaggaagcgtcgtcagatagaaaacagtcagaagaaaagtcaaattaacaatggtggaaactcgtaataatacatgtcacccctgtcctcttcaggatgctcaaaacccagagggcgaagaagtagcctcaagagtgaatgtgggctttgaggagcaagatgaggcgaacgacgaagagtacgaagaaaacttcgaagggtacgacacgaaggtagctatacagaactacaggtcttaaggcaaaaggggacagatcatgaagccgagcttgcaactcaaaaagaacataatagtaggatgcaagaggtgatggtcgccatgcaaaaagccatgaagactgcagggatacacatacatcctaaggccatcccagcaagagctgaggaaacaccggaagagtcttcaccgagttctcggaaatccaggaccagggaaccaagccctatacggtaccctttcgaggaaaaccctgggaaaaatccaacttcaatccccaaaaaaaaaaagaaaaaggtgcaggatccgcggaaagtccgctcagatttcccaaaagggaaaggtccgcagaggggaaagctccctcgagcgagtcttggccctcaggaccgagaggaccaaaaaagcgtatccgtgcaccaggaacccggagagagaggaggaaaaaccggaggtaccctccagttgacctaaggcaaaaaatcaacgaaaaacatggtgacttacaagaccatctagaccaaaagaaacacgcaccaacggcttccgtgggcacgctaaatgaaggaatgatggctgagttagtgtagacaagtctcctcaggtgggcttaccaactcaatattcttgactatccagtatcaaaaatgaactttcttttatcctgtgtctcaaaaatagaagcattagttacgttttcaggaaaaagaaaatggtcattgtctaagtc

SEQ ID NO: 238307 - DNA, 2544 bp, Cannabis indica
aggactattttgcatctcagcccttattttaaagttaacgagagggtaagtctctcttaagtttaagagaataaaaaattaaaacaccgttaaattaataattaaagatagacatgtcaaaaaaaaataattaaagatagaaagataaaaaagataaaaatatatagaatatttcttttggtaaaaaaaaataactaatagtctaatacaatattgaataggtcatcttattaaatatataagtaaataaagaagaaaaaaaacaaaagtcatccacctcatctcacagactcacacctgtcttcatcttcttcatcattcgcaatcgcagtacccccctcaaatcccattttctcgctttggtttacgatcaaccaaatgcagctatggctttgcactccggtataggtttttccaagatcctcgtcatagccggaacaggtattattaatttcatatcatatttcacacttgcttccccattcaaaaagacctatctttcgatcttgctaatttcttctctctagggtacactgccactgttttgctcaataaccataaattatcggacttgctcggagagcttcaggtactcttttaattttcttgttattattcttaatttcaaatttagcttcgtatgttgttaaattattgaagcttacgtgtttgttaatctactttcttcttattgttgggtggatttgattaatttcgattttgtagtttgggttttcaagtggctttgttagcctataggataaattaggtcgacaaatatactttctgcgaaaatttgagccaccagacttgataatttttttagtttattttagttgttggaattttcgttacttttattgtctttatatctagtgactccattcttatggtgttttgggtttgttattgcagtcattggtgaagggattggagaaatcgaaagatcaatcagacggagtaaatgattacagtgatcccattttagctcaggtattggttaaatgacttactgtgtaatgtttcatatttcttttggatttctcattggtatgtgaaactgagacgtagaattatctgaaatttttgctcaaactgtcttttaggtgcgtaaactggctgctgaggttcaacaacttggttcaaatcgacacattactattctgaatgggagtaatggccatggtgtgtctcttttcattcgaaagtgctctaaatatatctttttttataatgttcttcacgtgttttggggtgaaaaaacattaactttatgaataacttttagggaatgaagggtttctgttatagtagttaactttatcatattttaccaggtaacttaaagtcacttatagttcccgcggctgcattgggagcagttgggtatggttacatgtggtggaaggtatgctttattcattcgtttggtttgttctaatctatcatgtatgcccatttcttgtggaagtatttatgaaatatgttctctgttttttttctttcctgggaattactgtgtgacaattgttttattggttagggttgttcattgtgggattttatgtacgtgacaaaaagtaatatggctaaggctgtttcaaatttgacgaaacatctggagaacttatcagattttgttgcagtaagtctctacacctctgatcgcttttttatttatcatgaccatagtttaaggaaaatgtcttttgagaagtctatcatcatattgatcggcaaaattcgctctctttttaacttttttttattgccgctcctcgcttttcaactctgaagttgtgctgcatgcgtgcataaaattttgattgtgatgtaacactatcctgctctttattaggagagtttacttacctccttgaaagaatttttgaaaaaaacaaaagtgtttatagtgtgtgcaatattatgttcagcaaacaaagaagcacttgacacagcggatccagaacgtggatgataaaatggtggagcagaacaagttatccagggaaataaaggatgatgtaagttttcagaatctttacatttgtgtttttattcttaagttaaaatagcacacttatgcagtgtacgcgcttctctagaattattggtgtgaaatgtcttgtcagaaacagaattagtgttttaccgtatattaggaagcaagtacctgtatgcctttttattacatatttgttttttttgtatgattatggatgtagcccccttccctttaaatagaatacatagcctcattccacctcaatagaattggtatattatctacttggattgacttgttataatttatttaccgtactgcattagcatattgcagtttgtttatgctgtctcaaatgcatgttgatatagatgtgaaatgattagtattcaaagcatgtctcctttgttcatctcttgttttgaaacgtgtgaaacaggtcactgttctgaatgaatctgttgatggtattgcctatgacttgagtggattacagaacatggttgctgccttggtgagtcatgctgccttagtgtttt

SEQ ID NO: 238308 - DNA, 739 bp, Cannabis indica
ggggtatttatagcaattcggtcaaaagtagaaaaaaagtatattgtttttaagttccatatatgggcatgcaaaagttcccagaaggtacaaaatagggcatgcatagcctacgtactaggggcgtaggtattaggtgagattagccttcatcccttcttaattgatgtgattcttcataatggagccatcactagctccattcttcatattctttgttgtttgattcgttttctctatgctgcattaaatgcaaagtgactattcaactcaagccttcttggcccgaaaactcctaaccgtgcctcgacccccagaggggaagacaagccttttgctcatgttcaggagctagtattacgaactatacttgttgtttcttaaggaggtttaggtaaactttcaactcatcttcgggtgacgtgcccatgtaagcaacatgtcacccaccacaattgccacatatattgagaataaactggggaaacaatagccatttaaattaaataaacaaatatgcaaaaatttagcataagctgttaaagggttttatttcattttatatttaattaaataaataaacccaatttttgaaaattaaggttgtaacaaccctaaatatcatttataaaattcaactaactttaaaattttatgttattaaaaaaatatattttaataaaataaatatctaatgagataaaatggtaaataattagcacttatctaatcttataac

SEQ ID NO: 238309 - DNA, 1074 bp, Cannabis indica
gaacctcagtcttatgaagaggctattaaaggaccaaattctaggaaatagaatggagctatggatgaagagatggaatctcttaagaaaaacaaaacttggattgtggttccgaaacctaaagacaagagcattgttgattgcaagtggttatttaaagaaaaagaaggcagaactatggatgaacctataaggtataaggctaggttagtggccaaaggatttacacagaaggaaggcattgattttaatgaagtatttgcaccagttgcaaaatacaagactataaggataatgctaagtctagcaactcagtacaacatggaaatagaccaaatggatgtcactacagcctttctacatggagaacttgaagaagagatctacatgaggcaacctaaaggtcatatagaaagggggaaggaaaactatgtctgcaagctagtaaagtcactatatgggttgaaacagtcacctagacaatggaacaaaaggtttgatggatttatgctaaaactgggattttctagaagctattatgatcactctttgtaatacaaggggactgatattaacaaagtcatatatctacttctatatgtagatgatatgcttataatcagtaaagaaagagcaagagtaaacaccatgaagggcctactcaagtctgagtttgaaatgaaagacctaggggaagcaactaaaattttgggcattactactaaaagaaacagagcagaaaggacgcttagcctaactcaggaagactacattcacaagataattgagaaattctcaatgaaaggatctaaaattgctagccaacctataactacacagtacacattgtctaagaaataatgtccagaaagtaaggcagaaaaggaggaaatgagtaagataccctatgctaatgccattggatctattatgtacctaatgataagcacaagacctgaccttgcttatgccattagtgtacttagcagattcatgacaaaccctggtaagactcattggcttgctatgaagtggcttctaaggtacttaattgggacaactaaactaggactc

SEQ ID NO: 238310 - DNA, 1209 bp, Cannabis indica
atttaaagaatcaatttaagaatattaataatataaattgatcatatttataagacaaataatggactcatcaacattggtggtgccacattcactatgttaagacacagtgatatgcgcctataagaatatggtgggtcaaactagatttatttttgtgttaattaaattaattcaaaagataaatatctatttaaatttgaatttaaaaggtagttatagaatatttaagttggttaataattatctctccaaaaagagttgttctcatgtgttaagaattaaaccaagaacttcatatacattatatcctactagtccttgtgtgtggtgaaagattcagaagtactacggtgtgagtttttcgtcatccaagaatacaatatcgaaaattaaacaaggataccctcataggcttcaaaaattgaattttctttttgtttatttttttttagattttaatatatgtactggtgatcttgaggatgtgatacgatgataatgaggcaatattattctgttgtgtgtacttaatttaatactataaaattaacaattggtggcgaaccgattccataatatatattaaatgttgtgttgttttatacaattatatatatgtatgatatgtatatgaatgcatggttatgataatattattgtacgtgagatggtgaattgttaaatatatggtaaaaattggatatagattttgcttttatttttttcaaaaacattgtaagctactattgaggcatacaaatttttatgtaaattttttgtacataaaaatattacgatgtaatactcatcgcatgtgaactcggtttttattaagtaaaattgaaaataataataaaaaaatccatttttgcatgtaattttattgttttcatactaaaattcacaattgaaaaccttttgcaactttcttccccttcaacatcagaaagctttcttctcctttctttgatgacaatttaggtgcaaattagtcttctttttcggaaactttcaactgttaaccacttccgaaacatctcactctatttctagtggtacaagggcagggccggctctgggcataagagagctaggcccgcgcttagagctcacttattttaggggcccaaatcaaaaaagggaattttttataaatatggaatttcttaaaagcattttgaaaaatatggacatttaatgaaaaaa

SEQ ID NO: 238311 - DNA, 1503 bp, Cannabis indica
aaatttagtatctagtgtaaaaaccactaagaaattcatttagttggaaactataatttgtatttcataaatattctatttttttactaaattcttttactttttacagcttaaactaggtaaatgacaatgaaaatagatattctcaaaattatatatattaaattattatcaatattatgtttaagattgtttcaaaatataaatattcagtaaaaaatcatatatattgaatatatataaaaaatagatagtttggtttagtttgaattacagacaagaattttaaaatcgtgatccgattagaaaattaaaaacggtttgaattaatcaaaccattgacactaaattcatttggttcatattggttggagtttgaaactacaaattgtaaattatatgcacagtcctaattaaagaggccttaaattaattaagcacaagtgctggcaaaattttattgttgaaatgattgtttagttgctgtacaaacaattcaaaatgtgctaaatatgacatcttcatttgattttttgtgagtaattgtaagtttatattagcttctttaaattatgtcaaaatttgttttgctaaatgttttacgaataaaattgcatattgtgttattcgtgattcttgttcatattaagattattatttaaaaaaaattatactttcagtaagaatgatactcttgctgaacttttattcagtaaaagcttgtttgatagattgtattgcattagtattatttaatacaatgctatgtctagtattgatttgtattaatagaatgtgcaaaatttatattttcaataaactagatcccaacatcgattataggtcgggctgggttccaagtttggagtctgggtctggatccgggtctcgagcccaaatctaggtcagagattgggattgactcggaatcttttgtaattataatgcaagtcaatacaaataatttgttatgtattaaataatatattttcatagtattaaaaattttggtcataataattgatacaatacattattttatcaaaatatagtgttgtttattatttaatacaatacgacccttatacaatatacccaaacgaaccccttgctatttgattaaaaaaattatcctcatattttagaaataaatgtagcaaaaaaaaattaaaaataaaatagagtaatttgcgatataaatttttaaatttaattttgattgtaaattaatacttagttttaatttttaataataatagtacttaagttataattttgtaatttttgtatgtacctgaccattacacgtgataatgttcaggtaattaaattttaattttttagttaaaaattaatttaaatatgccaataaaaaaacatgaataataacttaataagtacttacaaaataaaattactataaatataaattaaatattattactataaaaaaaaaactaaactaaataagaattaaacatacattgaaaataacttaataaa

SEQ ID NO: 238312 - DNA, 885 bp, Cannabis indica
aactctgatgcgagggaaccattaatagaggtggaaagagatgaagttaacagaggacaatggtggaatagagtgttagagacagaggaggccaaacaacaagttctattttctcttcctatgataatcaccaacggtttctactatttgattccacttatttccgtcatgttcgccggccaccttggccagctccacttgccggagctactcttgctaactcatgggccaccgtctacgacattcctaaacagtataccatatagaaaaattcacaaaaagaaaaagacattatacaaatcaatttctaaacagtataccatataaaaataatacttaataaacgagactccagatcctaattatataatcaaaacttacctatatattactctcgaatagtaacttagtggtatatgtttgagagtttccatttgaattcatgataccttactaatgtagttatttgaccttgtcagtcatacattagtgattaacaatcatctgattgtgaaagaaaaatttcaatgattacttagtcgaatttttgataatttttaaatcctaaacttttgatatccataattttactccctttgtcttgctttggttgattgaatcaactaagctcatcgatattctttcctttattgggaaattgtgacctttggatacttgtttatatttaattacttcaaatatgtaacgaggcctttaggatgctcgttagatatttacctttcaaaggatagatggaaagagtctcgaataattagcatcaaatatcagttcaaatattaatgtgatttgttttattcttattttattattttattatatataaataatattttattattttatttaatataaataaaaagtcac

SEQ ID NO: 238313 - DNA, 1113 bp, Cannabis indica
ctacatattgcaaatatgatccataaaaaatttaacccaaacggttgagttttttaaaattcatcttcgtttttctttttcaatcaatatgaattcacatgcacaaacaaataaaacagaaaccctattatacttataattcaattacctggatgatccatactattttgctctctccaaatgtaaatccctcaatgtagaactgaactgtatacagaacaaaccaaatcaaccatatttgatttgttcattctaacttggaaaacactagactcttgctgcaattggaactgtgtaaaacccctcatgaaatgtgtatagtattaaaagaaaacatgcacaaacatatatacacatgaaatgcaacatttcacaaccactaactatgaattatttttcaaagaacaaatcaaagaaaggttaatttaattgctttaatgaaaaggaatgaagccatacaaataagagacgtggagaaccaccaatctgaggtcctagtccccggcgtacgcgggctgccttcgggtgagcagaacgagagaagagagagagcgaggttggggttctggaatcttccgcagtcgaggaccaccgggagatggccgttcaagtcgtcggggacggaggacgacgacaggggccaattctctttgcccgtcgaggagagagagtgcagggggtttgaagggtagggaaaccggactttggggttattttcggctgagggtggctggaggtgtgttgccggggctgggctgtggctggcggctgtaattttcagagagaggttgaacagagaaggggagggcgagaacgagagaaagagtttttcttttttgagaagatcttttatgttctactgtggtgttttttagatgttttacagtttaagttggtgtgctttgtgtatttttaaaagttcacttaaattctagtatatttgtaaatttttttattaaaatgagcaaagataaacacttttatatcttaaaattttttatattttaatttttatacacttcattttttattttttatttttttttgtaaaactccgttaaaattaattttccttaaaaatttaaaatttcagttagatatcattattaatca

SEQ ID NO: 238314 - DNA, 1095 bp, Cannabis indica
aaagagttcattatttgattatcagttagtacagtatttatacaagaagatagagttcaactgatcaagatcagttgtaaccgaattgataacaaccataacagaatacaccagttgaagcaacagtaaaaatataattaactgtaactaactattagactaactgaatactcttaacacgggccaatgtcaactttcctattatttttttccttgaaatattaattaagtagagaaataagacggaaatgacgtgtgggtttggtttaactttataatttgcttctgatgttgaattaaattattagggtgtgtaataatttttgctaacaaattaagcaactcatatatatgttatatatgcatggttttgacaaaacctccttagtttaagaaaataaggtcacttagattgagagaaatgagaaagattactggatgttgatacattggatctctgatgagtggcagatgttgcttcaactttcttgcaagtatataaagttgttaagtttgtttttttttttgataaaaccctactagggtccattcaatattcaccagagataatagacaaaatcataaagggatttgagaatagaagacaataaaaatagctaagaagacctgatatttgatattgaataaacaaaatgataatacacaagaacatgaggaattcgcaagacctcacctgtcccatgtgctactgcccaattcattacaatcattataccctcttcattcttcttatcgtcctatttataccatcatataactcttttatatcctgtattctatcatttttattctcaaaatagttaatagtaaccttgtcccatgtgttactggctaagtgggctagtttttctcgctccggagtgtgtcatctgtgggacgacctgctgtggtaaccaaaattttcccttcattttcctttggatatatgataggatcataaaatttctcttcaattcaatggtcagtgactgttttcccagaaagaaaaagcttacgtggtgagtttggctgatgataatagggtgtgttttctgtcatctatctatttccattgttatttttgtttttctgcag

SEQ ID NO: 238315 - DNA, 1703 bp, Cannabis indica
atttgattatgatatttattatattgtaaatattattattattactaataaatatttatttaaataattttttaattttaaatttttaattaaatgtaaataatatttttctcaacaccatcctattttattttatataataatgactttttttttaataaaacaaattaaaattctatatatgcaacacaccaaagaatttttttgtcttaataataataataataataacaataattattataatttaaaaatatggtgaatagacttaaaaaaaattgattttatggagttttaatatttagtaaattaatttttttttaataaatcagcaattcattacacaaaacaatcttttttacaacctagaagcaccaagcaagaatgcaaggccttagtattctatacaaaattatttacaaagtgttgaaccaatcttcatcctttttggttactttttttggccatacaagagctattctttgtttcactaccactttaatttggcttgtcacttgggctgttatcattatcttttgttgccatattgcctcatttctacctctccatatgttgtacaccaaactcgcaagaccagcagccataactttcctcttgaaagtacttagcttgcttctttggatccattttgtcaccctggacagctttgtatcagtcggcttccaccccagccaatcggcaataggttcatagcattgtttagaccagctgcactcaaagaacaagtgttctagagactcttcatggctgttacaaagattacagcagctgttctccacaatgccgaacctgtgtagtctatcttttgttctcaattttccatgcatagctatccaaaagataacactatgctttggcacattgaatctcccccatacctgatcacaccatctctttttctcatggacaggtgcaaatagagaatatcctgctgcaatatgatatgtttcagtttcaaaacgagcagtatctacaagggtgcatacctgattttttagtgctacaatccttctccaataccaacttccatgtattggaataggatagcaccaccaattttcctgcttgatgtacaccgaatgaacccatttaacccataggttttcttctttctttgctacagcccatatatacttgaccatggcagccatgttccattccttgactcttctaaatccaattccccttgcggattttttctgacaaactgtgtcccaagcaatggcccccccccccccccttggaaagcatgttgccctttccaaaggaaggccctgcatatagcttcaatctctttaatcaccttgttaggcaatagcatgacttgactccagtaagaatgaatggaaagaaggaccgaattgatcaataccacccttccagcaaaagagaggtgtcttgtactccatgttctaattctacctgtcattttctcagcaaggatggcacaatccttgcttgatattttctttgcaccaatcggtactcccaagtatgtaaatggtagctcctgtctagtgaatccagatattgcaattatcctgttcaattcattctcaggcatgttactacaatatatagctgattttgatgcattgggaaaaagccctgaagatagtgagaaaagtttgaggccctgcaacaaatataagacacttttgaagtctccatggcaaaaaagt

SEQ ID NO: 238316 - DNA, 924 bp, Cannabis indica
gtctcctggaagcaatggattgaattcatttacaggggtctaattgtctttgaacgattaaagatgaacccgactgctaagactcaaagaaaagttagccaacagaatactaatgaaggttatgatctacgttctattcccttgaatgtaacaaaggagggtagtcttgcagcattcttgtccttatggctaagccatttcatttttcctgctccaggtcagaatattaggcctgaatctttttatatggcttcggtaatggcacatggggtcagagtttcacttgcaccttctgttttgggctatatatatcgtgctttatataattctgcattacattatcaagagcgaggtgaatgtttcctacctatgcattatgtgttggggtggttagctgagcattttcgtgatctttatatagggctcgacatattttaagggggaaagattatgttagacatcaaccatattatttcccttcaaaggaaaatcatgactgtttggataatgaagatctgtctaacgaaaaatttgaattgttaatgtcgatgtgctctgctttgttaccagttagagttggcaatgatatatacatggaaccttattatcccaacagatttgctcaccaaatttggttttgaccaaggtgttccttcagagaacttttgtttgagtgtccataagaggatgcaatgtggaatagaagatatagacaacgcttgggttttgattttaaggaggaataccaacattcgcttttatatacctaagatgactcgtatggtcaatgtacatggtggtattgtcgttggtgggtgaggagtagccttccgtacttagggaggtctgtcgagaagattcataaagagttaaaacaaccctatgaataggaagagtcgaagtatataatccaggacattcgcg

SEQ ID NO: 238317 - DNA, 1184 bp, Cannabis indica
atacagaaagcctatcaagttgccaaataacagcctgtaaccatcatccccctggatgagaccgacgaagatcaagcagtggacacctctcacactataaatggtcagccgtccaatccccggtcataggtcccatctgtgggccaagcggtaggtgggcaaaccttgtctagcgatttgtcaggagaggttatatttaataattccaaccaagttaatggtgtcggccacctaattggccaaaccaaccagtcactatgacagcaaggtgcttttgtatttactcgattgggggcagttcatgatctccgtgatgatctaaacagaaggagaggggtggacgaccagcatgatacaccaatcatacggcctggaacccgcgctcaaaatctcgctcaaagagatgctgatacgactctggtcgggccaagaagctgaacaagttagtccagctgtgcaggcacagttggacgaactaaaaaatatgttccaaggcctggtcggtcagaggaacaatgctttcgagtgggaccgagcacgtggatcccctttctccctagaaataatgtcttagaattacctcacaagtttaagataccaacctagaagatgtacactgggaaggaagatcccttatcccaccttaagtattttgaaatgcaaagggacctgcaaggagcgcgaggagatgtatgttgcagagtttttcctaccaccctctcagaggccgcccaacaatggtatttcaagttggcgcccggaaagttcaactcatggaaggcattctcctcagagttccatgcacaattctccacttcttgccaacttctgttgcacctaggagatctggttgaagtgaagcaaagaacaggaaaacctctctaagcttacatcagccgatttatgacagaggcaactaaggttgcacgggtgaccgaagacggaaagttgtccgcaatactgggggcattgaagttcttggagaactttggaaggacaccaggaagaacggaccagtcgattctatgagcgatttcctgtaccgtgtagaaggtttcattaagcttgaagaagccatttagcgggctgaagttgagcaaaaacctagccagccaaaggcctcttccgctgggatatccgcccacctcccccagtacccgcgcaattcaagctcgggtggtaaa

SEQ ID NO: 238318 - DNA, 1644 bp, Cannabis indica
ctctcttctttcttctgctgtgtactttctttaattactctccaaaaatggtagctgccttcttcatgatgatggaagatgatgatggtgtacttacttttctcctcttttcgttcttgggtctttagggtacaaaatgatatactaaaaatagaagcccaatctttttccactttagcccactaggtttagtcactttccttccacagcagccagctggtgcattttaagtgacttggacgaatttgctgatgtggataagtgaaagtcattttttagactttttccacgtcattacccaaactgcccagaatgctatagcattccttcagcatttctgtccagttttcaacttttgttcaaacttctcctttgcatcacttcatttttcctagcaaattaatcattctttccacaacaaacaagcaacatttaattaaaaaaacacaattaacacaataatttttacaagactcaaatgttagcttcctaactagaaattaaactaaaactacttaaaattaaacaaccaaacacatttttactactctcctcacaatattttcagtttaaaagcataaaatataactctataccatagaattatcacacgacaataaaggatggattattttggaagtatgactaatttagaattttgggttgtcgatttgggattagctagaattactaaattacccctagatgtgctttaagtttagggtttcttaaggaggggtaaaagtgtcattttgaggattaccatttgatttttgtccttttgtgatttttttggctgattgttttatgtaataaaaaataattataataagttaattaaaatagtaagtatttttattttagaaggtattagaagaaaaagcaccaaaaatcaattctcttcctccctcttcttcatggcctagaagctagccaaaaccatgggggtttttctcaatttctctctaattttgagcaaatttgatacccaagatcaacttagaagctttggaggtaagtcctttactttgaggattgtaattttcaattttttaagttgattttggaatagggttttaggatttcgtggctgtaggattaaattaggttgagattgtgattttagatttgttgtagagtgtgttggagtttatatcaagcaattttaatggctatttggattgaatatgtttagtgaagtaatttgagcttaattttcatttgagaatgtgattttgagtaaattgatgaattgtgaggaattggtgatttggatatgttatatttgttatattagaattttttcgaaaagtatagcaggtttggaagaggtttgatcagattttggggtgaaaaaccagatttccccatggctgcccaaaaaaccagtcgaccggtttcccaggcaactggcaaaccggtcaaccggtttggccagcagggggaaatctcaaattttctcctcgagtccaattttggttcagggtatctttcggactgtaatttagagtattttagggatatttgagttagtttgatccaagaggaaataaggttagtctggttatgagaattagggtttatcctcagaaatttaattaaggtttttattgagttttgattgtcgtgaaataggaccgggat

SEQ ID NO: 238319 - DNA, 879 bp, Cannabis indica
gtaattttatttgataatttttataattaaatagtaaaattagtatttaaataacaagagcagaaaaataatattactgaagaaaaacaagtttgtttcattaaggaaataaaataatgacaaaattctaactcatgggtttcattaagggattttgccatgaggtgaattctaagtcattgaatctttctaattagctcatttagctctaaccctaaacccaatgaatccctataaatagaacattaagagttttgattcaaaagaagactctagactctctcttgtctaacaaactgaatcaaaagcatacctcttaatttctattattatttttcgaattgctcttgagttttcttcatagaatttcgtggtccatgatgattgagagtatgtccactcatatctaagcaatacctaatataatgtgaaagactctgtctaaccaaattgaaagaaagaagatccagattcagatcttgataatgctctgctacagcaagaatcaagggctagagagatctgaatggatggaattgggacccacagagatgcatgttgtattcccctccggactcccaccacacgcacttgaacgacacaatcacacttgagctttgtgtgatattcacggtcactgttacaccaacttcccactcccttttcatgaaaaaattaactattatacgaatagagaaatgctaaaagtcaccaatggtgcctagtactctcttatgtgttattatcactattagtccaattaaatatcaagtctcatatggtttaatgtaataacttttagggacgattgctagtcaatcgcaaagtgatcgacatgtgtctagagatgctagttaccactgatgaccaataacaata

SEQ ID NO: 238320 - DNA, 1669 bp, Cannabis indica
ggttatggtcggtttttaaaattttataaccgaccggtcggttacggtttttattttacgaaaaccgtaaccgaccgtttagaaattataaccgtataaaaccgaccgtacggtttttggcggttttcggtttggcggttttaggcggttttgggcggtttttggcggttttgacgattttttggttaaactatttttttatttcaagaaccgaaaccgaccgccatgtcaaaaaaaccgaaaccgaaaccgaccgccaaattcggtgatgacatggaaccaaaaattcggttacggtctggtcgatttgatggtccgtttcggtttttcggtttttatgaacacccctagcttcaccaagtaataatcgtgattttgataatctcacgttagaagatgaagaggaaatcgggatttcaattgaagataatggaggacctgaagagatagagtttgtctatgatccacaattgtgtctggtaggaaaattcattgttaatggtgctgttgattttttgtcaatgcaacaaactcttgccgctttgtggaaaccaagaagaggagtatacatgaaagagttgggcgcaaatttatatctgtttcaattctatcacgaaatagatattaagcgagtttgtgaagggagccgatggtattttagtaggaaggcactaattattacaaggatgaaggccaatgataatccaaggtgcgtgttgttgaattagcttgacttatgggttcagatacatgacttacgtactggctacatgacatccactattctaaaaggggtgggtaactacattggcactttcgttgaatcttgcctgaagaattttaatggtatatggagagaatatatgcgtatttgggtaacaattgatctttcgaaacccctgaagcggcggatgaaactaagaaaaacagggtctgaatggatttggattacattcaaatatgagaacgtcccaaccttttgcttcatctgtggtcttcttggacactcgaagagattttgttctcgcctgtttgatactcctgaaaatgagattgttaagccatatggagagtggatgaaagcactgttccgtagatagacgaaacttattggggctcaatggttgcggaatgggattgacggacatggggatattggaagctcgactatgcattcgcggccacagggaacgacggtcctgctaacggaaggtggtggtcagagggtcaaaaatcatgggcaggggcgagtaaatttggctcctgatattcagggcattaatgttgatggagactatcgtggacatgataatggggaggatttatctcaatcagcacaagttgttttacagcagagtcaaacgcataaaacaggaaagaatcatgttgatgaggtggcatctcaatctcaagattacgatttaaaggctgcaatattagagtccaaaaaaagaaggatggttggtgggctgggccacgactttgttatggatcaacacattgaaatgggtcatgactcaaattgtggtaatgacgaaaacatggagcaagatgacgtggttgggccaaaaaactcgagtatggcgggattcgatattcggacccgcccgtcattatgagtatattaagctggaattgctgcgcgcttgggaccccggggaatgttcaa

SEQ ID NO: 238321 - DNA, 734 bp, Cannabis indica
aaaagcgaagagcataaagtaaaaaaaacaccatagaataatcaaatgtagggatttatttttgtgacttgtaaacttggaaataatgatatacgtctctaaatttactaaatcgcaccccctggccagtgcatgcaagttactcatgtgatcaagagttggatgtccactaataattttattcaaatatcctaccattcatgtatgattttaagcttcatatcaatttacatagcctgcaaggagtagaattacccgctcatgttatgaaatatgtacacatgtcacctagtcagatgtcatatcatggtgtaaaaattagaataatatttgccctctaagtctgtgcgcagggtcggccctaggcataggcgggctaggcccgcgcctagggctcacttattttaggagcccaaataaaaaaatatcttttaaaaatatatatatttttaaataatttttaaaaataccatttatctttatagtaatagccttattttttttttatttttttgtttatatcccattttaactcaaaatcaaccctatttgtgggggacatttttggtcacatgcagactttattcgacttaaaaattgtccgtatgatgatacgtgtctaatattactacaaaatgtgatatgttatgtacagctaacttagcggtaaattaaaaataattagttttgcttataagctactcaaatacaaataaatataaatataataacaa

SEQ ID NO: 238322 - DNA, 1147 bp, Cannabis indica
acacatactcaagctcaaaacctgaaatcatcaaatccataacaaagctcaaccacaacagaataaacaaccataactaacacattatcaactccccacaaatcaagcccaaagcattcctaagaacaataaccatcaccatcaacacaaataagcataaagcatcaaaatcactccattttctacacacatgcaactcaagaacttaacaatctaagaacatgcttctctactaaaatcaacaacatacaataaattaaaggagtaagaaactacctcaaagctcacacaatcaatagacaccaaaatcccccaagctccaacaagatcaacacacaaaaattgaaagaatattgaagtgaaaaagattgaaagagagagagtaggggttcggtccaaggggctgagaaaagtccagaaattcaatttcaataatgacaaaatccattttgtcgcaaagtaattcaagtggtcaaaatgaccaatttacccctagggccatataacacacacatatgcattcaaggccacttaagtcatttccatcacattacatacataaataaataattttagttttctcatatatcattaaaatgccaaaataaaatcccaaaattgtatttcgggcccgaacccggtttggcccgaaatacccagtcgtgactataccgcgccgacttgtcagaacacacctaaaaaaggacaaaataggcatactatataataatatagtccataagcacatcataatataaatttctcaattttacccttcccgggtcaaaattactaaaatgctcctggctcaccaacggggtcttaacatgtcatatctcatattaattcacatatattaaattatataataatataattcctcaataacacataattatctagtaagggttttgctaatccaagttgaatcttagggtattacaattaccccctccttatagaaattttattccaaaatttacctgaacaattccagatatttttgctgcatatccgtcttgagttcccaggttgcctcctccactttattattcctccataatacttttaccagtgtaatcgtcttgtttctcaagacttttctcccttttgtcaagtatttgcactggttgttcctcatatgaca

SEQ ID NO: 238323 - DNA, 1621 bp, Cannabis indica
tgagatattacaacaaataaaaatcaataaatattttctagtattttaatttcagttgttcacctttaatttttgtcagccacccacagtggaactactacattgtgactgctctcatgtagaaattaagttttcaacaactgtagacaatgtcaccttttcaagagctttagacatgtagacaacttactctccatcttcatcttgtgaatcctcttcaacagcctaagaataacaaccgcagatcgttcaaatatgggtgggtcgtaccacatctaacaatcacaacaccatcttcctacaacaaacaaatcaagtctcacgtagagaatggagatgaagagaaattaaagggaaaaaaattagggcaaataccttttggtttggccattttgcatgttccatcaccattttcatccagatttctcttcttctcttatcagctttgactatggagcttctcaaaatagattttaatgttttagtttctaatttctattgtttttaatttaattgtaattatttttcattcaatctaatttttatatcttttattttcattgtgcgtgacatgacatttagtgttcgtttggtacgttgtattaagttatattgtattgtattatattatattgaattgaattatataccatatttttatataatactatattaaattttaacttatactaaaatattattcagtaaggtgcccataaaaataaataacacataattttacataaaaatattgcacaaaatacaatttaatataatactatacaatacaatacaatgtaatacgacgtactaaatgaacctttaaaatattgatctgtcatttaaaatggtgacctagcaacctcaatatatgtccatgtaggtggttaatggggtcagatggacaggaaagagattttataacagtacaatggtttgtaaaggctcaactgtaaaaaaaaataatttgggggtaaatgctaaaaaataaagttttagggagttttgttgcaatttatttgaaaaagtaagtctccctttaataatttgaaagtaattttctcaattcttttttttttttttttttctttgtcactcttctcattcaaatttgaatataaaaactccaaacataataagtttcattattggttagaacattattacttataaaactagtgggaagtgtacttggtttgtttttacagatggagtccctacattagggttgaaaaagctgaaaaagttgaatgaccaaatattatttgcagcagaaaataattatatatgtgatgagatagatatgaaaatgaatggttggtgatgaatcttgctgttgcctatattttattctattcaagctttgcagtactctgttcactccagcaactgttagattaatagtaagattgcatcgaactatttttgatcattaaaagttataaatacatcaaactaagccctataatatatactatatcaaattttgatagaaaatacactaaatgggacaaaatatacatcaaaactttggttgatacactattcaaacccaactaataataagaataataataatatgatgatgatataaataccattttagaaaaagaaaaaaaaa

SEQ ID NO: 238324 - DNA, 517 bp, Cannabis indica
tgtgactaaaagtcatatttagctacaaaaaaattatgttatgaggaaaaattgtcaataaatgtagctgtttttttgttgtttctcttctatctttttaattaaatacatacaatacatatctcaagatttaaataaaaatataatttaaatattttaaatgagaataagcacatatatgcatcttggaagaacaaacaatgattcttaaattaaaatacatatcataattaagtacatgaaatgatagaacatatataattataacatttttttctcttcaacacttaaaataatataaagtttcgtgttatatatatcttaaagtgtcaaataggaatgatacttgattttgattgattcaacaaactctatcatctcactataggccttgacatcgacttctaatctcataagagccggcatgaagagccacaaggcagtagtcatgagaaacgccaccgccaaggaccccgagaccaacggtggcagccgccacttcctgttaacggccttc

SEQ ID NO: 238325 - DNA, 1466 bp, Cannabis indica
gacttttttgaagtttgctgtcgatgctgaaaaagtcgtcggagaagctgctagcgtcaaaaaagtcgtcaggattggcattatcaacggaaaaatcaccaagaaagtagtttcttcatcaagaaaaagaaactggtttttgatgattttttcagtaattttttagcgacaatgccaatttcaacgaattttctggcgcccacagcaactctaatgacttttccggcaccgactgctactcctacgacttttccgacaccagcagcaaactccgatgattttttcggcatcagtgacaaataaaacttcctgaacaaataaaaatattaaatatggaatttgaaaacctaattatatatatgacatatcaaataccataaaaagacctaaaaacaaaaaaaatacaatataaattggtcaaacttaaatgtgtcatatttattataagaacctttaaaattctataataagtgtgtataccctacctaagaaatgtatcgaaccacgtattcatattttcggtaaccaaatagttatagtttatattgtatttttatatatgtgatagtataaattaaggataattaataatattgaaaataaaaatcaaatttatctattataagcgtgtgtattttattttacacaaaaatgatatgactgattatttatacaaagaaagatgatggaatgtattgatgaattcttaaaaggtctgtcatttagtcaagttagaactctctcctctcacctgatcttatccagctatatgatgttttggattatagtttcaagacttgagaaagatgaggaaatgagaaaatgaccttgtctgaatgacagaggctcaagacaatcatatatatatatatcgagtacaaagaagagtaacagaattctattacattgtacaactatgaggagtaacaactccacctaaacgctcagctactaacagaaaataactaacattccaactgtattaactaactacactaatactcccctcaagcaatatttagtgtaaaccaaatgaagcatattacatataaaaaattgaaatcgtggagaagataaaggtttagtaagtaagtcagcagtttgatcttgagtaggaatgtagcaaacttcaatcctcttttctacaatttgttctcgaatgtaatgcacatccaattcgatgtgctttgttcttgtgtggaaaactggattcaaggttgaagtttgggcactttgattgtcacaccataaaacaggtggtgtcttatgtagagttatgctaagttcgctaagaagagaacttatccagaccaattcagtggttatagaggcaagagcacgatattttgattttgtgctggaccgtgcaactgccctttgttttcttgatctccaattgattagtgtaacgccctaatgctaaggcacgttacagtgctttttcaattattgtgcaatctttgcta

SEQ ID NO: 238326 - DNA, 964 bp, Cannabis indica
atagacaagcccactgactttattagagttgctcgaccagctttggataaagtttttgcttcccatccctgaagctttgtcgtgaggttgtcaagaatgaaattaaaatcagcatctttctgcctagatctaaaaaggggcaaccccaaatatttaatgcatccttcaggataatcaattcccaatgcctccttaatttcaccccgtaagcttatcgaggtgtttttactaaagaaaatagacgttttgagcttattcacctgttggccagaccacgagcaaaaattctctaaacatctccagaatctattcacctctaataaattagctcacccaaccagaattaggtcgtccgcaaagaaaatatgggagagaaccggaccacccctactaagtttaattccttgaatgaccccctgatcaagggcaagatgaaataatcttgaaagcacttctgctgcccaaataaaaagataaggggagaggggtcgccttgccgaagcccacaagaaggattaattctcccaacttgccccccacttgagacaaatatttagcgtggtactggagatacactgcgagatccaaaggcggaatttctgggggattccatagcaatccaaaacatgatcaataaatctccagctcaacttatcataagctttgaccaggtcaattttttattgcgaaaaagccctccttgcctctctttctgttgaacgagtggataatttctttggacaatgacattattatcatggatatttctaccagggacaaaggcagcttgagttggagatatttgatgctctattattctcagcaggaagatcaaaatgtgattaagactagcgttagggctccacaaggcttgtttccaaaaaagagataactatgttttaagtttagttaatagttggtagtctgttcttttggggttagatgttgctgtagcttgcctttg

SEQ ID NO: 238327 - DNA, 831 bp, Cannabis indica
aggtcttggttgttgtctgcttgagcggcctgttgattctaatcacccttgacgtacttttgcacatgcggattctaatctaatacctgggcgaagggaaatatgcatagtagcctgcatttgactagttatcattgtcggttattctagcagggttgtggtgaagacatccgaccatgtagaagactatttgcccagagtaacttacaagagatagcaacttcagagaataatctcattgtgtccagacacgaagatgatccctattatcgtgggattgagacagacaaatggtaagctgttcttgtttcctatttcatacattgtaattatagaaacattgtaatttcctattttgtgcattataagcaaaaaggaaaccatcccttatgtattaagcccctataaatagtgacttagcctctctatgaaagggatcaaaagaattgcctcggagagagattctagagagaaaacagtgatctaagagagaaacatactcagagatcagttgtaagagctttcaagaggaagaacacttcgttccttctcttaagtcaatacaatacaagggtagtaggctattaccaaactaacggggccaaacctctttaaaatttggtgttcactttactttattgtttttgttctctttttattatattacttaatcactttattatctgactcactgtcgttggctagaagagaggtcaaaaactacaacatcaatgatttacaaataaccaacaccataaaggtgtcattatacaaaaaaaacccctaaaaatgttgttggtgatttcataataatcgacggcataaggtctc

SEQ ID NO: 238328 - DNA, 862 bp, Cannabis indica
tcaattttgtttagtaaaccgatacatgttaaaataataaaagtaataaagttatgtaatcactagataattttcttctatatataaaagtttattgtctatcttaagagcatgcagagataaccgtggagaattaggcaataaattcttaatatcagaaaagataatctcataattgagagttgtgacttccgacccactaatagaacacttacaaactaaagaaaaaataataattaataaataaaaaatatttaataaaatatgaaattttatataaatagtatgacatagaattctctcatgtaaagactaaggcttatatgttcttgtctccattgatgaaggtggctacagtcaagaccgatcttgagtattggtaggccttaaggaaataaaagttattgagctctttatttaaaatacatgtagtatttttaaaaatatatatattcaaaggtaaaataatttttttggcccctgggctaggtgggctctaggcgcgggcctagttcaccttagctcagatccaaccctagctacatcacatctgaagtgttattattaaatcaaactgatcttacaaaattaaaaataacttattttttttagcaataaacttttattgaaaataatctgaggataatataaagagaaaagataaaaaattatctatccaaactaattcatcatccatcctgagtacatgaactgttaattcatgtatacaataaacatgaatcagagatgcctcaaaaaaattgaatagcaaactagcaataaaatctaagaaagatcctacttcaaaaccaaaaagaaggatctcatagagtatacagtaataaaaaataatcaaccaaac

SEQ ID NO: 238329 - DNA, 1291 bp, Cannabis indica
agatttggattcaactgttagcactcttagaattaacactataagagaactaatatttgatcaattaggaaagattggattctactattgtataacatgtttctagccactcatattattaagctcccaaaacacaaatagtaagaattatcttctctgagaaatattaatgagtgaatcaaataacttaatgaacacaaacaggagttcatgtatactcaggattcaggctgatctactaatgatcatcattgtgatatgataaactttttttcatggtaaacgacaagttaatgaaagatatttattacatatcgatccagtcatgcataatctaattatacacaatacctttactacatgtccatctacaaatgtgatttgaatcaaaatcacacacactagaagaatagtgtatagtaaaacgtactttgtagttccatattaaagattcttaatactttaatacaataccaacttatttgttcatcctataatcttacttcttttgtacatccttacaagattataccttcttcatataaataagaaatttttatatatttaataattatactttgacaattaatatattatttatcttataattgtatctcatatactctctaatatattatccattaattacatacttttagagcataaatcctaacagtttcaaggaacttacatgtgatctattcagctggcccttagtaacatggggcttccaaacaagatcatgccaaacatttcccgcacaaggctgatattaataaattgtgttgccttccaggaagcacctggctggattactaatatgacggacagaagagagacgatcaacataccttgcaagattgcatcataggtaatctcgtaaaaaagacaagtctcaaagaaagcttggctgggctgtcaacacaccagctagggaaaatagaccaagaaagttcaggcaggactaaacaggcttcgatttattcctcaacaaactccatgaatatctccaacgcaaatacgagtttgactcttcaacccgaaagtataggtgtttcaaacaaattttaactccaccctacaatatagagatatttactttttgttgctacctttaaggagcttattgtaataatcttcccatataaatagttaatgaatttacagggaaagggacccagaaaatcattatctcaactctgagagcacttttgtgaataatattctctgtaagcatcttgagagctgtagctagaattaactttttctttcttagtgatctgcacaacat

SEQ ID NO: 238330 - DNA, 759 bp, Cannabis indica
aaaaaataaaaaataccacctgacagtatttttgtaaaaaaaaataacaaaaattagtatatcatgtaaatttccctaaatataaatataaatgaacaagtgttttttcttaattaccagaaaaaagagtcgaatatctcttccacttgaaatgtcataaaatttcattaaaacccaattcacatttctaaagaaagatctacatgttgattctggcagagtaaattcatcaaaatgtggtggattcctgtaataattaataaacagtaaaatttcaatgtaaaaatatactttaaactaaacaaattatattttaattgagatattataattaataaatagaatatactcgaaaaaaatatcaaaaatatatactataataacaataattataaataatttttaatattatatcataataaaattatttttgtgtaaatataatatttaaatatgattataatttagaaaaaaaactatcaattttacataaacttataaactatatgtacgtatatattttattaagatataattattcttatatagagatatatttttcttaatatatgatttaaaaaatatataattaattatgatttagagattattcttatttataactgactcaatacttaattttttttatataacaatttataaattattcttgaacagactcggccttgagcataggcggactaggcttgtgcctagggcctacctaaaaaaatgatcttttaaaattacataattttt

SEQ ID NO: 238331 - DNA, 1189 bp, Cannabis indica
tatcataattaattctaaatcataaataataatataaatttgacctaaaaagatggaaaattgagtataattaaattaaaagatactaaatcacaaccgaaaacacatatgtataatatttaattaaaaattttacaaaaataaaacaaatatatagtataactacttaaggaaaaaatatagtatgattgaaaattgaaatgaattaataaataaggaaattaataattaaaaaattatgcctaaaaatatagttgacttataaactaatgataataataaaaaatatttattttaattttgaatgcaaaaatagctaaaattgggggagaaaaaggagaattactcatgagatattggacttgttaatggccgatcatttcacgatattctcgtcgatctgagcgagagaatgaaggttgcatctaacaatggtgtccgcaaaagtacacgtgtcctccgccatatgccccggcggagcatccactaagtacgattccactgccaccgtaccggagatcgaagaatgaagagtcgtaacagatcggtagttcgtgagtctgtgttcgccgccgactatgctggaactgatgatgtggcgttctttgtcgaggatctcgagtctaaccgaattgttattcgctgaaagacctaaaacgacctgaacaaataatatatatatatatatatatttgtacaatatactaaatgcaaataatatatatccaataatataaaacattcacattaaaataaaaacacaaaactatgcccagatagccggagttgaagtcgtccgctgtctctaggagaggatgaggcgtgctccgttgttggcccaccatggctttgccgtcgctccattgagccaaagaacgagaggtttttgattattggttcattatgagcatactttaattctgcacggattcgttggtggatccagtgtagagcataacgatctgaccgtcgggaagaaaagtggctgaaccagtccagactccattgacgtcgtaccagttgtccgggaccatagcaaaaggaaggtagagccctttagaacatatttgaaaattgttattaagtatatatttttcaaaagaaaatatagagagattttgataatgtattttatcatttgtctttggttgcatattatttgttatggtggcatttgataatacttttt

SEQ ID NO: 238332 - DNA, 1235 bp, Cannabis indica
gtaccacccttttttaccactatttggtatctcacatctgttcttcattatcgtgtagacttaagtttcttattacataaatcacacgacatgtaataaaaatcttggttgattgtttttaatatgatttcagcttacaataccaataagtatactttactagaaacaaaaaaaaaaaaaaaaacaaaaacaaaaaaaaagaaaactacatatgttaaaaaaatttaatattatattaattataaaaaaatcaatgatatttaattaagaagcaaaatatcaacatattgcaaagagacagaagattattacttcactgctacaacagaaaaagaagcagaagaattactacaattgacgttgttggattgatgtgatgaaaccaataacaaacacaacaaggatgaagcatatagtccaagccttcctctatcacaatcacaacaacaacaacaacaagtgtcgcaaaccaataataatgcatatagtagtgaaattgaatcagtataagaataagagaaaagtattagcattactctagatgatgatgataaaatgcaactacactaactgaacaagactatgcacgtattcctagtagtggcggcgtagcttgctatataccaagccttcctctatcacaactacaacaacaacaacaacaacaacaacaacaacaacaacaaatttcacaaaccaatgataatgcatatagtactgaaattaaatcagtagaagaatgggaaataagtatgggcattactgtttagaggcatattgtactctaaacagtgacattatgcatctttctgtacacagtaaaaggctaaaggccgaaggaaatatgattttccacaaataaacatacgactttaactcttgtacaatgtaagaataccactgtctgcaccaacatatacattacatataattaaataaaaagtgtaatgtagtcaagatatagtgactagatatattaaatgcatatgggcttaaaaattaaaatacatgtgactggtttgaccctactcagtcaccaaacagttcaatacccaatgcaatgtaaacaagaatgaaactacaccactccaatacaaataaataaacgatcgggctccaccatgactttagtctatgttatttcaatatttaacgaaaaaaaaaagttgaaaaacatgattcagcataaaatttcataacttgttgttttcctaaatatataataattcaaatct

SEQ ID NO: 238333 - DNA, 1374 bp, Cannabis indica
taaaagatatttggttagcctggctgtgagtgaaaaactcgatatgcgattaatggatgtagtcacagcttatttatatggatcactagatagtgatatttacatgaagatccctgaaggatttaagatgcctgatgcatataattcaagcaatcgagaaatgtgctcaattaaattacaaagatcattgtatggattaaaacaatcaggacgcatgtggtacaatcgacttagtgaatatttattaaaagaaggatataaaaatgatcctatttgcccatgtgtttttataaaaagttcaagtcctgagtttgttatcattgctgtatatgttgatgatttgaatattattggaactcctgaaaaactttcagaagctgtggaatatctaaagaaagagttcgaaatgaaagatttaggaaaaacaaaattttgtcttggtctacaaattgagcatttaaaatgtggaattttcattcatcagtcaacttatactgaaaagattttgagacggttttatatggataaatcacacccattgagtagcccaatggtagttaggtcacttgatgtagaaaaagatccttttcgacctagagaagaacatgaagagctccttggtccagaagtaccatatcttagtgcaataggagcattgatgtatcttgctaattgtacaagacctgatatagctttctctgtcaatttattagcaagatttagttctgctccaacatatagacattggaaagggattaagcacatactccgctatctccagggtactattgataaaggattattctattctaataattgtgggtcacaacttattggctacgcagatgcaggatatttatctgatccacataaagccagatctcaaactggctatttgttcacttgcggtgacactgctatatcctggcgatcaacaaagcaaactctggtggctacttcctcaaatcatgctgagatacttgcaattcacgaggcaagtcgagaatgtgtttggttaagatcaatgacacaacatattcgaggaacatgtggattaacatctaataaagaagtaccaacaattctctatgaagataatgctgcttgcatcgctcaacttaaaggagggtacattaaaggagatagaactaaacacatttcaccaaaattcttctttacacacaatcttcaagagaatggtgacatcaatgttcaacaaattcgatcaagtgctaatcttccagacttatttcataaagtacattacgaacatcaactcttaagaagatagttcaacaagattggaatacgtcgattaaaggatctccatgaatgccaaaaagtgaaggggagtaatttcatactactactctt

SEQ ID NO: 238334 - DNA, 937 bp, Cannabis indica
atatatatatatattttattaaatcttgaatatataattactcatgattatagtgttatcaacacaaagaaaaataatcatgattatatgctttaaactatttagtctcataatttatcagtgtattagatttacactgacatgattattagcgatatattttacttatacttgaataagtagaatgtcttttccatagcactaataaagtaaacttatatcggatgtatcgattatacatcggattggaccgatattgacagtgaaaaatacattataaatttattgttatgtcttttttaagtcaatataacttaattgatctcaatcctgagatggttaagttttagcttaattgtactatataggttcttagacttgttcgttaccaggttacccgtaggactagtccataattacatgttgagaattcggtagcgcaattgagtgtataatctataatttatataactatttaaaagaaatgatagtttccttatagcttggctaaacgatataaatagaagagctcttatttcagtaactatattagtttattgaaatatcatttataaggagctaagtgttttaaggataaaatgcattgaatggtaaaatgataaatttgtccctacttgatgtaaaccgtttatagaggataattgattatttagattgaaacaacagataattcattatgtatctatagttggtatatagagcattctatgtaataaagaaagcaattctaaatctatagtggagttaggaagaattaataagctaggaaatttacttagtaaactttacatttacttattaagagcttagttacataggcctatgatccctcacattatctgggataatattaccttgtagactcaatcaattaatttaataagccaattaagattctaaaataagactatgtctt

SEQ ID NO: 238335 - DNA, 753 bp, Cannabis indica
gtaaaataattccaacagtgtcttacctataaaatatagggtcttggttcccgagctcctcactcattctgtacaaatagtaaattccatctaaaaagagtagagagagtttgaaagtccgattacccaatccgaagcaacacaaaaattaaagcttaaagatcaatggctgaaggtattacgatatctttcgtcgccatcatacacacttgatatgtttttattattctgctttgcatatcgatcgtatactttattttttatataataaagtgtaacaacatgaatagtgattaatgtatatatgtatatatataaaattaactaaattatgagttaattttgatagcaaaagaactatgtggagtcacagctttcctttattaaatttattcatttgtatgacatgaactgtaaaagaaaaaaaaaattgcaccgaatctcatattgagaaaaattggttaatcgagtgtctgattatccttaaatatttattacaactttacaagtaaagaacaaagttttaaggggaatttgaaggagaaaacacgagggaaggaggtcatttgagcacatcaaatacatgaaatatgaaaatgagagcattcatctatttatgaacatagccaacattcttgtattccttcattttttttttcctctttacaaacacatgttgatctgagtcagtagggagcaaaaacagtactagaaaagtgagaatgttcatgaagatgaggcatcagctcctct

SEQ ID NO: 238336 - DNA, 955 bp, Cannabis indica
aaatttctcctcgctagtctgctctgttgaagatacagtatcattcactggcagttacaacacatactttatcttaatttgttgtcattgaatttataattttctaagtttgtttctgctgcgaaaattaaatggctatgcaagtcataccatcacaatttgtaataaatcttaataagattaagtattagaccaaaaaactaattattaattaccaattaattaaatatttttttttctatttaatcaattaaaaagtttgaggaaaataaataaagtaaaacaaaaattcaacgatggaagaaataaacaatcagaaaaactaagaatataatgatcctcaactatcatttgttttatttcttaatgtaattacctaattttcttcattatattcaattgataagttgaatttataacaatcaaagcatattcaagttttaattttcagaattttatttcgaattcatagataacaattataagtgatcaatcaataattgtaaaataaatcatattgtattgaattcaaataagagatgaatccataaaagaaattcaagtgattcacataacaatcttaaaaaaaataatctatagttcatgctatttaatataaaacaaaaataatcaaagagaaacataaaattcaagagaaaatatgatgaaaaaaaactctaggtttgtctcctcgatctagtctctacctttccaatctgatccaaagtcagtttcctcttagtctcaaaagattaaaaacctaatttttcctcattttgggacaaaaatgcccctaaatgacactttgggtagagaatcgcgcaaaggggcgctacgacgtctaggagcattttcttgatcactctgaaagcttactgtgatgactgattgtattttggtcataactctttcaatgtatctcggaatcggaccattcaagatgttatgaaaagct

SEQ ID NO: 238337 - DNA, 724 bp, Cannabis indica
gaaatcctgtgggagtgggacgctgcccccaattgtggtattcttttagtggctaaaactcctcctaagtatgggacgcttgacttagcacgagtttaatccaatctatctttttctttttcctcccttggagttttttctttaacaatgttctatgagttgaaatcatcaaactaggttctccaacaacctctgattttgcccctatgcagaagatctggtgggtttttccacactactcatcgatagtgattcgtctcacttatgaatctatgatcataaagtgaacttatgcttgagcaccaagaacataaaaaataacccactacacttcaacaatggtttatattactcactacaaatagcttcaccccagttactaagagatcaacgtaggggacaagagcagtcaaactcaaacagtatcaacgaaatttcaaacataacaacgacaagattatttattgttattgttattacatttgatactttttgatgttaatttttttagtgtatatctcaattaaaatataatttatttggtccaaatatatactattgtatatatgaagtatcttgtaatttaaccatacatgcttttggaaagaagtgatttggattggaaaggattgttactcaattacacaaaagttagttatattgatatataataacaagacaagtatgtgagttttttttattgtcgcattatttttattattac

SEQ ID NO: 238338 - DNA, 662 bp, Cannabis indica
gcatctcttcagccgacaagcaaaggttgttggaagttttacaaatggaggagggttcttttcttttgaagtatctcggtgtaaatctaagacctaccaaatggcgagcagatgactgtggtatcattctagacaaattacataaacacctgcacacctgggctagtaggaacctctcttttgcaggaagggctcaactaattcattcggtccttcttggtgtcaggaactattggatgaatctgttcttgcttcctcagaaaattacgacagctattgacaagtattgtagggactttctttggggctctaatggaaataggagcaagatgcatattccttcatgggagaaagtctgtcttcccaagaattatggtggtcttggtttcagggagggaaagaagtggaacatagccctcatggcgaagtacatttgggcaatttcgagtaaacaagataatctttgggttaggtggattgatgcagtgtacttgagagggttgagcttttggacagttgatttcaagaaagatgagagttggtacttcaagaagatccttcgacttcgatcaactatcaacgagtccatagtcatggctgctgagttgagaggtaaattcaatgctaaaatcttttatctctcttacagtcaagctcagcgt

SEQ ID NO: 238339 - DNA, 590 bp, Cannabis indica
attaataaaagatgagaaattattctatgttacttggttcacatgttactttcattattatatgtttaatatataaattctactaaattccgaatatatatattgttattcatgattatagtattgtcaacatagtagaaaataatcataattatatgcttcaaactatttaatcccacgatttatcaatgcattggatttatactgacgtgataacattactacaacttacactattcacgttgatcaacgctaccgttcatttcattaaccgacgtgaacagtaggccataaatttatgcgaatgtttggaactaacactaaaaaaatgttatttgtgtttgttatatattagacgctaataacataatcgtcggtttatagaagttgagtatgactatactgtcatttataaacactcataatacttcttttgacttttataaacagacgctgcagatcttatttcttctaaatctaaattgcaaaattagcccaagccaatttacaccacagaaccctaccatatatattgaacttaaactttctaacccttccacaataacaaccgcccaatgttctctctctct

SEQ ID NO: 238340 - DNA, 629 bp, Cannabis indica
atattgcatcaccggaaccaactatatcatgattcaaaatcgcaccatcaggacctaaaccttctgcaaaaaatgtccagatgaatcgagcctgttaaagcccttgtacaacaccgcgattaagaatcgttgttcctccagagcctattaccaccttctgcaactaacttcaatgtaccatgaatcgaagggagctcattgtgcactgccagcttcacagacgttgtcgactgcccacccatcccacgactgactatcgtgacttttaaatactcaaattattatcattactatcatcaatttccaaactaaacaatttgtacttacgtgtcgtgcttgtacctgtcgggcccatattgtgtcataaggctcgacccgtatttaccacttttcttttttgaaagagatttagagcactagttacaaattagttatgtgattatagtgagagttgtttccaattccattatttaacgattcgcattttcttgtctcttctcttctcttctcgtcttctccttttcctttttcgggcgagtcttgtctttgcagcaccaaaccaaagcaaccaaccacaacccttccttcttctttctattactactactactactctctctctctctctc

SEQ ID NO: 238341 - DNA, 925 bp, Cannabis indica
aaaatcacaacatcagtccagcctacgcctccttaatcaacttattgttagtttttaatatatacaacaaaattattttaatatgatcatcatcgtgtctaagaattctcatttctatatatattgagtaatttgtggtacaaatacctaagtttatcttttagttgcaatttaatacctaagttaaaattttggcgccataaataccttccgttatactttcagacattttgtaggtaccttgctgttatcttgcacactggacaccagctggcatgccacatcatcttattaaatagccacctaatattaactattaaaataaaaaaattaatttgatttaaaaaaaagtttacatagaactaatttattaaatttatatgatataatctgatattaattattaccaaataaatagttaccttgaaaaacatatattcttgaaaaaacgcttactgtccttaaaaaaaaaaaaccctaaaacttaggaaccggaatcggggaaagagaaaggttgggggctggatattctccgaccacgacccaagaattttttggcgtgaccttcttgtccaaccacgggaggagtcatcagcgtcggggagagagaaagtgttgggcgagagcttcttctctgaccacggcaaccagccattagcgttgaggagagagaaagtggcgagaccctcttctccgaccacgggaagcgacgggagcagttgattatggcatttttcagggctggtggtgatccccctaattacggtaagatttttggccaaaaaattgcgagttgcttttaaaatgtgtggattttttgtgattttttattttgttgggttcaataattgaggttagaaaggagtttgatacctatagaattgtggttgttatataatagttttttttttttttttagagttat

SEQ ID NO: 238342 - DNA, 833 bp, Cannabis indica
gtagtaattaaacactatagtaattacgatatattttaaatacaatgtgtatttaaatacaaagtgataattacatatgaattcttaatattttatgaggcaaaatatttagtaattacacagaaaaataatatttttttagtagttaatgtttgaaatggaaaatttttagtaattaataggaggccatgagaattagaaagtgtaattggaactcctcaattacatctaattatataatgggataataacataaaacaacaatttttataaaaaatttacaattttacgtttaaagtgtttttttttttttacatttttacgtcattctataaaaacacaagaaatctacatgaaagtaacaagaaaacaatattaaacaacatgaaaaataatatacaaacaacaaaatagtaagaatacaacataaaaatacacaaaagactgtattttatgtaaataaaatctaaaaaaccgtaaaaatattaaaaacttcttacataccatatttttgtaatttttttgttgtttttatgcttttttgaaattattcccttatacaattatagtgtaattacataatcaaacaaacatatcgaattgtataattattttcagttacacataaatctaattatatcgtgacttttgaaatacgtcgtcttcgcattcaattgtttacaccaatcttcctataaacacacgaagaaaaagcaacattaggaaattaaaaagattaatacatactaattaaatcatattttagcaatgtaaaatatttttgtacaagaaaagtgaacttactaccttgtgagaatgttgaccaattcctc

SEQ ID NO: 238343 - DNA, 617 bp, Cannabis indica
gtttaagatttattttttatattttttttaatattctataaaaacaacttgaaaataataagaaaattatctaaaaataataagaaaataacatcaaaacaacaacaaaaaaataatatacaaataacaaaaaatcaacaacaaattaacaaaagtacaatataaaaaaaccatattttatgcaaataaaatcataaaaatataaaaatatttaaaattttataaaatcgtatttttataatttattttttatttttatatacttgtgaaataatccttttaataaatgtaattagttaaaaacttattttcacgccattaatcactgtgtaatttagatattattttattagccatggataaggaaattgttgcttcattatttattcatgttccaaaacagagaagttcggaaatattttgctcgtaagaattagcgaaatacccaaaaaaaatcatagcttgttatggtttttaacaaaataaattacatgtataaatggtaaaattccgattgaaccatataaaaagagaagattatctttaatcttagtatgatcagcaatgattacacatgcatccatcttcctttatatttatttgatcagaaggctaat

SEQ ID NO: 238344 - DNA, 810 bp, Cannabis indica
acatacttaacaatgtatctccttgtaatataggatcatcaatgcatctccttgcattacacactcaccaatgcatctcctcataatacatgctcaacaatgtatctcctcgtaatacacaatcaacaatgtatctccacgtaatacatgctcagaaatgtacctcctcatattatacactttgatatgcatcttctcacaaagaacatggtctgatcaagtcaaagacagcttctttgtcttttaaatataaatagttatttaacttatgtaaatgttcagttatacgtgaaacatgggcattcaacacccatcacttgtaaattttcactaagataagactgagtaaccaccaccctattcctatatataggggttcattcaaagcaaagagagaggcaatttgatacaaaactatgccaaattttaaacacaaccgaaactcaaaaataatattgactcatggagtatgtagtgttgacctcaaaaagtggccaaccggtagtggagttgtattaacactgatgcttgccacgtgtttcacaattagaactaataagtaaaagaacacaacaatttttatagaggtttgacctctttagttagtgggtaatgacctattgcccccgtttagttttattgataccgagagataatactattcaaatcactataggtgggatctgatatacctttctttgaggttacaaagtatgaatcagtaggtagatctctaaagatagagagatgaatccttggatgcgtgtgagagagaaaggtggagaaccctttgggcgtgcataagagata

SEQ ID NO: 238345 - DNA, 863 bp, Cannabis indica
agaggtttgcggaaacctcaactttacaatcctttcaatggcatccacgatatcaatgagaatctttcagatgatcagaaggagttgtttcgaaagtctccttttggccactttcttgatgtgagcaacttcaactatcaaatacagctcattcatctcgttcttttgcggcagattcacactgaaagggatgatgttgagctctggttcaaattgggaaacaaggctgtgcgttttagaattgaagagtttttcctaataaccggtttggattgtaagaaatcctatgatgttgatctgttcaaatcaaagaagttacttggttacaaggaggatattttttatatgcatgggcttactgagaaggttactgtgagggaagttgctagtgttttctttagcggtgcattgaaagatgatgaagattatgcgaagatagctcttgcatacttttttactgggtatttgtatggttatccccaaggcaaaaagattgacaactttatatttgttatgattgatggggatgattttattgaagtgtttaatcagtttggatggggaaagttattgtgggaaaagactttttatcacctgaagattgcattgaaggatggaaacgatatctttgaatagcttgataagaaaaggatgattgagaagggttacaagcttaaaggatttcttattgtgtttcttatttggctgtacgagatcattccgtctttgtcacctcgtttttgcaaaagaatcgacaacaagagtcctcgtgttctgaattgggagaatagccctacatcggaatttagtgagttggttcaggatgtgtttaacaattcgaaggtaattttttaattcaaatt

SEQ ID NO: 238346 - DNA, 1431 bp, Cannabis indica
caaaatcagagtcatcctcctcaacacaggtcgtttaccattgttctattagctaaagatttcaatcccattttaagactttcgtttgaacaggggaaggagttgatgaagaacgagttacaactatatttatatatggattaagagaaaaataaaaggatagaaaacggttatgggattcggttaatgggagttggaaaaaaaatttgaagaacaaaaagaagaggaaaaatggagttgggatcatggagaagaaagagttcagctatggaggttgaatatttttttaaaaaaaaaaactaaaaagaaatagaaaataaaaggaaaaagaagagaaaaagagaagaaaatgatggatgattgattgatagaggtcatagtctattgacatgtagtgatgcatgcatgaaatgtgtgtgtaagtggtaaaattgtaataaaataaagttgaagagtaaaaatgtaggcttaaccgtgtggtagtattttagtaataaaatatgtattttgtatttttagtgtaaattatttatatattaatatataaaatttttttgttaaaaaatatataattatttaaatatatatagatataaattcaaaattattatacatccagcgcacggtttcattttctagttttaatataaagataaaaatatcaagtattttttttttctattagaaaggatatcaagcctttcttataatcaaaatatgcataccaaatcaagcaagggcattaaggaggtaaacattaatcaatgcagaagtgatgaacatcttatgtttagtgtttagcattaatgtacgatagtcgtttcaatagaattaatacaaaaattgaataaatacaaaactaatagaaatgggtaaaatattatctgttcaaatcatttataaataaaatggtttttcaaagaaataaagtactgaattgatcagtcagtataactcgtatgaaagccactttaaatgaatacccatacttggagccaaaattcatacctcaagaaacctaacttcactgctcaaacaataacaattacaaataaagatgtcaatcacttttgagtttctagtactttcagtggactcaaaatagcaatatttaattctttgcatatgaagaaaacatacaatgacaaattggaatagaaaattgcatggcaaccaaaattgaggtaattatttttcaccatgctgagaaatctggttctttctgggaaatttttccccggaaaagaaagtgtacaaacttgttatacattagtgttgttcttattttctagtagttggcctcaataaatacgaaaacatgtatcttaattgcaaaaacttttgtgggcatatacaaaaagttgcattatttttcttactaataaagtggcacaaaacatggaacagtgaaagaaaaaaaaacaacaacaa

SEQ ID NO: 238347 - DNA, 1949 bp, Cannabis indica
atttggttgatgcatctttatctcattgtggcctgaatatgcatccatgatactcaagatttcatgaccagctgtggcatctactagcttgtcgatctttggcagcaaaaagcaatcttttggacatgctttgttctggttggtgaagtcaacgcagactctccactccttattgggtttaggtaccaacattgggttggatacccactacgggtataatgcttctgttatgaagtcattggcccttagcctttcgacttcgcctttaagcgcttgggcatgctccttgcctagcaactgcctcttttgtagaacaagttggatgcttggatcaatttttagtgcatgggttatcacgaagaggtcaactcttactatgtctccatgtgaccatgcaaaaaggtccaagtttgcctttagatattctatcatgattgacttgatttatggggctaaatcattactgatcttcaatcttcttattgggaaagtgggatcaacctcaacttcttccaactctttaagaggtccaaagcttcctacaagatccccaaagcgaggatctatatctgtgtccccaccttaggctagacttcattgccccttgctgggctcatcttttggacttttggcaaacatcttctccttttttgctttggataagatcgagttgtagcggtgacaagaagactactcgtctcccctcaggcatgccactccatgccgtattgggaatttaaggcataaatggtagatagacgtcaccaccttcaggtcattgagggtgagtcgaccaatcatggcatgaaaagctgagggaacatcaatcacgacgaattgtaccattagtgttctgatggttggattttctacaactctgacgggtaatctgatatacccaacatatgcgataccttggccaaagaagccatacatcacatggttgcaaggcgccaggtctttgagttggagccccatattttcatatgttattttgaaaataaagttggaggaggatttgtcgtccaccatacatcttgccacaataatatttccaatttgcatagtaatgacaactaccacgtgcaattgtagagaggcgtaacaaaatgtttgaaactcattggcatagtacaagattgaggggatagtctatactgtatgtttggtagactagcccaagttttcctgagtgacatcgtaagccgcaggacgcacttttgctgaaaaggaagctttttggcaggagtgtggaagtagtgcaggggccgtcagatccttgttagtcacgacactggtcgagagttgataaccgagatggttcaatttggaatagacattgaatgcttcagttacgacatgggtctgtcaagagggacacacatggagacgaagggggaagaggccgcaattgtcaaaggatgattgtactttgaagtgttcgcatgtgaattttatttgatccatatggaagcgccgagacaattgggtggaatgtgttggcttgttaaagcgccacagggcgtaagtcacatgacggcatcgacaaggatgcccaattgtagaatgaaggcatcgaagaagccactagggctaaaaagatggagcacaagcattgatatggcgctagagtttgagtggaagccatagggctgtgccagggagacttagtagtcatgtgagcgtgccaaggtcaagaagggtgctagagtttgcatgatggcgagagggttgaatcattagaacttaagacatcgtggaagccagaagggcgtgatgcatgtgtgaatcagttagatgaatgagcgaacattgcatgaaatcgacaggggtgctatatgagatagttgaattgagagtcacatcctgcaggatgcacttttagatggcatggtgtgcatgaagagttgggcagtcgggcattcgcgtgtgggcatgttgtcgaggac

SEQ ID NO: 238348 - DNA, 583 bp, Cannabis indica
ttttacaaactacagggcaaccacaaaatgaaactcaaaatgcaataagatcggaaccctctaggttgcactgtcgcgatatgtacaatccttgccaagctcatctcactgctcctccagcttagatttaccttcacctacacaaggtagaaaattgatgagtcgacaaactcagtaagatatgcataattatatacaatcaatgttataccgtctttatgcctgatccgtcctgagctcaattgctaagctcaccaaatggttaagaatgttctcaatggaagtgcgaccactgtaccatatgcactagagtaccaactctgtacttgtgttggtagggccattatatgtactactcggagttactgagtgttgtaccacatgcacgatgtaccccttgatactcgtgttggtaacactgtaactaccctaaaaccctacagtgtactaacacccttaaaaccatatttcgttagtgttagtagtgtaaacaattattaacatgcatacatttacatatatatactttatgctatcttaccgatcgtttctgtgctcacgtgtgccggttagcctgagtgga

SEQ ID NO: 238349 - DNA, 818 bp, Cannabis indica
ataaatgttgaggggtatcttagagtatctctaatataaaggtgttaaaaatctctatatcatccaaaaatataatattttattgtatctttcttccacattattttcacactctcgattctaaaaatactccaataaataatatatcgttattgatacaaatcaatattaagtcccacacaatatgatttaataaataatataagaaataattaaccaaccataacacaccacatttatataccttagacattataaaatatctaataacaatgctcttctaattgaattatgaacacaaaatgtcaatattttcaggaattattacaggaaattaagtttttatacttaatttattaatcgaattcaaaaaatttctcaattttacattacatagactaaagtaattatttggttgaaagaaataataataaaaatatgtcattcccataatatggtttgagaatttgtaaatagatttgtctagttgttcataagcaatgatataggatgtaaagaatgttctgagcaacacaacttctccgatttattaaaaaaatgtcattcaacaaaaaaataagataaaaaaagttgaattttttttatatttgtatataaatatatttttgacatattgtaagaaagatatattttgatatatctttttttaattaagttagctaaattaaatatagaaattcaaaattttcttttattattcgctattgattaaaatttaatgatctaatatgtttaaattaatatttattgttaatttttttagtaaattatcaatagataatactgttgtaccgaag

SEQ ID NO: 238350 - DNA, 735 bp, Cannabis indica
catagcaactaacagaataacttaaatcataatcaaaattcatatataaatcataaagtaatcaataattttcctatgtattattagagttcccaatgttgatttgtaattattacattacaaggatatagataaaagtattgttatgggacactaaggtgcttaacatctgatattatgttttataattgattagcgattctttataatctttattaaattaaaataaatagaacctgatattgaactatactaatagtaatattatatcttataagtgtggtaggtatcaaagaaattgactcaagcaatattcaatcatgagctgtcagtggagaatggccgtacgaatgagggaatcccaagattgattctgcaatcattttgtaatcattgttttgtaacaaacttttccgttgcacctttattctctacacgtgtaaagcctttattggcctctgcttttactctgtatcttggctactgctatttaatgaaatgaatatcaactcactcatttgagctgagttttctccattaaattcattctatatatcttcacttggtatcagagctacgacggcctccgcctatgtcgactaaccagagccaagctacaccaggaaataccggtgctggaaactctccaggaagctccgtgactcagaacagttctcccatggctgctgctccaataacattagctactcctttcagcaacaccctgagccagcc

SEQ ID NO: 238351 - DNA, 1538 bp, Cannabis indica
attcccacctcccatatccatttccaaatggtttttactggtgcaaatctccacaattgttcaatacagtatgcagccttgatagaaaacataccttttggagaactcttccaatacatcttgtcttggtaaggggagggcaacctaggaatggttagaattaggtttcccatttcactcccaaaaatttgcatcaccgtctcctcattccaattgttgccaatcgaaatatctgccagagtttttgttgtaaatcctttattcttaagaccattcattagatccacaaattcttgatactctaaccaaggaatccatggttgatgccaaaaatcaattgagtttcccatagcagcaactgagaccgatcctcggagaattgttgttcttgtatccaaaatacacttccactgataagagtcactactcttactgcttacattgaggaaactatcatacttgcaatatttgttaagcagacatgaaacccacagtttctgttcttttgttgccaaactcaaagccaactttgtcaataaggctttattcatatcttcgtatcttctgacacctaaccctccagaagctttcggttggcaaatccaatcccaagcctttagagccaaaaatctattcctttcaacattttttagccaccaatattttctcatgagagcatcaagttcacggcagttagacagaggaatcttcgtagtggacatggcataaattggcattgaagaggtgactgatttgattatagtgagacgcccagcatatgaaattagcttcattttccatccttcaagcttgttgaacatactatccttcaatcttttataatcttcttttttccttcttttgaaaacaaaggggttgcctaggtgtcttaaagtaccacgaacaagatcaatgttgagaatgcccagaatattatcttttaatccactgctcatattctttgagaagagaacactggatttgggcttgctacaggattgacccgaccatttctcataggttgagatgcaatccatcagcttgcttgcttcctttgtgttggctcttgagaagaggatagtgtcatctgcaaacataaggtgagacactggtattgttgagtgagcaatcttaataccatggattaaaccttgaacttcagctttctgagatgagttttgataagacttcctgacagaggagaaacaagaacggggagagtggatctccttgacggagtcctcgttgaggagtcaattttttgagaggacatccattcaaaagaaccgcatacgagacacttgtcacacaagccattaggaggttacgacttttatcactaaagccattagcactaaggactttattcaaaaaactccattccattttatcataggccttgtgcatatcaagttttaatgccataagccccccaagcctttcttacaccgaatcttgtggataatttcttgagttagaatcgaggactcagctatccatcgtcccgggatgaatgcggattggaaaggcgagatcaa

SEQ ID NO: 238352 - DNA, 1171 bp, Cannabis indica
ttgatgcattgaaccacaacgctacggagcgccatggcctccgcagccttagcactgaaagagtccaccaacacaacggcgcctcactgtccagtgtccatagcctagtcaacattaattttaaggaaatcagctatacttgaaacccacatgggagtcctctgaacaggtggggacttcacctaagcaaacgcttgagagccattacaccccaattgacatccaactcgacaaaaatgaccactctattatgcaccattttattttgcttgaaccaatcacaataatcatcttgatctgtttagtaggcaatggatcaataaacatatgaatacaagctaataagtccataccaaccaaacttggatcgcccaattgaaaacaaaaaagctttctgcactccggcccatagagaagaactaccccttaaagcataaagcatcacaaactgcacacaaatcatcagtgtgataagaatgattttttggggtaagaatcctgctagaggaagctcatcaggcaatcaatttgagttttggagaataaggaataataacatgaatccttaacatattatgaactattaatgtacacatatgttataacatgaaattttaaaaacaaaaattaacactatgtaagatatataatttgcaaaataataattaatggatgtggtctcataatttttaatttccttttgctcctgaacggaactgataatattaattaaaagccttaatcatacaaactgatacataataaattaaaacaatacattattattcaggatttttatttattcctgtataaaacttttatatagctacaaaagccaaagcttccgacgcagatatgtggatatgttgtacaattagttgtgaggtttggcttctgttattacagtttccccagcgtaagaacaacacttttgacactgtttatgtccgtagctccacctgcagcaactgtggtagcaatgattaccactgccccacctacctccaccctgatagcccccaccaccaccaccaccaccacccccaccaccaccaccttgatagcccccaccaccaccaccttgatacgcccccaccaccaccgttatagcccccgccaccaccaccgttatacgcccccgccaccaccaccgttatagcccccgccacca

SEQ ID NO: 238353 - DNA, 1386 bp, Cannabis indica
gcaagtacgtcatcgtaagggccttcttgaaggggcgttctcgtggtcctcggtactccgccttcctgtaacttcatcttaatttcttctttccatatcttaatgagtaacggaggatttctcttgcgtaaattctcccattaatagggtccattaaagattagggtcttataaggtctttttgttggggttctatgccttaaataaaacttttttatgtaaactcattatttaatcaataaataaaataaaaaatcttttatgaatatgtcaattgcttggtttacacattttattttccatgattatgcgtttattatgtaaattctattaaattcaaaacatatattaattcacaattatagtaatttcatatcaatagaaaataattatcattataagattcaaatattttagtcgtgagattaattagtgcactgaatttatactaacgtgataatcggtgatgcggtctatttatactaaggcaagtggtgtaatgaccacataattagacataaaattagagcttatattcaaaaataggtatttgacaaataatttatcaatcattttgattttattgaaatctaggtgtaccgtgcataataattatgaatttttttattttcttattttatgctcgataacagtagaatcgatgatttggccattagcgtcacttagatacggtttagtatcctagaaatagcagagcaaaatttatgaatagttagaatagcagggttgtgtgtaaataatgttgtgaagtattcaagctacgcaagtatacatatcgttaaacaagtagtactcacacaggtgaggtcgaacccaagggaatcgtaactaagtactaaccaaattggatttatatttctttttggtaaaaaaaaactgatattggaaacaataatgcagaaaaacaaaataagcaataaaaaggttcaatcaatagataagaaattagggaactgatttcaattactttgattatccaattgttaatactgattaactattattatccctcttatgtgatgacatattatagattaacctaaactcttttcaaattataaagatcctaaattgcatgtcaactaatgcatctctaagatagtacaacaaataattcgcattaagcaataatctaaaagtcacataagttgtgaaaatactttcgtttcacattaaaatctatgtttattcatttagagaactctcaatactcacttttcagattttgtattgaaatcatagatcatgcataaggtggtcaatcaaacacatgtaataagcagaaagatgaataaatcacataatcaaggaagaaagcgcagttaaataatattaactcataaaataatctcagacaatatccat

SEQ ID NO: 238354 - DNA, 1326 bp, Cannabis indica
atttttatactattcccgttggttataaaggaagacaatattttgatatccactgtccaaagccgacgcagaaaaatacccttttgtgtttgctgtgtatacgtcagttatgggaaccgacaagaatagtataaatatcagttaaaaatcgacgaaaattgaccattttataatagtgttcgtaaataaaaaaaaaaactaatatacggatatatgatatcgatatctagttttttttaattaacattattttttagactatcttttgtattagatctaaaatatttattcaagatttaacataaacttagattgatgaagtatttaaggttatttaacatagaaaatgacaaatactcaaaattcttttttttttttgaaaggtaaaatcaatttttattaaccttcgaaatcagtcaccaaagtaggcaacaactcagttggaatattttccatactgaaaatacaatcaggataaaataaagacgctctagcaaactcatgagcgactctattagctgaccgcttaacaaaacaaaaatagacattatttaaactagccaacatggctttgcactcctgaatcacacatccaaaatgagaagacaaaatagccgagttccgcaaagcttgtacgaccactaagcaatccgtctcaacccaaactgaactgtatgtttggtctttaatccaacttaaagcttcccgaaagctcagtgcttcagcaatggacggagcaatattaccattatgtaacttagtacggccttcgatgagcaaaccattgtggtcacgcaccaccaaagcacttccaaatcgattctgtccttcaaaaatagctgcatccacattgatcttgatactattaacctgtggttttaaccaacgctccatcccatcatagtcctgaagatcagaccataatgactcaatttgagttttttgagcgtatttccattgatcaagatagcttttagcagaggcgactatagctgaaaaattaaacgatttcccttgccatacaacatcatttctcgctccccaaactgcccaacaaagagcagcagccaggccttgtttttctactgtcaaattcgtgaaaacattcacgcaccagtccaggaaaacactccctgctgcagtcacggtagtgccgatgcctactcgctcccacacctttttaaccactctacaagttagtaaaatgtgtgtgattgtctcgtccatctcctcacacaaaggacatcgagtgttgacaggaacacgcttagaagcaagctgagtgagggctggaaggcaattagaaccggctctccacatcaggtt

SEQ ID NO: 238355 - DNA, 469 bp, Cannabis indica
cacacgctgctctgagcaatgcttttgcccagcaaagatgcaaattccaagaattgatggatcaacaggctgtgatcctctaagcccatcaagtggagctgaaccgccagaatagcgaggctaatgaattaaatagatgattcaatgaaagggctagattacgagttgaagaaccgccactcattaccctgcgtcttagagggaattcaatgccttagggatcatgggaaaacctcacagctagaagagccaacatcatcctaaataagaccgcctctctatccgcccactgatgatcaaattctacccgaaagagcatatgcaaggattgaccaatttcaaagcctgcttagagcgaaacagagaagggaagatattccaccaaggcaaggttgaagtaggtctcgcggtggggagttttacccgaatctcaatgaggacagtgctagtagtcagcctattggtgagc

SEQ ID NO: 238356 - DNA, 1001 bp, Cannabis indica
ctagggtttcagttttggggaccatcttagtccaaatgggtcaaattttatattgggacatcaactaggcatatctcatacatatttgaggcatcaaaatcaaattcggagaaaattcatttttgagcacctaaagcatccggtgcccgggcaacaagtgcccatgttgacaatttattaatctaggtgactttcaaatattagattgacgatcctacttttgcatcatatttgtcttcataaataacgagaaaataagtactttcaggaaagaaacaacacttcttgggtgccagaagcaaggcccaatgcccaggttaacaactagggttggcccaacgcccaggttgacattaggccgattcaaatgatgttttctaagaattcttccgagtatgttctctgttttcaacaaaaattaagatttaaccatttttgaggaccaaataaaacttctaaggggccaaaactgggacccaatgcctaggttgacacctggcactaggcccaacacctgcgttgtttccaatcagtttcttgaaaaaagtgttacgagaattttttttgttataaaaaataacaaagatacaagaaaactcagggagtaaaacacaagcccgagggccaaaaatctaagcctagctcataggttgacctggtgcactagtttcgatcattcaaatgccaaatctgatccaagaattctctccataatgctcaaaaatgggctaggagacctcttcctcaagttcttgaaccttggaagtatcaaaacaacatactagaagctctaaaacgagcacccaacgcccatgttgataaatggtctggtgcactgggttctgcttattcggttctaattctatctagaccgtctatctagtttttcataataaataagatccatgaagtcagagaagtaaataaattcacaactttgcatttctcatttccaacatgggaaactcactcaaaaatgaagagttttgaatatctcattt

SEQ ID NO: 238357 - DNA, 674 bp, Cannabis indica
taattttaaattaaggtattttttgaagacgtggcaaggtattattgtaaatgagatttgttaaggtatttttgaaattaatttgtattttaagtatattattgaaaaaatcccttaatacaacagttcatcaacggccttgtgcttgccatgtcatcaaaatatatatatacagtgctctcttatttattttagcatatgaaaaaaaaaatattaagtcaaatttattataatggtatttattataattatttaacataatatataaaatttaaaataattaaaataatttttacacattaaaaataaagttgaaataatatattatatcaatgatttttaattttttattttatactttaaaatagacagtttgaataatattttctacattataaattcttttaaatgttacagaatatcttacctaatatataaaatggttatgtaatgatttttgttgtgtccctttaaaggtttggtgtctatttaacagaatatacttaaaaacaagttaactttaacagacaccttaaattcattctatttactaagattattcacagaccaagacaaccatttaccgttcgcaagacacccatttgtaaaagcacccattcattcacaaagtcataaatcataaaattttctcaatagtttttttttaaaaaaaa

SEQ ID NO: 238358 - DNA, 985 bp, Cannabis indica
ctacctatgtctaggatcagtacctaattggtttaacactactttaaaaatatattatttaatattctatatttaataaattaggtgtctataatttttttttaggttcaatactattttagtaatttaatatttttattaagtatatataaatgtatattaattaatgtatatattcaaaaatcatatacatcaagaattaagaaaatatttagtataaagaaccaaataaaaatatgtaccatacaattattcattaatatgaatagttcctcaattttaatattttggtagcgatagtccttcatggttaatacaattagtgcaaattttttttttccttgtgaaagaatcattcaaattagagacatttttaatttgagtattactattgggtactagtggtgcctagcaattttaagacgtgtcgctttgcgattatttagcgatacttcttaaaagctattgtattaaactatatgggatccaatactaaattaaactaatagtttgagtattactgcttaacactactggtgctttttatcatttctcttttaatttacaccaaaacacatgtatattccttaaaaaacacacacacacatgaatgttggagactaatttaaatgcaaaatttagaaatgataatagtgcggattggagacagtttttaaattatcatagatttttcactgtgatataattatacttgccccaataaccattaatgatagtgcaagtatattaaccagtaaatcaataaaaaaaaaagccattaatagtacttattttttaaaataatcatttaataatttaatttaattttggtaaaatctaattaaataatattctaaatatttttcaaactcaaaattcaaccacatacattaaatagacacataaaaaataaaaaaaaataaaaacgacaacaaccacaaacttaataaagttttgagaaataaataaaaaatatgatatgata

SEQ ID NO: 238359 - DNA, 1060 bp, Cannabis indica
atacaattatttatattacccaaatgttatagacaatagccaagcaaacaacattgaacaatttttcctgcaagtttttgaggggtttggaaaaccaatcataccagtctttggagctcttcggccaatctaatctccctaaccacttgctaacatcagccacaaccttcaaagtaaatggaaaatccatgaagatgtgagcatgagtctctttgtcatctaaacacactggacagagttcacctggaattggcatgatcttgctgatgtggtctcttgtcaagagctgattattaaacgcctgctagccaatgaatctatgtttcgggatgcacatcttatgccaaattcgattagcataatcaacttttttcatggggttagctgatatgtcaaatatgttggttttgaacttaccactcttactagcattgacaatatctgacctgtcaatagtgctcctcagccgcaaaagtttcttgaaatatcagctcgcatcaggtttaaattcaacctgccaaaaatctttcccttttaagtaaataacatttatccacctgacccacaagttatcttgtttgctcgagatggcccagaaaatttttgccatcaaggttgtattccattttctcccctcacgaaagccgacgcctccatacttcttcggaaggcaaactttttcccacgaggacaagtgcatcttgctgcggttacctttagacccctagagaaagtccctacaacatttgtcaattgttgcagtgattttctgaggaagaataaacaagctcatccagaagttcctaatttccaacagaactgagtgaatcaattgccccttccaacaaaggacaagtttctactagcccagctgtgtaaccttttgtgaatcttatcaataataactccgcagtcagaggcacgccacttagttggtctaagtgttggaaatattttaccaggatttagatttactaacaagtatgtttcattaacaccctaatatgaatttctaaaataatgaaataagcacatatagggtttaaggaaaccttacatt

SEQ ID NO: 238360 - DNA, 1661 bp, Cannabis indica
caccctacacgtgtaaaatagtacacgtgtgagccatattttaaggttcaaaattaatttttcaattttgtgacaaataagatttagtatttattctaccaataaataataattgattgattctcattaatctcttatttcacaagaattaaaataaatattattttctctaaaataatatatttctctctttaatattatttagtaataatattatatttaactattaatatagatttatccaatgaaactaaatagttaaatactattaattatacaatatataataaccataattaatcaaaacaataatttcacaaattattattttgcccttaagaatttatttttcataaaaattaattcttactcgaaatccatttatcaaataaaaccttcccctgtacagtgttgtacagagatgactcggggaccatggacctatatttttaagtaccaataaacataagattctatcaatctcatcaatagaataatctaatttattaattttattattattccactataaatatggaattacactcttaaataatatagaataatatttatagaagtcttacttatagtctattgatataattaatataagtagctcaccctctaattattagttcataattagagctggtcaaaatacccctttacctttctaattatctcttcatttcttatgtaccattaattcaatgtgaacagttaatctataacttattatagatttgaatccaactgttagcactcctagaattaacaatataagggaactgatatttgatccgttaaaaaagcttggatttcactactgtatagcatcttcccagccagtcatgtaataagttcccaaaacagaagttgtaagaatcatcttctctgagaaattttgacgagtgaatcaaagaactcaatgaacacaaataggagttcatgtatactcaggattcaggttgatctactaatgatcatcattgtgatatgataaattattttcatggtaaacaggatgttaataaaagatgtttattacatgtatatcagtccagtcatacacaatacctttactacatgtccatctatatatgtgattcaaatcaaaatcacacacactaaaaatatagtgtatagtaaaccgtacttaatagttccatattaaagattctcaatactttaatacactaccgacttattttattcatatcgtataatcttaattctcttgtatatccttacaagatcatacactttccatatgaataagaaatttttaaatatttaataattatactcttacaattaacatattatttatcttataattgtatttcatatattttctaatatcttatccattaattacttgcttttagggcataaatcccaacaataaatacttgtgaagacgacaaactcaccctaattctcccttagcaacaaacccagaaagttgctccatatacactttttttctcaagatctccatggagaaaaatatttttaatatcaagctgaggaaaaggccaatgattagtagctgccataaaaatgaacagtcgaacagaagtcagttgggcaataggagaaaaagcatcacaatagtccactccataggtttgatcataactcttggcaacagacatgcc

SEQ ID NO: 238361 - DNA, 470 bp, Cannabis indica
tccccttatttataaacttttacaacgcaacacaaaactgttattacaaaatgagattacattttcaaacacgggcaaaaggtgaatcctagtagttatgtttggtatcactttcattcactttgaacttcgttcatattcctagaaaattgggtctttattgtgtagaagagtgtgtgttcgactctacctgtatgtttatatctctggtattgtctttaatctgtagtcaagtctataaataagaagaacaatagtgcaaacctttaggagaaggttaataaagcttttgggaggaagtttctcaagtcttgtttcaggaggaagcaaacactctttaagcaaattgatgggagttcgatcacttgaggtttcagcaagattcatttgagaatgtggaatatgtcaagcttgtagcatataataagagagaatctctatatactaagtcaattactttgtatttttga

SEQ ID NO: 238362 - DNA, 2007 bp, Cannabis indica
taatctagtttacatcctgtcagcgaactagagattttcaaaacctccttctttcttcttctctttcgaatctccttcattgttcttcaaaaatttcaagcctatagtgagtgagtgcatgcctacccatagcaagtctagtacggactgtgaagaatccaacaacctgaagaagaatcggactcacatcttgataatactcctcgacagaaaagaacaagggttagagatctgagtgggaggagttattatatcctgctataatcaatgtaaggtttctcaactttatatatttttaaagttcgttgttttaaaaattcatatttagggtggtaataaatgtacttgttagtaaatttagatcctagtaaaatatttctaacatatacaactctcatctcttgaatctcaaaattaaatcaaaaaagtatgcaaatagtgatcaagtattcagaagcatttagcataaatcatttagcgtaatatagaaaggatgaaattgataaaatatcataacaatataatatagaaattaaactgaaatcctagacaagaaaattagtgcgtgaaaatcatgtgcataactattacattcataattaaaaataagagtgtaaaagaaaatacaaaggaaaataagaagaaaatgaaaaataataagtagtttgtataaatcagtttttgagaattcaaagatctcaaaacgtactaaaaatattagaaataatatgtttctataagctaaccaagttatataggagatactataattatatagattttaaactaaaaaataaaataaaaaatgcttaggagccgcaactccacttgccaaatccatctttttctcgtcatcttttaatctttttttttctttcaaatttttgctttcggagctgcaatccttacgcctttccttttcatttctctcatctggagccatggtatctatgtaaaatttacgattaaatatgcagaattaaattagtaaaactctaaacaatcaaacaattagtaatgacaagattatccaatcgagaacaacaatcatataaaaaattggggcaaacaagtattgaaaactagaaaatattaaatgcagaaaataaaaaaattaacaccaagatatatacttgttcaagtcctatagatagatgtgatctatgactctactccagttctaaaatactaccataatattcctatattaattaaggaagaacaagtatagtacagtcgagacgagattctctattgagttaacataattgtttcaactctttgaactctcacagttacacccaaaaatcttcttcatctacagaagtttctttgtacaatacctaaactcaatctctctattctctttgcacctctatctcttcctctcaatattttctctctctaactctctatctctctgagttcttaatctcccttttaaataacaaaggcaatgtggtatttataggcttaggatcaaaatcctaaggtcggtggctagaagaaacgagattgttaagttcgttagaaataactaacttaacaaactccactttgagtgaagtctccacgctagcttaagttttagagcctccaagaacatatgtgagcttccagactcacggacgaaggacactcgctgaagacgcttctggataggattgattctgttgtagtcgactattcagatctatattctaggagtgacaactagctagaggcaactcatttccaggaaaggactagttatttggaagactaaacctggagtgaacacgataatcatccaggaacttccgtccggactcgactattattccacaagactctttccgaaactggcatccgtgagtgatcaacctttccaaaaatgacgattgcggagatctttttatttggaggactatactacagtttcaaatttcaaactcatggctttgactgataattttcccaattttctactcattgttacattttgctcccgaacattgccaaactcac

SEQ ID NO: 238363 - DNA, 1292 bp, Cannabis indica
agtccatagactgagtaaaagtccatagactggtagctaatggagagaacactaagatctgggaggatccctggattccgcatcgtaaaggcttctgtccgaaaccaagtgggggtacatcttctaatgctaactgtgtggctgaccttatgttaagcaacgggcagtgggaccctcagaaacttcgtcacttatttgaccgagaaactgtctcggacattcttaaaggtggccatccttctgggattggcaccgatagatggatttggacgctagacagcaagggttgtttctcatccaaatcggcttatctggttcaggctctggctagagctcctcactgtgaggttgctccgaaactttggaataaactatggaatagtaaatctctggagagacacaaggttctgtggtggtgcatcctttctaatgcactcccggttagagcagagataggaaagaggtttcatatagtggacaccagctgcccattgtgtggtttggggaatgaatccattgaacatctgtttttatcatgcaatgtggcctttcatttttggcgttcctctccctggggcatttaccctgtgtgtgacaccggcatccgcgtgtgggattgggtcaagttcatttgggatcttaacaataaaggaatccaagctgatgaggttttcctttttgcttccattgttgtggatactatctggagggtgcggaatgaaaaggtccataataattgtgctcctgatataaaaaagtgtattgataacatttgtacttcttatgcagattgtcattcttctttgcttcctagtcccactccagatctaaaggaagcttggtcccctcctccgctggagtggattaagctgaattgtgatgtcaaggtgggattcgatagcatgtgtattgctgttgttgctagagattatgttggcagagttattagagttcagacagctcgggaagatttctcggaggctctttgtggagaagcggctgcctgctgcttagctgtttctgtggctttagaattaggttgcaagtttgtgattgtggagaatgactcgagggtggttatcaatgctctaaatgggatggattctcgttggagtcttgaaaactatgtctcattttgtactaagtcttctccttcctttattagttgtaatttttcctatgtttcaagaacttgtaattttgccgctcataatgtggctagatgggcttttgctcatcaggtgtttgggaatatcccggtggcctcgttaccagacaatttaatttgtaat

SEQ ID NO: 238364 - DNA, 1920 bp, Cannabis indica
aattctatttaccattctctacacttatgtttttatttttgttaatcgatactattgtagtgattttataagattttttttacaaaacttaaaacttaaataaatctattttttttttgaaaattttaaaaagtataatgtatgtatttatatttttattgagaataaacataactgtcttttaaacttagtttattactttgtaatttttttcttatttttttgtaagattatttatgtaatagaatatgtgaaatatttaaatatatttattttgaaagcaaatattaaaatattattagtaaacctataatgtagtatattcttttctttagttataaattttttgtaatattaaatataaaaaattattcttaactaattactctattgatttttaattttgatttcaatcactgcttttcgaattatactaaataataataacttctaaatttattacgaagaaatattaggatagtgtagtatatcatatcagacttcaatatatatataaatatatatacaagttatatattaatttaagagtatgtgtaattcaatagaaaaacaaaaattcccaaatattgtcccttggatgtaatttatttatgataccttatacatcttctaagaggatatatatgtaattcaataacaaaaagtccaaaacattgtgatttttaattaagttataaataataaagtaataccacttcttttattcctttctattttactaaacaaaattaagagtaaattgcggtaaaattcttaaaattttcactttactagcaattaactctcacttaaattttagcagcaaaacaatcaaaactcatattctcttagcagtgtgtcatttttatttattttaagtgttaagttccatgcttgactgtccatgtgtacatattgtactgtccatatagacacaacgtacacatgagacaattaaattagactaaataaataaatatttttaaataaattaacttaaaataaaattaaatcattttattttttttttacgaaatctttattaaaatatgaaaataaaaattaaacctaatacactacactaaattaaaacatatataaataaatattgatggtaagagctcgtcaactaactttgtggccaaaaaaatctaaacaaaactcggaaaaaagatgatgatgaagataaacatgaaaagaaatataagtttttatgaataagagatttcttgagtaagagaatgagttctttctattgcattcaatatgtgagttacaccattgattttccaaccccctcctcacacttgagaataaggtatttataggctctaatagcctgagttacatagtggtcccaaatagacaagatgttgctttcaggttgcaaactgcaggtgcaggaggtgctcttgcttctcgtacctttgtctggtgtcaggtggtcctcgatcgtagaggtggtccccgatcgcatgggtgatggctgcagtgtgcccttggtcgggtccccagacattgcaggtgcgttccctccactactcgtaccttcttactctcagagcttataggaggtatgatggtacgcttttctctggcactcctcatcctttgattcctcctccaacgacattctctttaatgcgtatttgaatttcaccttacatccacaacacacgtacactgcacaactcacttgatgcaatacaacacactcccgcacgcaacactcgtacacacacccatgcatgcacctctcgcgtgctagccccccacatgcgctcacacatgagcccccaactcacgctcataacacacacatgcacacttacacacacacacaccacagctctcatgcaagaccccacacacgcacacattcatgcaacaccctcacacacccgcatgcatgcacgactt

SEQ ID NO: 238365 - DNA, 629 bp, Cannabis indica
accttttctggtctataaaagcctgcattttttcttcattggattactttcgctatttcgccatttcaacccaagtaactcctttgagaaaatttcagaaactatagatttcttgctgctgtttctccgtcgttgccagtccacattctaccgtcagccatcatcaactttcagttcattatctttatgtaagtgtcctgggtatatttcgcttttgctattcatttgcatgttagggcagaatttttggtagagcttttagttgtatttgatttttacggtggaaaatttttggtgaagaccgtcgtatgtcatagctttcatctgtgttctgctgcttcctttctttttcattttgcaaacaacttttttgcttagggactgttgagagtatgacacggttttcatacttatgtccctctctcttttctctttttcctttttttttgctttcgctgcctttgggagatttgcacccgatgtttgcctaggagaatccctggatttttcatctctggcagacatccggagggggtcctctttccagcggttaggggacgcccattctctccttttatgtcagggtttggtttgggggctaaccgctagattttttattttatttattt

SEQ ID NO: 238366 - DNA, 1866 bp, Cannabis indica
caaagccaaccgcggtgactctataattggcggatcgatcactagctcatcctaggggagttattgaggatgtgttagtcaaggttgacaagttcatctttccagctgattttattgttctggaaaggggggatgatagtaattaagaatgaaaagaatgagttgattcccacaagaacagttactgattggaggatttgtattgattatacaaaactcaacaaagcaacccggaaagatcattttcccttgcccttcattgattagatgctagatagattggcggggcaagaatattactgttttcttgatggctactcaggatatcatcaaatagccatagcaccagaggatcaagaaaagactactttcacatgtccttatggtacttttgcttttagaagaatgtcattcagattatgtaatcctcctgctacatttcaaaggagtatgatggctatctttttcggacttaattgaaacttgcatcgagatccttattgatttctcaatctttggttcttcattcgatcattgcttagagaatttggagaaggtgctaatcagatgcaaaaagtcaaacttggttctaaactgggagaagtgtcactttatggtaaaagaagggatacttttcggacacaagatttcaaaagcaggaattgaggtggacaaggctaaagtgtcaacaattgagaatctgccgcctccggtttctgtgaaaggagtaaggagtttcttaggtcatgctggtttctatcgaagatttattaaggacttctcaaagatctctgaaccattgtccagtttacttgttaatggcgttccttttgagtttggagaagaatgtttgaaggcattccgggttcttaaagagaaattgatttcagcaccaatagtcacttcaccaaattgggagttgcccttcgagttgatgtgcgatgcaagtgactatgtaattggagcggtcttgggtcaaatggttgacagggtgtttcacacaatctactatgctagtagaaccctgaatgatgctcaactaaattatgccactacagagaaagagatgctggcaattgtgtttgcttgtgataagttcagaccctatctaattgggaataaggttgttgtctacacagatcattcagcaattaaataccttatgaccaagaaggatgcaaagccaagattgattcggtgggtacttctactccaggagtttgacatagagataaaggacaagaagggcactaaaaatctagtagcagatcatctgtcaagactagagttggaagagagccaggatacaaaagaggtaatttcctaatgaacaactctttagtgtgagggaaaacccgatggtaccgtggtatgctgattaagttaacttcttggctgccaaaataactcctcgtgagctttctcgtcaacaattgaagaagttctttgctgaggtgaaacattactattgggaagagccaatcctctacaagcactgtgctgatcatataattagaagatgtgtgcctgaagaggagatgtactctattctcaatcactaccatgctttaccatgtgggggacatttcagtgggagaagaactgctgctaaggtgttgcagagcggattcttttggccaaaactttttaaagatgccagtacttttatgaagcatgtgatcgttgtcagcgtacaggtaatatctcaaggagaaacgaaatgcctttaacaggaatcctggaagtggaattgtttgatgtgtgggggatagacttcatgggttccttttccttctatcttttagcaatctatacatcttattggctttggactatgtgtcgaaatgggttgacgctgcagcaaca

SEQ ID NO: 238367 - DNA, 913 bp, Cannabis indica
gtttgacaagatcattctctacaaagagaacatatgcctatatccactaaaagtaggatcatctatgttcgaatatggttgtacattcaggggtgtatatgagttttcgttatgttcgtaagacgatcactctagatatttaccttaagcaaacaaatttgaaatgtttgaaaaatttcatgaatttctagcaatgttggaaaatattaaggtaagtggttaaagatcttgcgatatggtggaaaaatatttggtagatatgcaaatcaaagatcattaagttgaattttttaaattgtatctaaacttacctccatagaaattcagtttgtatattgataacagtaaaaggttatgattagttactagtagttgcttaagtccttctagggatataccctagtgataggaaaatttcaaaatgatggaatggttgtgttgtaaaccattactagattcatggatgtcttgatcgtgaacttaagacaagctaaaactgttaactaaggtttgcaacatcttcgactagggctttagtgcggaggttgttcaacctctttacagtaagcttggacgaaggcaattctcaatgcagctatggcttagatttgggtggcatcggtagtgcctccactaattccacatcagtataataatcactaaagacaagtaactggttggatgaggaaacaggttgacctgcctcgttgaatcttccttaaggaaattattcgtcagcatcaagttctacctcccaatcaaaggccttaggatttccatgctcctgctccttaggctccatgggttctgcgaattgcctataaaaggtcataaacatcccaatgtggggatcattggttgatatagcacagacaatttgcttttacgggctagttttgacttgacctcaaaa

SEQ ID NO: 238368 - DNA, 551 bp, Cannabis indica
atcggtttcctatcaaagaacacgtatccttgctgcatcaccttgtccctttgctccatattctgaaatcttattatgaatatccccttagcaagaagtccgaccttcaccactgaatctttccatatacgcctaacaaaaccatccagtatattaacaggaggatttgcaccaatgacataacaaacaatcgaaggttgccaataattgacttcatcctcaatatcagtaaaatcaatcttcaccttgctcttcgatccctgtaatttcacctcactcttcggtttggaactttcaaactcactatccaaattccgaactatgttagatctaagtattgggggagatggattcattccaatacttacctcctgagtaaccttgtttgcagcatcaatccacgctgaaaattcctgctgaaaatcgcttcgagttgcttcagtcgcaccaggtgaagagcaatgctcctggtactgttccattgaatctgataactctagtatttctagttcttgtactccaagaatggcatccatagatctggtcttgat

SEQ ID NO: 238369 - DNA, 1017 bp, Cannabis indica
tggtcctacataatgcgagtcatacgaatgcgattagacttggtgatatccgcatcatctcgctgagtctagtttagtctacataatgccagaagtctcaggaaacgtgtaaaatgtggtgcagttccaccctgagccagcgagcttaggagtaccaaaagatgcactccgagagcttaagggtggcctactcctcagggagacctcaggataccccgctgtctaggaactggcatccttccaagcgaaacccttggtccaatacacgtgataagaactcgggacaagataagaatttgggcttccagcactgtaatcgtgaatctggtagagattccctaactggtttataatatttcgagttactttctccgatgtaacctcaagagttataattacatcgtaatgatagagatccgtttcagcaaccttgaccaagaagtgatttgccttaacaacaaactttctaccaaccgtgccataactagacctaaccagaaacctaacaaattttgacagacaccggaggaaatctcacagttgccaccactgcgggatcttgcgatatcagtttctggtcatcttcacagctcaacgaaaaggtagtagaagtagtcaacgacgatggacctagcactaacaccaacactggcgcaggaatcgaaagtttagggattggagtagtaactaattttttagtttaacaagcgcattatttttggtaggcctccacaggttacttgctgccggcataacttttcttaatttcaccgccagaccaaagtctttctcatatctcaccgtttctgcatggttgtgcttctctaagtagcagggtgccaaggcttgaaggcaccggtggcctgctgcgctctcaaagagtcaaccaactggatctgagttttcccaaatatgcctaggtactgcgggaactccaaggctgtttacatccaccttcttcactctccccgtcggggtagggataaacttctgaccagatctcaataggtagtcaag

SEQ ID NO: 238370 - DNA, 1208 bp, Cannabis indica
agttcatgccatcaagcataggacaaatggtcgaaatggtattgtggctctgaagctagatatgagtaaggcttttgatcgtgtaaagtgacaattattgaggagttatgcagaaatggggtttgttgaaaaaatgatctctctaattatggaatgcttaacagcgaataccttcttactagtgcccacgagagggctccgtcaaggatgtccaatatttgatattttaaaaggtttctcgcgcctgcttcaacatcaggagtagcttggttctcttaatggtttttcactaactcacggagccatatcagtctctcatctcttttttgcagatgatagtctgttgttctattctgaaaatgagagctcatgtcttgccattagtagaattttggatattttatcattgtgctttaggtcaagtactcaatctagacaagtcagtcatgtctttctctccaaatacaactttggtgggttaagtttccataggcagttccctatgcccatttgtgagtatcatgaaaaatatcctggtttgcctgcacatttgggaaaagataaaatgcagttgtttagtggtgtcaaagagaagaattggcgtctcatgcacacatggaatgaaaagctcttctcaactggagggaaaaaggtgtttttaaaagcatatgtacaaactatacccacatatgccatgagttgttttcgtctgccagttactttctataatcaactcgaatcaatgatggccagtttttggtaggactcgaatgaaaatggaacgaagatacattggagaaattgaaatttactctgtaagtctaaggatattggtggtatgggttttcacttttttgtacatttcaatcaagcgttactagcgaaacaagcttggcggatctttaaaatccagactctttgcttagcaagctcctcaagagtcgttattttccacacaactcctttctagatgcacaccctggcaattccccatctctgacttggcaagggattagatggggccaagaattgttggaacttggtttgcgatggaaaatcagagaaggcagatcagtgtgaagtggttttgctcgtggattccaggccataaatctttccttcctctttgttatattgatccttttaagcggagtagtggccaacttaacaactgatgaacgggaatggaatgtgcaacttttgaatca

SEQ ID NO: 238371 - DNA, 994 bp, Cannabis indica
gaataaagtgtgttttaagtttcatgagaaaaaaaaggaatatatatagactatatatagactatatatatatagtgtaataaaacatggtgataattattatatatgtgatcataatttgtgaatcaaccaaattgaatgtgtcataataatcccccatgtggacgtactaaatgcagacaaagcatgttccctttcatgtgattcccaaatctaccattttattatttatcactttgcctaacaaaatcatatatcttcttttattataactttctttttcaaaataaatatataaaaataaaaaaattagcagtgaaactaaccaccaccgatgtgtcataaaatggagtcattaccaaaggagaatatacactaaacactttatagataaattttttagaattaaatgtgatttttagtcacaattaaaaagtattttgtgactaaaaagaacataatatttaaatataagttgtcagttttagtcataagaaatattatgactaaaaacatatttaatcacaataaattctgattttcgtgattaatatctttactcacgaaatttttaatcacaatataaaaataataatttataattaattataatttttttttactttcagttcgttgtgattatataaaaataaatattttttagtgataaattattatagaaaaataagtattgaatatgaaaacttttatcaattgaaaattgggacatcgtattaattaattgtaactttttcatttaattgaaatttgagtttgaatatgtactcactagaaaaaaaaagggtatattagcaaccacataaattacttttcatcttatccattctgttttatgattaatcataaatcattatttatatatatactacgaatataatttctgaattattttttttacttcttcttcatggttttctccaagttatatactctagttttgtaaccaaagacacaaatggatagtggaccagaa

SEQ ID NO: 238372 - DNA, 1031 bp, Cannabis indica
ctcgtgtataagggccattttccgtgggtgtaagggcccaatgaaggcttgaagcggggacgttaccacgagatactaaaggacaagttattgttgcaatgtcaaaaccttatcctggctgttttaaaccaaaagttatgaaagcactagctcttaattagtttgtaatggcttaaagatttgaacatatctattcactacattgaaacagattctcttttggtggtcaaaagattacaagctacacggttagtgtttctgatttgcatagtttgttagcaaatatttctattctcatgtctaatttttcaagagtacgtacagatctctcatgtgtttagatctgcaaatattattattctaaaatatactctttcgatagacaaagaatgtaagaattaccacctcctctaatgtaatgacggctgtattataactcttttaatataatagcattttaacttaaaaaaacaaaaacataataatcatgactactaaagaattgatttattttctcatattatatatatatatatatatatatttatatattattaattatcttttgattgattataggtctatttaacttttatggcgataatgaacatcgtaaatagtttgataaatttaagttggtaattttaattaattagttttacatattataaaaacaaaactttcagtagtattataattaactgcatgcaaataaaaatatacatgcatgcacgtacatgcaactaaatatttaattttatctctggactatattattcataatatattttgaaaatataacgactattacaattataatatatatatatatatatttatatatacacgttgtcatattaaaaaatcaagtgataattacttctctatatatctagaaaatagaaatcatccatgtgacaagattaaaagtaatgaccctaattaaatttgtaattgtttgaaacttggtgttagagatatacaatatatatggagacttattaaacaagaaattgttgttagggtttctt

SEQ ID NO: 238373 - DNA, 312 bp, Cannabis indica
aataaattttagagaatatcgctaatcaatcgtatgatatcatctatgaaggtgttggtggccaatagtaatgttcatagactattcaatagaattaagtctaattactttatttgctaaggtaataggtgtagcttggtttgaaaaaaggaaaaaaaaaactgtacttattatgtttcgcattgtttatgtaagagtgattttgtgagtttttatagaaatactaaattttaatgttaatgataagaattttaataatttagataaatattatttttaatgtaaatatctatcaattaattattaatatta

SEQ ID NO: 238374 - DNA, 879 bp, Cannabis indica
taatgaatcttttgaggtagtccgtcttcaattgggttatgttgaaatcatgtgtagtatgaagcttagttgattcatctcgagttcatcatattagatttgaagaatgaaggctgaattatttgtgagagatgtgttgcttcgtaacttaaaaactgttttaacttttttaaaatagaaaattgattttaaaaaccaattggaggtgtctgaccaaaattttcaaaaataattttatgaaaaaccgagttaaataaataaaaaaaaaatagaaaataatcaaaaatgttgctttctactttaaaaatacattttttctcacatactcgagtccgtgttcagggttcaatgtctggggctggggtcgggttcgggatctaaatccatgtccagagtttgggtcaagtttctaggtccaacgttgtgttcggggttcgagtttagggtcgaggttagaatttggtccaggttcgcatctgcttttagggtccggggtttgaaatttagggtccgggtcttggtctaggttccaagttctgggtcctagtcggggtggtaactcgtgtttgagtctaggacctaaaaagtggtgccttttgaggctttgattgcacaacttgatagggtaaggttacattattcagtgattttttttgtctcatttatgtctggtcatcagggtcgactctgagtaataatgggcccaggacattttttttgtgtctattatatttaaagtggagtgtgagtattattggacctcttttaataaaattatacaaaaaatacaatttttttcaatgcacaaaagtatactatataaaagttttaagccttaggtttgggtgcgtcgtaggcacggacctagctcgccttagc

SEQ ID NO: 238375 - DNA, 3133 bp, Cannabis indica
cacgtagacattccaccatagtaattaaaaaaaatggatggaaatattaaactgctaacagaacgagtttagtgagttttaccaccaaaattttaaaattaaagattagttgcaaaaatctagtcacttaaagaagttatgccgcaaataactctaataataataataataataaaaggagagagaaataagttcaacatataaattttagaaatttttggaattgaattcgtgtaccaaactaaactatcagccacacaaaggaatataacttcatctgggaatacgtgccctaaaggcaattgaaatcataacggtatttcaattaattaaagaggtgaaggtaattttacaaatattttaataatgggttgtactgtgtaagtaatccttaattctttaggctcgaaagatatgtcgtttctcattttgtttacgtataaccgtagtgagtgcgaactctcaaccacatagaaaaggatctctgttcaggaaatggctatggcatccacaataacaccaagaacagctctctcacagtttcaacagctacacatcgccaaagtaattacatccactttagtatatgtaatgaattacctaattttattattgagcaacttttatggtcttaatattgtctagaattttaccattacaagctccaatggatgtgttcaacttcatgcccgtggaaaattgaactttgaaactgggaagtgtttcttgataaccaggtaaaaacccatataccattagtcaattggagataaatgccactgtatttgcatattaattcaactttttttttttcgcttggtgggttttctttttgttcccctgtagtccccaaaggagggagtttggactaaagaaactcatatgcgaagctggttcaggtgaagcttccttgagattattttctttttgttcctttgtcattatattagctattttgagtgacctcttgttgatttatttactatatataggtgttgaggcatcagtcgactcaggagaagatttagtcattgtcaagaaccctcagatagttgtggaatctcaagataatgataagatgcaagtaagcttgcaaaattacactaataaacaacctaatttagagtctattctgcttgaacttggcatctattattgagtaacatgacaatcaatggcatttagcacttttcattatgcatacaatatttttgctatacataattagtttgtgctgttcaagtatctcttttgagcaaggtaagcttactgaaaacaaaaatgtcatgttttcagttatgctagtatgaattatttgggtaacaaaattgaatgtagttcctgtgatgcggatggcaggttagagtggacttgactggtgaggaaactgaaagagtgtttgatcgggtttggctaatttggccaaacagcaccgccaattccaggatttagaagagaaaaggggtaatacggttcttctgttgttttgtctatacttggacctttatattctgatatgcacttgttgtgtactgtgtacagcataacacaagcttatagtgtccttattttaccaactttattcccagaattttttcacttcagcatcttatgaaacttatgttctgtttcattttcatgcgcgttggatcatcaggaaaaacgtctaaggtaagttgtttcaggatgggggatttctatttaattcatgctgtttcagttatctttcttttcactattaattgcattattagttggagcattacttgtcaccaaagccaaaactttaagaaagagtgaaaaaaaaagtatcattgttagttccttttaacagctacttaaatatttaacaataaatgatttgaggcaactttttcaaagttcataaatcagaactctaaaggaaacttttgaagtaatagttctcaagttttaatttgatgtaattgactctctcatacatgtttgtgttctccgaaaaatgaagagaaattcaaccatttaccttcataatgccccaatatcacattgccaatccaaaacatactaagtattagtaattacgaagaatttgcatccaggtgaaccaaaaagctcacctggttgctggttgttgttcttatggttgattttctttgggaatgcttgtgaaacttaattaggctgtcttaattagctgatttagaatgggaaatttatacatgctgtgctcttgctaataggttcccaaaagctttctgttagggatacttggtgaggaacgtgtgactaagtttgtgatacaagaaattgtcagttcaacaatggctcaatatgtaaagcaggcaagttactatatctcgcactttttttctttttcattaccatgcatgcaagtatattattttcttactttgatgcctccaccaggaaaatctgaaggtgaaggacaacaaaatcaatacaactcaatctgccgatgaactcaaagcatcatttaaagaggggcgcgagtttggattcaatgccattatcgaatttgaaaatatagaaattgagactcccgcggtacaacctttgtaatgaactcaaaatataggagaagtcacagcaaccactactgttgttcgatggatggtttggaaaatggggtcagattagagaagatttcggtcttgtttgatgattttcagtttcatcttctgatccctgttcaacaacaaagtaaactgatgattttttttccttcacattagttattgattaccaaacattatcttcttgagattcttgagtaaagcagccatctaatacttagtaaaagcattaggagaaacagcttccttcaaatagtttgggaacttataaatgtgcatccagctttacaaattgagagatatacataaatagagcaaataattaatacgacaatattgcaaagggtaaaatttcatctactttttgtattttattatatatataacatcaatgtgtcacacacacataattgtctaatgcttgtttttgaaatttttcaattacgtttttttgtctggtattctgagtaaatatttttccaacagtagtagcaatattcacactttactgcaacctcagcatatagtaagaaaataatccaagtctaatttacttt

SEQ ID NO: 238376 - DNA, 655 bp, Cannabis indica
tttgggttgacttctggtggaccttataactacaatggaactcaagaggtacacacttaaagaagtaaagagaaaaagtgtacacttcttgatttactttattctttatatagttttagcagtctcttattgtaaaatttgcctattacagtggctttcagagtgttgatcaacgtcttcgggagagtattgactacgctatttgcttgaacagtgttggctcatgggataatgaattatggattcatgtttttaagcctccagaaaatacttacataaagcaaatttttgaagtaagatataaaatgcttaccgtgtgtggtacctacaagtgctcttgctaaagtgctgaatccttatgtttcataatgatttttcagggtttctctaatgtagcaaaagaattgggtgttaaagtaggcctgaaacacaagaagataaacatttcaaatcctcgagtaagtatctaagcatggaatagttatagggtagttaatgtgtttctatgagataattttaaattaccatgagctaatttgggcactagcatcactgctcaagggtcctggaacttggtgttttactgatatatattattagacctgctgataaagttgctgcatttgtaggtagcgtgggagcatgaacagttttc

SEQ ID NO: 238377 - DNA, 787 bp, Cannabis indica
gtaaacggccagggagactttttatccattttaaaacatttatcgtttgttgcatagaatgatataatcatgtttttttgcttctctttttttggggctattgaatggtgtttaatatatgagggtcttctttaagagctaacagcgagtggtgttttcaaaaaaaaaagaaagttttgacttttcttcttttcttttttatttagttcatatatatcaatttttttattttttttttcaaatatgattgcaacaaaaaagactttttttgttgtgtgattttatacataaatattaagaaaaaattaatcgtaccgaagttaattgtgccaaagacatgacttgatctcattatgatattagtctaaaattgatttgactttttttttggtgtgattttatacttataatgtgattcaaattttttttttttttatgtttatgttttctaactttgtatattagttctttttccttccctataacattacatgaatagaaaaattgaatttttctttcttttgttctcagataacacaatacttgacatcaattcaaacctcaattttgtcatgatttgactactaataatttgagttatagtagtgcaagaattatcttccataatttctaattggtcaaatgcctctcctttcctaatttagtagattctagacttttgtatttatttaatttatgtagttctaccaccatcgaaaattatttcaactgtttttacaaattgaagcatctcgtggccaagttattacttttggatgagatgttt

SEQ ID NO: 238378 - DNA, 4481 bp, Cannabis indica
ttttcgtttctatgttctaaccagaatcaacttaatttaatcgaattgtcattaatatgtacacaaatttttgtttcttatgcttggacccttatttatgtctcttaattttaatggttgccagttcttttggtgttttgttaacaggctgctcttcaagtatgtattgtagtagtttttgtcatacttgtgcttttacagagactgtaatagctgcttccagtcatagagagtcatttagaggaaggaactttggtaatttaaaggtttgcacgtatgagtacttaggaaataggttgaaagcgaggagcaaacgaatgggtttaagtgggtttgtaatgaaaattccaaaggaaggggctcatttggctaaggagaaggagaaagttgtgaaatcttcagaagaggttttaagggttcttaagtctacatcggacccaaattctgtattttcatattttatggctgttgctggattaccttatgctgttcacaccactgaaacgtgcaattacgtgcttgaagttttggtgactcataagagggtggaagatatggctgccatttttaatttcatgcaaaagaaaattgtttaccgaaatttgaacacttatctatctatctttaagggtctttacataagaggtggaatacaacaagctccgactgcacttgaaaagatgagaaaggctgggtttgttttgaacgcatattcatacaatgggttgatctatttgcttgtccagtcaaaattttgtagggaggctttggaggtttacaacagaatggtcatggaagggatgaagccatcattgaaaacttatgctgtacttatgggagcatttggaaagcgccgagatactcaaactgtaatggatttgttaggagagatagaacatttgggtttgaggccagatatttatatatttaacatatgcataacagttcttggaaggactgggagaattgatgaggcttatgatctattgaagaaaatggaagaagagggatgcaagccagatgttgttactcatactgtttttattgatgctctatgtaaagcaggtaaacttgataatgcaaaggctttgtttgtaaagatgaaagctagcaacagtctcaaacctaatcgggtaacttacattaaatttttggacagattaagtgattgtggagaattggagactttaaaagaaatttgggatgaaatgaaggctgatggttatgctcctgatgtagttactttcaacattcttattagtgctttatgcaaagcaggcaatgtggacaaagcatttgatactctgggtgtcatgaatatgaatggagtctcaccaaatctttatacttacaacatcttgattgggggactattaagagcaagtagactggatgaggctctcaaacttttcagttatatggaatccttgggtgtcaagcctaacactatcacatataatctactcatttccggtttagtgaaatctaatagcgtggataaggctatcgatttctactatgatcatgtacgttataatttcgccccttcactttatatatatggcctactcattgacggacttttcaagttgggaagacatgatgaagtaatgcttttcttcgaggagatggcaattaacggatgcaagcctaactgtgaaattttcagtattcttataaatgggttcaggaaaacaggaggtgtggaaactgcttgtaagttatttaaaagaatggttgaagaaggaatacgaccagacttgaagtcttacagtattcttttgaactctctttgctttctagataaaattgatgatgctctgtatcattgaggaactaaagcagaataggattagtcctgattcacattgttataaccttttgattaatgcacttggcagatcacaaagggtagaagaagctttatctttatacactgaaatgcaaagcagaggactttttcctgatctttacacgtacaacaaactaatactcaatcttgggatagcgggaatggtacaacaagcagtgagtatgtatgaagaactgaagcttaaggatcttgaacctgatatttccacctacaatgctctcattcaaacttatagcaggtcagggaatccagaccttgcttatgcagtttacaagaaaatgatggttgttggctgcgacccaaatgaagaaacgtttgcacaacttcctagtcaaacttgagtacttcacttcattgaaatacttatggatcggcagacctttctcggaactgtctttgagattcttgcccataatttcagtaagttctgctcatcaatcattttttttcctctgaacttgtgtttaaatgtagattttcctttaagattctacttcaattcatatgtggacttacgatttgcagggctaatggttaaagggatgaccaaatgattatttgttcatatgcaaattgggtttctgacaggtttgatgggtaagagttgccaaaaaatgcatgtgatttaccatgtagatcaactagttgtctgcgataatattagaaatacttgtagatcaatgataacaacctctgtaggaaacttttgtagacaatatgatttaaatatcttaatatccatcataaacaaattttgaattccaaaacaacctgatcttgcaccaaaatcttcttatttacaacactttagccatttatttgttagttgtatgttgatgcatatttaccagattaatgttcattgtttatatatacaatctctcccgattaatcactgttgatagccatttttgtagcaagcggtctgttaaaaaagaaaggtaataaagtgttctgaaggccaaagtgcttgtatctttaggtcattccacagtatgtttcatgattaaatgaaaataaccacatatcatacgcttggctctctcttaatatgtagagtaataatgttgtggggttattagcatttactatgttattgagtgcagcaagtttttgtttggtttcactaggatcgagaggattagcttattggtaatttaaattatttaatttgtagtttgattttcacaaccaagaagacactggtgtgttattatataatatttgtttatgttcctgttagtcttactatcttgggtacgtgctaagttattatttctagttcctgccatcaacataaaaaataaataattcactacgatcaagataataaataatacttggatgatttcaaagtggatacctaatctttctcgctcattttttttaatgaaaaattattgaagttcaaaatgattaacaactttgaggaatagatcagataaattgtctattgttttgttgtttttaagcattgtaatgttcttcaatttcctagctcataatattgaaaaactagctctttctttggatagtgctatagtttggtggccaggagtccttagttgttttgagtttgtcttggtataccccagttttcctcttcaaccactctctcggaccttgtgtccctcctcaaccacgcatctaaaaagtggaaaggatcaaggatgatccgaatgtctcgtgcttaaggtcttgatagccgccttgctaaactgagttagttgcccaatcgggcgcgcttagaacccgatcaagttgtttttcctttatctagtgttgccaatctggccttttagtccaccctctctcaagcttgcactatggagagtgactagtctaatgtaagatcatacatagagtgaaaatgtatcaaattgtctcagaaatacttgggaagaatgcgacagaagaaccacctttgatgattacacacaatactttaatcattgttaacttatatttttatttttataagaaacactatataatatgcgagtttttttatatatagtattgacaaagacaaaacacatttgtactacttaattgaatttatatgtatacatgattgcttctttgttatggttacttattactattacttatagttaaagtctatgtcttttacatacgcttaagagttaagagtttgtttctttatttttgttttcaaatatcaattgctttgaagtgcaagttgtaaaattaaaagacaaaatagctgatgaagtgaacattcttttaaataaaagaagacaaaaaagtacagtcctggaatatatgtaattttttttctccttagaacacaagatgctttataacaatgaattcttcgatttcttttttaaataaacgaaaaaacacactacatattctaaattgctttcaattttaaagattcattcaaatttactattccttagagctccttcataattcttttttaatagggaaatttgaaattttatgcttacattagggggaaatttttcccttaaactctaaataccctatattggtaagattggacaatattttgttaattcccacattacccctcattcaaaccctctctctttcccctctttctctctttctctct

SEQ ID NO: 238379 - DNA, 678 bp, Cannabis indica
catgaattgctgtccccaaaaaactaaattattaacttcgtccatagagcgggatatatattagcatggtagttattatactatgtaaatgaagaagttatatatgatcactacattagtgggaagaatacgtgctttaattggtttcagttttaataaatatcaatataaaattatattgtcaattattaattaaaacattaattttacaaaaatatatgaaaacaaattaatttgtcattattattagaaacactttaataaaaaccgttgctattttcaatgtggaaatagatattgcaacattttattaataagtgttatgttttcatattctaattagttattaaaataaaatgatatgggattttgcaacactttttttctaagtgtttttattttaaaaatctaaaaatattgtaacacttataattaaagtgttgctaataaagtgttgttaaacataatatttgtagtagtgtttagacctatagatgcatgtgttctttgtgttcttaaacctgctctttccagaatggatcttggatctctacattacagcagaaaaaaagagagagagaaaaaaaatgagaatttgattagaagttgggttcattgaaggaggtgatggttggattcatcgatggaggtggtggttgaatttttcaatggtttgtg

SEQ ID NO: 238380 - DNA, 1991 bp, Cannabis indica
ccttgacttacccaacaacgagagattatactcatgcaaactctgaaaacccctccaccagatttctatttttgcatagtttcctccaactaaactagctcacacccttcctacaactcgaactccaccaatacttagccataatctttccagatgtgaacaagttttcagaggcaataaaatacagacatagcaaaacttggcaaatcttgcgctacaatttttattagaacctcacgcccagtgatagacaagaaacgaccctcccatctttgaatacgcttctacattctatctttcaaaaaccccaagatggcatccttattttgtcctattgcacaagggaggccaagataagtactatgttcaccagtaagtctcattcgaaggatcccacacaatcggtctcgagtagcattaggcacattaggattgaagaagacagaggacttactgaagttaacttgttgtccagaagcgagctgaaacagctgaagcagatgtaatatattcgaagcctctctatcatttgcacgacaatagacataactgtcatcttcaaagatgagaagccctcagcacaaataagaaataaataaggtgatagaggatcaccttgtctaatacccctctcaggaacaatcggacccatctcatgaccaccatgaattattttatacctcacagagctaactgtagcaataacaagatcaatgaaccgcaagtcaaaacccattttgctcatcatagctcgaagaaagccccactccacacgatcataagctttactaagatccaatttaagcgccatatagccttctttgcctttacgctttcttttgagatagtgcataacctcaaacgctattataatattatcagtaataaggcatcccaggatgaaagcagattgatttgaggatatgatctgaggcaacacttcctttaaacgattcgcgagcaccttagatactatcttatacaagacattgcacaaggatatgggccgaagatcccaaatcgaagtaggctgcttcttcttcggaatcaaaacaatattcgtgtcattcagcccatcaggaatactaccagtcgcaaagaactgacaaacttggttcacaacatcactcttcactatttctcagtattattggaaaaaaccttgggtcataccatcaggaccaggagatttatcaggatgcatattaaacagagcacttctaacttcttcttccaaaaccggcctaagtaaagacaaattctgatccacggtgatcgaaggagtaatctcctcaaccacagttgagtaatcggccacatttgaagtaaatagttagtgaaataatcaaccagaacattcgacaactcatcctcccaagtaacccaattacccacatcattcataagccgagttatagtattgtgtttctttcgagaagtagctttagaatgaaagtacttactgttactatcaccttcttgaagccacacttgtttagagcgttggcgccagaacacttctcgttgattcataacttcactaagattcaattcagcctcccgaaacctctgaacggatatagcatcacgccccttcttccaataatagatttcccgcttgcaatggctaattcgttgtttaaaattgcctgtatactctcgcccccacgcttgaagagattccccacaatacgagatttttttcataacatgctgaccttcacagcactcccaactatctttaactacctggcgacacagcagttcacgcagccaggcattttcaaagcaaaactgacaaaattgcaccatcccagaacgcactgtcagttcaagaagcagcgggcaatgatctgagacaaagacttccaaattatgaagttgagccatgcaaaacctttggaaccagttggaacaaataagagctcgatcaagacgaatttgaacccatcattcagtgcctctcccacgctccctagtataaggatacc

SEQ ID NO: 238381 - DNA, 909 bp, Cannabis indica
attatattaaattatatgagacaatatttagttggaccaatatcgatattgacacataagagaatgctagtcaccactttgacatttctatatatatatagggatatgattttgtctcgtgctgtactttcacggaatttattccgtggtacattaaatggatctcaggtacattaaatgagtgttagggtacgtttctactttttaactctaattacccctagatcaatcttagccgtcagatcaaataacttcctcatctgacggctgccgtacatcacggattacaatccgtgaaagtacaataacggaacaaaattatatccctatatgtatatatatatctgtttcacagtgtattaaatgggagtgagctaactagggcagtgcatggctaaggtcatttactacgttcatgcctccctcgcaactccttcattctctctcctctcatttcacataatctctcttcccttgtgggaataactaccacgcgcgcctcgccacctctgttgaagcgtggcccccacaccgggaaactcgtccaactcataaatcataacatttcattcacgggctccagactttcatgttttttttccttagagcgtgaaggagcgtgtgaaaccgcgtggacctcgcacgtgcggagtctcttggaaatgtagtccgtttcgtttctttttaagtcaaaagccgcgtattgttcgatggagaagaaacgcctgcccattccactagccaataacaactgccttgccacgtcagctggcctatgattgtttttcaaaagtcaaatccgtttacaagtcaaaagagaaccacctttcctgttcaaattgacacattaaattaaggtaccgtttagtaacactttcgtttttttattttttaattctacaaaatgaa

SEQ ID NO: 238382 - DNA, 1410 bp, Cannabis indica
cacgttatctcttcgacctaatcgtctggtccttctgggctgatctcgatgtgatcaggctcttgattgccagttccttttctcctgttcttcatgcatgcatcgggtatggttgcctgagaggtcgttattgttagtgtcggttctctttctccagtccctccccccacctggcgattaccggtttcttccgcatgcgatggtcattggtacccttcgaggacaactttcatctgtccattttggctctcaagcctttagatatgttccttttgaagggaaatttccgtaccctgagttgccattcttccttcttggtgttttagcctttcgaggatctcttgccatgacggggttgggtttaatatgtcctcgccggcgtcgccagtgtctgctggtgttccgaggatgttatctgggttgttttgaggggtgagatcctcctgttcatttgccatatctttcttgttgttgatcgattatcttacgaaaaggttcttttactgagaaaaagaaaaaggttcccacagacggcaccaaactgttttggtcgaaaacagtcaaaatttctttttgggggtctttctttttccagttcctaatcctcccttttctacgtcctgtttattttatttatatgtacattctttttttgcatggacgatctaccatcctcatatccccttattgacacgtgttctcgttcttttattctttttacccctgccacgtgttcgtattctaatagataactcccgtgttacacgtgtttgtacttttagtggattttaatgctattattctccctaaatccaatggtgtcgtgtccgtcggcatcgcattcttgaaattatcaatttctttatgctctaggccctttatttccgtcggagttctcgtctgagggggtctgagttttcctccgtcggggacttttgttccgttagtggtgttaccttggtcccccctttgttgtgttccaggtacttcctccgccagcaagttatctgggtgcctcatcgagttccggtctatcatttcacttatagttgatcttcaatccgtcggttacttattccctcccgttcttccttctgcttccgtcggcgctttctttacttgttcttgtcgtttaccgttttccttctttttgtccgtagtgctcccttaaggattgacaactaggatcgataacttgaccacaccgagttgagcctccctttatatccttgggcctggatgtattcattttgatgggccttttaacgtgggcctttttgtttattttattgggtcgtttatttccagtttcgattttccccccaaacaatacgctatgaactatccattgttataatcccaataatcaatgatcctctatagatgatctacattgcatagggataaaat

SEQ ID NO: 238383 - DNA, 567 bp, Cannabis indica
ataatgtagttgtatgtgtgttgttgcatattaataatgtagttgtatctgtcgtttgaattatataactattttgttaggtgtaccaaaaataagacgagaaaaattaattaaatatacaacaaaaataaaactagaaaataacactaattaaatatgtaaattaattagacatcaaaatatattggtgacaaccttaaaaaaatataagcacaacacaaaaacgattataatacaagtactcatgaaaaaaaaactaaacattttaatttttctactatttgcacaactaataacaacacacaaataactgtataacgatccgacttaatatatatcaccatgttgcgacaacaaaaataaaaactgtaaaacaacacactaatatctcacaaatataagaataataatataatagaaactttaaaacaactacaaaatacatatactaacttaaaagtatatatgtaaaaaattaagcttatatatttttttcttgttgaacaactaacaaaaaattagataataatccaatttttatatgaaaattaattagacaccaaaaat

SEQ ID NO: 238384 - DNA, 3185 bp, Cannabis indica
actaaaataataaaaaaaaaaccatcaaaggcttcccataagccttgtgccaccactgctatcttttggcaccaactgatggcagtggtatctggttagggtttcagacattgaaatgaggttttgggttccgagatctgaatattccttattcatatggataagatataatattgtaaggatgtacaagagaattaagattatatgatatgaataaaataagtcggtagtgtaataaagtaatgagaatctttaatatgaaactgttaagtacagtttactacacactacaagttatcattttttgaagatatttgttttggaatattattttattattattttgtattttgaatttaacttagctctagttagaaaaaatatgtatcaagttaagaaatcctaagtcctagatgtaaacatatataaagattattaagtcaattgtaaaggggactctctctcttacacacacactctctctctctggcatttgctcttattctaaaaaaactcacttaaggactgaactctttgagaacataactttggaaaactcttctcaagcattgagatcaataaaactctaagtggactaatccatttccaccgaaaatgggtgaactactataaaaccttatgcttgtcattgtcaattttcttttctataaatcgattaattggcagtgaaattcccttacattttaattttatacacttgacccctaattttgttttgtggcaataccctctttaagttcacttttgtttgtaaatttgagacaccagttgaatttcaccattaaattctaactagattaccacttgtatacctgggtatacgtgacatgtttttattggtttgaggttttagtgtcatgtgtatacaagtgttcacaatgacaatttcagttaatatttagcgctagaatttaattggcggtccaaatttacaaataaaaataaacttaaggagtattgccacaaaaaataaaataaaataaaatcaggagattaaggtagttctggtcccaaagtggtagtgctaaggttatgtctattttcattgtgaagatgttctatgcttttgagagattgtattgggttgaaaactataaatgactgaaaagaatcataacttgtttggactataatgtgtactcaacctgtaacatgtaacatgatatttaaacaaaaagcacccttaatattgttctcttatttaattaagtataacaatatatttatatatatgacacgacaaagtatagactagagtagagtacccaaaaagcaacacatattgctaaagtttcatcacaaaaagcaattagaaagcaatgcatgtaagagttttctacttaaatcaattccatctatctttattatttgtaaactttaaataacaccaacaatcttaatataaggattaaaacttatggacctgaaataaacatacatataaaattaagtgtagtgatggtctatgaatatggttctcattacatcatgtaatccaactcacccttccaatccccactttacacataataaggaattaaattaagctaatctttattagtgtagctttcactagccatgatgacacccctcaaaagcactgcaactcttcccaaatcttgcagtattttctcaatctaaaaaccaaaaaccgtgtgaaaaaacagagaggagggtcactcattcactcactcactcactttgcctcaacacctttcaccgaaaagttataaaatgcaatgtacatttattgactttatatatattaaccaatttattttacatttataagcacctaactaaagtagtgtgctcctaaagtcatcacaaaccctccctttaaaccctcccttgcatgagttcatgagactttctcttcactccatccatggctttctagggaaagagagagaaagagaaatcctgtcagcagaataatgggactgaactgagaactgggttgttgttgttagaacagttgattgatgctattggcacttgtttcaaagaaatcttttttggagcagtgatgggagttgttactgttggtgagttgaagccaagcatttcagggaaaaggtcatttcgtccaagttcaagtataaggcatgccactgaatggttataccttctctctcaattttccttccttgtttattattaatctctttttaggtgtttctttatttgcatatattatataatcaacccaattgcaaaaggaagaaggaaaaaaaatcagtacttcttttcagatttgccatctttttaacatcccatgctcaactatttaaggaataagacagttttggcaatattacacatagagactcagagagtcccaccaccattttgatcagacttttgttttctttttcatgtgtttttgtgggagttgaattgtcacattcaaaagcttgcaagtaattaggccgtgagatcccatttttgtcaaggtgtaatttccacaatttcacaacctcaagtttctctagtttggtaggccccttagataattgttttcacaataaaattgtatataattgaagaattgaaaacagcttgagctgatgaaataataaaacaacaattacaacaacggcacatcaaaaacctgtgacttaagacttcgacaaatccacatccaaacgacaagagcacgggattttaagctaagaatcaatgtttatattctatgttttcttgggtgtcaacgaaaagacaattcatgcttgcccatcaattatttttgtgtttttaccatctgtagctccatgaatatagagattataatattttataaaaagaactgtattgtacagtgaagctgtacgatagttcactgagtatgacaaacccaatagccttactttgaacacaacaacaaaccagccatgtaatcttctgaacaacctttttttttctaacccttaaaggagtttatcttttttgcttgagtccacttattacacaattattgtttagttaatgtcccacctgggtcattggtcacatcgttaaaactaggaggctcataatgtccatatacttaatctgctcaagccttcgagatagatagatttattttgaatgcttaagttttttgtgcatagtgatatgaaagtctgtaggaggaagagcacttgcaaagtttttgatatgtt

SEQ ID NO: 238385 - DNA, 879 bp, Cannabis indica
gttaaaaaaaaatcgttaaaccaataattgtcgttacataggtactttttatatataaagatattagattttggggtaaagtttacatttttactgtcacacgataaaatttataaaaatattgtcctgcttttttttttatatatatatactgtatacaatgttaatcacatatgaggtttcaatctttcacactcacgaacagttacacaacagcaaaatcagaacaactggaaaacaaccattaattctgacgagatgaagaagaaacattgaaatcaacatcaaatgaacacccaacaatttcaagaccagaaatcaatgaatcaaacatgttaaacacttaaacacacccaaattctttttaatacgaaattaaaaaataatgctcaaatattgatctcgaaattcttttaacctgttgtttgagcactttaaattcttaaacataacaatactgtactggggttatcatggtttttctaatgttgtatttgagatatttcactgttgttcgtataattaacaaatgttgatttcaaattgcacatgttaaatcaaccattgaatatttgtttcaagtaatcaatatcaaagaatcatggaaattagacctcaaagagagaacatgtacatgcaacaggttactacacaagctctgttcagattactacactacaaaaaattggctagcaacttatgaagaacaatgtacacaatgggacaccaaagtgagtgggatgtaccacaaaatgtgaaagacataatagtcttgcctcccattgaaatggtgaaatttggaagaccaaaaaaagaaagagggtagaagctggctggaaaaagaaacaacttaacaaaatgcatcaaatgtgagaagca

SEQ ID NO: 238386 - DNA, 1298 bp, Cannabis indica
gccggccgaaaggaaaggacttgtaataatattttttttaaaaggttttttggatctcaacatctgtaacttttcgtttataaagtttaaagtattacaagtttattttcattcctattgtaattaaagtttaaattctgtgccatttttattagtaattcagtttgggggattagggcttaataagtgacttgggtagcgtgcctaattatttagggcgttataatgcacctcttgggttcttgttctcgcttcttctctggctcctgcttttatactgaatactgagaaattcggggaaatatgcttctatgattagccatgaattcagtgagagcttggccgttttgtggtccatgcttggttgtgaggtgattttatgttggccgagtctcaattgttcacttgagttgttggcctgatgctgtaggtttctgtagaacctgttgcaactattgatcggtgtacgacccttatagggtgtatctcaaagtatggccttagctttgtggaagctaagagcaagatgtgggtcagcttctccatgagtgggaatggacttttagtgttgatccatctcttgctggtgtagtatacaaggtgatgtacattatcttcttctcttgtgagggcaaaattcacaacatgttctgtgactgctaggtgcatgcctagctcttctttgtctgaggatttgggcaacataggttgctgagctaaattatttctttagctctcagaatgcagtttcacattcctttgtccactcgtgtttgttgttgcttctgcttcatgttgaagaagggtacacatttgtctgtatacttggacataagtctgcttaatgcagcagtgcatcccgttgtgctttatacttcctttattgttatgggcgacttcatgttcaaaagggctcgggtcttgtctgggtttgagctcctttatgttgtagctccacaggattttgaaattttttgtctaggtcctccatatgcccctagcccttttgagcttgacaagcatgtcgtccacgcacacattcatgttgcggctaataagatcattgaacatttttttcataggcttctaatgtatggcccctgcattcttcagccttgaagggtgtgactttgtagcagcacaagcctaagtctgtcatgaagcttgtatgctcttgatctggtggatgcatcttctttttcttggcttgggacatggccaagttctaacagtgacaggcaaattctaatctcctctcgtcaatctacctcgtgccttattgggaatttcaggcaaag

SEQ ID NO: 238387 - DNA, 789 bp, Cannabis indica
gtgaaagtgtttgtttggcgtatgttgttctatttggttttaccagtagcaacacaacttatatcccgaaaaagtttgagtacctctttgctactcgcggtgcggagaagaagttgaaactcctgaacatgctctattttttattcgcatatggaccaatgcaagaaattctcttattattctttgacatgttatcccgtgaggcttttgaattgatgatgacaaaccttttggtgactgtggtatgatatgaattcagtattatttggcaacaagcagtgaagattggatattattctagacttggccaataaccatctagcagagtttaaggagtatgatcggcgaggccttcatttgggtttgggccttgtgaacccagttgtaaaccgaactactcgatggatgacacctcctactaaatcctttgctctagtgacggatgcttcggtaatttcggggagggactttgttggattgggggagtgatacgggaagcaaagggtgtggtttggttgacgtggttatcatgtgtgttaggtgatttctctgttaatgtggcagagctgcttgtcattcgtctggacttgactcttgcacatcaatttggtttcaatatctctattattaatagtgattctatcgtgataattggttggattaataagctttttattaattttaattttcagtctattttattagatatatattctttattagttgatgttggtggtgattcttgcagtgtcatttcgcgattaaagaatggtgttacctatacactga

SEQ ID NO: 238388 - DNA, 1179 bp, Cannabis indica
ggactcggacccggacctgggactgggacacccggacccggacccggaccaggatctagactcggacccgaactcggacccggacccaaacttgggacccagacccagacccagacccggacctggacttggaccgggactcgggaccgggacccggacccggacctggacttggaccgggactcgggaccgggacccggacccggacctcaacccggactcaaccccaacccagacccgtagttagtattggaattgagtgtataaaaatatattataacttcacacaatcaattaatacaagtcaataccaaatattgtattatattaaataatactaatacaatacaatacaatacaatacaatacaacacaatccaacacaatacaatacaataaaatacaatacaatatgtcgtaccaaacgagcccttagtgtctgatactactttgaaatggtattttataaatgactagtaatattttataataatcattaaattaaatgatgtaagaccctttactagtgatattttacattgctgcaactatttttttccctaaactcgatcacgctacatcttggacttttcgtaccaaaggtttcgagttagaaatcatcaacgctataagatcaacccagaattcggtgagttttcatctttaaccctctttctctctcttctttttcctcttattttttcttgttatggttttgcacgattttgatttgaagtggtaaatgaattatttttaggtcttttcaaccagtcctttcccccctctgaattaagttcttcccataatttcagaatctttgaggtatttttatttgtgacaaaaaatgcctctgtctgatttttaattggaatttctagagtttttagaagggaaaaactcaaaattatttgtcttacccttcaaccctcggtctaatcaaccaaaaacaatactagaaataaatgatgagaaaattaggttatttaatgaaaatcttaatcgagaggatgtttcggctcgctataaacagtttatgaacgagatccttgatggcaaacgtcactctttgcgagatgcgacttggccaaaactccctaatttaactaactatccttaagaaaaaattatgtttcggctcgctataaaaagtttatgaacgagaaagtgccttgtttgttt

SEQ ID NO: 238389 - DNA, 1178 bp, Cannabis indica
atgaaattccatgcacaatcaaaagttgagaataaaagagaaaattcttatttactcttctaaaatactttgaattaattgctgtgcaattattgtgaagagatatggaatatttttgtcacacatagaaaatttccatagagaaaatagatgtgtgaatatattttctagaccaaatataatagttttccaagctataggagaaaaaatgggattacactacttgttaagagtaattacaatttaatatgaaggcttcctaatttcctattaccataaatgtatcttaaaaataaatgtgagtcttggccttcaagaaatgaaatcgactaataaaattccatttttattgttttattcctctattctttattcccttagaaaaggcctaaaaatctgaaagctctaatttgtggtccattaacttcatcttcaacctctcactctctttctgtacattcatatttttgaacagcaacaatataaaattaaatccctcctttttgcttgttgcacgtttcttgatctccagaactgcgatacaggtgaaagttttattattattattattattattattattagttttaacctttcatatgtatgctttttataaatagaggagtgctaacgtttgttataatctcttagtcaacttccatgtccgaaaacacatgttggaatatttttttcaaattttttttttcacggggcgttcgttatgcttacaacataatctctgtaaaattttgaaaatttttgagtaatttacagtgttgaaaatacgtttgaagttttttgaaagcgcgtggtaaaaactctattttcggtaccgtaaactattcagaatttttaaaaaatttacaggaatgatattgtacctataacgaagttacacgaatattactataaaaaaaattaaataaaaaattggacatgtgatttcggaattgaaagttgactaaaaagttgtaataggaggttgaaattagcattcctcaatatgagttgggtgcactcactttctcgttattgaaaaagaaagttaggtatataaacacaaataatagttcgtttattttttttgtttaattacccgaagttttattgtatgaatttgtaaagtccttttttggcaagttaggtgacaaaataattttcctttttatggtaagatt

SEQ ID NO: 238390 - DNA, 738 bp, Cannabis indica
gtttttaccaaaaaaccgcctctaaatgtcaatttcgaatctggtgggttttctcacaccctttagcttccctttttataaaatgggttaaaaaaagggaagctaaaggcccatattgtagtagtgaaatatgctacatatcttcctagtgttggttaattctattaattgtcaaacttcaagccttttttattttcaagacttggtggttgatattaaaaattatttatcctgcctcatgttcaggaaaatgctaattaaactgctcacagtttagctaaacaagttttaatattagataatgattgtacttaattaaataaaaaaattcctctgccttctaaaatactcgaaattcctaacggtttaataccgtcaggtaaagaattcctgatggtctataaaactgtcgcctatatgagcgtcgtgaataccgtccctacagtggatttcccaaaaaaaaaaattatccccttcattctccttgaaaccaagatgggagtttcatttggccttaagagccctgaagagtcgagatttgggccatgagtctgtcgaaaccacaactttgagatctccaacgatttgtgaaatataaaaatttcaaaaataaataaatccaaaataaaaataataataaaaaaagttacaagaaagagtggacgagatagagaagactgaccggtgctcgtggtcgtgcgtctgtctttgaacaatagagagagatagagagagaga

SEQ ID NO: 238391 - DNA, 2156 bp, Cannabis indica
aaaaaaaaaagacataatttttttctcaattcattactaaaattatagagttttgttttgtccctcaattatttaattatttaattttttgtgtggcaaaaatctcccaaactacaacaatcatataaaatggttgcagtacaaaaatctatttaactaaaactagccgaaattaagcttattagtattgaacttacaaactgtacatattcttaaatttgtcattaaacttgtataaatacattttatatctagactctcaagtcgtgctatattaacattacatcagtgttacattagtacactacttaagaaaataaacaaaatatgccacacgaagtatttttgctaccaaaaaaaaaggtcaaaaacaccaaattgggaatttttgctacaaaaaagcctgaaaaacaactctcaaagttaggaagaaaaaagctatgataatgtttttcattacaacaaatacaatattattctcatcaattagtccccaactatataaacataggctaattctccctcctccaatgtcacaaagaaaaggtcccaagttcgaaatctccaaaatcaatttttaaagcgcattagatgaaatttttcttaagtagtgttctgctattgcaatatactctcaaacttgtaatacaacacattacttcctattatgatccacaatatacacggattaagaacatattccaaacatataataataatagaataaccaaattgatttgcaaacctctcgtgaaaaattcaagatgatgtaacaatacaggaaccatcaaccagcagagacataatatataattcttaccctaacatgcatgagatagcttcttcattttttaactaagttcttcgcctaatacccacctaatcctacaattttcggggactaaaaaactacagcaattgctgtgtaagtgttctagaggggacttgaacatcagattttgtaaatagcaaaccacatacatgagatggttttcgagcttctcatccaaccatggtgcgctttcgacctcgctgtctcactatataaagtcgtagattagtaaaggaaaccaataaagtgggaactgaaaatttaatagtcaaagaatcaaaatcataccttgagctaacttattcaatgttgatgaccactgctttgaggacttcctatacgcagcaagtatctgatccatctacagatttttttgcattttttcactatactagtaatggaaaaaaaaaccactagatttttcaaattatttagttatataaacttatgtttttttaattagaaaaataaataaaagtagtttagcaataatacttcaacagccagggcttaccacattcccacacgaagaatgcatagagagcaaagctctctctaatacgtatagatcaacagctttgtcttctggaagtgttgatgtgaagctcaaaccaaaatcaatgagcacctatcaaaaagaaattcgagcttatggtacaataacaattgaggaacgaataagaaatctctgtgtctgctcgaattaataatcaaacaattcgagcttggcagttgcctatcaagaaactcaccagttgattggtagcatctttgactaacatgtttgatgtggttaaatcaccatgaatcaagccaccatcatgcagtttggcaattgcctcgccgatttgcttcgcaatatcgtccatctgttcttttcggataccatgtgctccaaattcaaggaatacatcctttactgaaggaccctccacatattcaaatgtgagggtatgtaaaacggggtccacaaaaaacaatactggtgtatagaccccaagtcggcgtgcctttgtcatgcacctagcttcctacacaaacatatgtgcacatcaatttaataaagttagtttccaatgacagattttcgaatctgacatttgagttgttaattttttcactaagcagcagctagaaaaaacaaatgaatgttgttttaagaaaaccataaacttggtttcgaaatgtgtactgtaagaactattagagaataatttcaaaatgagtatttaaaagtcaaaagtcaataactacatgtatgcagacatcaacaacacgaaagagagtagtagtacactgagaataataagagagagaaaagaaa

SEQ ID NO: 238392 - DNA, 1059 bp, Cannabis indica
aattatgatctgataccatgttgccttacagataacaaatcatgaagtaattctcttatatggttatatatgtaaaaaatcatgaactgattcttgtatatggttatatatgttgtattcatgaattgatttcatgttgtgttacttgtaggtgagatagtggtccgcaatttaggtcaaaatgagggccaaaatgacgataattttgggctggaccgagctagatatgaggctttaattgagcaagttgcagatgaggcccaagaagactccgactttgttgaagatgagtatgccctagaggaagatgatgttggagaagctgaagtaaacactactgaacctagcatatggtggcttttagttaatgacttctgcaaccaacaagaagaagataactcaagtattggttatgatgatgatgaagatctacatagcttaaaaagtggtgatgagggtgactgtgaatctaaaaaaagtaggaaggagtttaccccgcgagatgaatggttagatttcaagtttgatgttgaattagagtttgctaatgtggaccaactaagagaagctataacagagtacttcatagccaatgacagagagtttgtgtatattttcaataatcaaacaaagttgaaaagttgaaagcagtttgtaaggctaaaggatgtccatggtctctatatgctagggtacagaaaagagacaacactacttttagaattaattccatttggaatgttcataattgtggaatagtgtttaatagtaggcatgtggatgcaacttggttggctaagcattttatagatcaatttagaatgaaccccaacatgcattatagtaactttatggagttgaccactgaaagcaagttctcccacacaaccaggcatgttttctacaatgcaaagaaaaaggctaaacaatttcttcaaggctcggtagctgaacagtacgttgtattagaggattactgcaggcaactgctcgagttgaatcccggaagcacagtcattataaaaagcaatctagttgatgagaagaggttgttcgaga

SEQ ID NO: 238393 - DNA, 923 bp, Cannabis indica
gactaagggccatggtctagagagaaactgtctcgccatttccatcaaatgtgagaaaaacaatcaagagaaacccgctttagatcgcttcctaatgatacgacgggggaaagcataaagttgtctcgcaatgttcatctctattacaaaaggatgcgagacaactctaaacataccacttcagcgaaaacccgttacttttagataagattaaaaagcggttattagcagttattttatttatcacacatgttgtaaatatgaaatgtggagattgtctacgtttcatagacagttacctagataagatcaagagggaatacttgtcatttcaaagaatcctataaatagggacaaagtcctacgaagaaaggtttccaacttttttaagaaaaaactatgagagattaaggaaatatccagagatgttctcttgtatttagaaacattataaaaatataatcataaataatattaacttgtgaagtatgtagatttaattataaaatcacgtaaattttttatatattttatttatattcaatcataattaatattttagttttatttaaaaggctttattgttgtaacaaattttttgtgttaatagttagaatgatatatttgaacttatttatttatttgttatttatgtgggtaaaatatgtattaatagataaaaaatattaatatgtcaagtaagattaatatgatataaatatgacatatttaaatgttgtatcagttgtgttctatcatgtgcttacctgtttataaccatatcgtattcttataaagtatgccactctctctgggttcactatgattagcacctataggtgtgagggttaacccaattgcccagttcaactactttagtaatccagttgatgtggatcggtgtgtgaatgacacccgcaaga

SEQ ID NO: 238394 - DNA, 1360 bp, Cannabis indica
tccttgtacttctaaagttcagagtcactctgctgggccactctatttctttccaacagattaaactacaacgtaatattaacaagttctctaatcgtgaactcaatccttattctggttacatttataaaaacctttgatgagatcttttcgtttacaaacttgtcctagacagttcctagacctctttggtttaaagtatccactactaattttcttcccagaaaggtagggaatcatactgttataatcttcaatctgctctaaccatcgttgttgcctcctaattaaatcctttctaaatgataaaatattgaggctcctatgatttatataaacttcgtacttttgccaaataggtaaaagcaccaaactcccatggtagaagccaccactatcaattcaatattataactggaatactattactcacacttccttaatcgcttagaagcacatgcaataactctcttggactgtatcaaaatgcaatcttatccttgtttggaagtgtcacatcaaatcataatttctcctcactaactagcaatgttgacattggtacaatagttaacctttgtttcagttctttcgatttgattctactaagggcgtagacaaccctcaacaaacattccatagcatcctgttagttctagaaaacctctaaccttcactacaaatttgaggtcagtaaaactcgcgtttattgtatttagcaaaaatttatgcttccagagatgttacagcaccatccaaagatgtatctcatatgtctcctgtgaatcggaagaaatcacaataccgttaatgaagacaactaagaagtcatcgatacaaaaactgtgtcttagtcccaccgatgttccctttgtaatatttgccacaccaacaaaaaggttggtacatccatcccatactaaactttctgccttaaatgtcgtgattaatggattttgggacccttgaagcttgcccaagaacacaaatagatcctcacctttttattcaagaattgagacctttctttcacaatcaatgtttacactatactttacaagtcaatccaatccccaacattaccttaaattttcctactaaacccataactggtgggttggtaatcctttccctcgagttcattagggaaaacaccctttacctaatccaacattaatcatttactttcatgaatctctctttatattatttcttttgtgatctactccttgcactcttagcagtaagggttagctcaaccacctgagcataaagacagacaactcctagttatttagccattatagccacattccgagtgatatactctttcaaccttcaatttgttggaaatatttta

SEQ ID NO: 238395 - DNA, 1248 bp, Cannabis indica
agatgaaccaaaacatacacaaatgaatgaaaaatacttctctttctttattgatgttgaataaaatggactacattgaaatggagttttatttagggcataaaacccaacagtctcagcaacaacatccacattgcgttgagccaaacgtcatgatcaactaaaaacagttaggcaaaaaagaagatttgaaaaattggagaagattggtctcttcttcaacctagaaaagcactcccagatgattcttcgcgagccatttctttcatctccttggaagtgaaaccttcaagcttattcttcttcccagatcgatcattagcattcctcttcaggattaaaacctcttccaaggtcttctcattgtccagatcaatcacgaggttctccctattaacctcttcactcgggcatattccccgttttcatcaactattaagattttagtgcttttatgaaacaaacggagtattctggaggtcaaaactgggacccaacgcccaggttgacctagtgctgggctcagcgcctaagttgacctggtactaggcccagcgcccaagttgacactttgtcaacctggatcatttccaaggagtttttctgagaagtcttcttggcatattctctgtttttgtcaaagattaagatacatgtatttttttagaatccaacagagttagctggtggccaaaaactagactcagtgcctaggttgacacttggcactagacctagttttgtcaacttgggctatttctagtcatgttcttgaaaaagtgttttgacctttttttctgtcattagaaataacgaagatgcaagtgatctcggggagtaaatgagatttccagggagccagaacaaggccccaacacccagtttgacatggcactgggccctgcacccatgttgacatgcaacctagtttgcatatttttgcttttgctcttgacattcttcttaaaatagtcaaaaatggggtaggagacctcgttcgcaatctcgaatgtcgtagaagtatcaaaacaagtctcaggaaggcacctgtgaaacacccaatgcccagatctctaactcttgtatcctttctgtagcagagtatcaccaagatctgagcccgattctccttcttgttgtttggattcttcacaatcttacatactatgattgaggactcacttgtgatgtgtgggcatgcactcaatcactaatggttgaattttggtttgtgaagaatagctatgg

SEQ ID NO: 238396 - DNA, 1441 bp, Cannabis indica
taatagttatttaattgaattgtgtcttaatactttattacacttataatattaggacacattaagtgatgctaagcattagtgtcttttagcatttctcataacgtaactaaacaaaaattaaatagaatttgtgctcgcaaaacttttcagactattaaaaatttcacttaaactattaaaaatgtacgttagatttaaaaatttctgtctaattctttaattttactaacaaacgtctaatgtgacgattatccatgtactaagtgctggcctcgaattttaacatgtatgaaattatacttccctaaatttcatctacgctaagtgtctgttagaaaaattgaataaaagtcattgaatctaacagtttccatagtttagtagaacttttgaacgactttaaaagtttaataagtataatgtagtatatgttaacgtttagaggataaaattttttaatttattaaattaaaaataattaaaaggcattacgaatttacacaataaagaaaaaaccaaactcatttgttcccctaaatggaaccaagcccttttcaccaaatggggctgggatcttctaaatgaggaacagtccttatgttgtcaggtgctgcgtgctaaataccttcggggcagaaggttttttgattgtacagttaagaattctgactcttggttctggaggaatgttgtccgtacaaaagaaatcttgaagaagggggcttgtaaacttattgctgatgggagagatacaaacatttggaatgacccctggattatccatgggagtgatttctttcctaaactcaatcataatccccaaggggagcctgaacttgtgtcagagttacttttaacggatgggaactgggatatccgaaaacttaatgacctctttgacaaggaaacaattgctggtattttaaagggtggtagacctaaccgccagggtaaggatagatgggtttggactaaagattcaaagggagtgttctcaactaaatcagcttacctggtccaagccttggaaagggcccccttgggaaatgttgctcctgccatgtggaacaagttgtggaattcaaaagttctagagcgccacaaagtcctttggtggagcattctccctaatgctctacccttgagggtactgcttgctaaaagaatgaccattgatgagatctcctgccccatttgtggggatggagatgagactatggagcacctctttctctattgcaattttgcttcccacctctagcggtcttcccagtggggtattatgccgattagggattcaggagctcgcatgtgggattgggtttgttttatctggaatcttaaatccagagggtggacactgatgagttgttcctttatgcttcgatagtggttgacacgatatggagagctcgtaatgacaaagtccataacaaca

SEQ ID NO: 238397 - DNA, 861 bp, Cannabis indica
aaagagttttatttagggcataaaacccaacacaggctcacttgattaggtgatacaatattcctggcgacgtatcaagcgtaggtacgggtgtcagtgatatgaaattgcctgtttatgacatagattgaaaccataattggctttcttcttggtgacttatctcgcgttagtacgggcgtcagtgacatgggatagtactgcgcgtaggtacgggatcgtctgattagatgatgcgatatattagtgccaagttgtggcacacgctcaccttattagggggtggagtgatattatatatgatattacattatgacacgggcttgcctaattaggcaatgcaaatatatgagcatatctatttctatgcatatcactggttatattacctactgttgaatgttatagtttaatcattttgtgataatgaaatatatgtaactagctatttaatgtatcattctttatcacttttcttgttgagtctatgtgactcacgagttctttgtggtgcaagtaagggcaaggcagagttagagcaaccatgagatggtgatcttctccagcaatgtacatattggccccaccagcttgcttgttcagtttccaggagttgttttagaccggcagtgtctgctgtattttgaattattgttgtatgtagtcatttggataaatcttttataaaagggatgctcagtgcagttataatgtccatttttagtgttacattttagtcaagtttatattatcctcagagtttttaataattaattaatatattagtattaaactagtttagaaaatcacacatgtggcgttacaacttggtataagagcagccatggttttaaaggtcct

SEQ ID NO: 238398 - DNA, 805 bp, Cannabis indica
tttgctgaagtgccttcatcaaaattgctcgttggtttgacgttgcttgaatccagatatcagactcttgagtatgttcttgatttcctttatgcttattttggcatgtttacatttcgaatgcaccttcgactttgatgtagaaaaatatttaggaaaccctaggttcagaaaccttgtgagtgttctttgtcatgatttcatgcgattttaagtccataatgcttgttttctgaactacataatgcctctctttcatcttgcttattctaagcttcatgaaatttttgccctaactccaaaaaatttcaaacttcttgagttttgacgtttctttgaacattcttgttctttaatctgttgagtactcctggtcggcatatttggtttgtttatcgttctctattctgaccaaacactcatcttgtgtgttgtcatttgtagatgaacccaggtgagttttgggaaagcgaacatcgaatcgaccaagacctgcttcaacttttgcacgaggaccatccccatctttgttctagcccaccttcttctagtgaaggacactctcccccacatcttgtacccaaccatagaatgatgcatctgatcctcaagtggctcagcacgccactttgcccagcgccgaacaggatccaaccgtccaagaggagggagatcatgaagaggatgctgaggtccaggagattgaggagcaggacgaagtacgtcctagcggttcctccgaggcagaggaagaggcagaggttgaacccccaaactatggggagtacaatgaggcttgggagcc

SEQ ID NO: 238399 - DNA, 1110 bp, Cannabis indica
tgatttactggaatcttctcgcaggaatgctagtaggaggcaacctcgaactagggaacaggaaatctctcgtggcaacgagagagatcctggaacttaacctagggcaagtaggttgcccccgagacatcattaacatccttctcgcactaataaggaaagggcacatacaaaccccaacagggggcatgtatcaacccgttctcaaaagagaaggccagtacgtgacaagataagttccagttctagacatacaagaactcgtagtcgatctatgtgaggaggagatagaactcatcgcagtactgattgagaaagtacgggcacaagtagagcacaaagttactcaaagacgaggtttgtgagtaactttgatccacaacagccggatcttcgtaatcaattgaaccagaaaaacctgaccttcgtcaacagctcaatcaaaagcatgaggatcctaaccaattgcgaaccaacgagttggatgacaagtttaggaagtaccaagatggggaatttgggaaactgccttgttacgactcggacgaggaacccaagcctttccatccaactatatgagtgttgaattcccctaggaatttaagaaccttcacatctcgtcatatgatgggactacagatctggtcgcccacttaaataatttcaacactatcatgtgagccagcaatgtgacgaataatttacgctatattttattccttacctcactagttggggctgcgaaaagctagttcaataaatttacccatcattcaatcacctcttgggaacagttgtctaaggacttcaagaaacagtttcaggcagcaagggacaggcgacccaaagcgtcttctcttactaacataaaacaacacccgggcaagacacttaaggcttaattaatttgcttcagtacagctgctgtgagagtaagaaatttgagcgacagtgtccagctcactacccttcaagcagggatcatgaatgatctctcaacttttggaggcgagttgtgggatgacttgtaaggtttcccggtgaagaacatcagtgagttcaatgagagggctcaggtgtttgttcaaaaagaggaagtaagaaaagaga

SEQ ID NO: 238400 - DNA, 766 bp, Cannabis indica
tttccccttagccgacctaagcggcaaaacaaaaaatttcaacactgggagaccctaacccgtttggtctattgtggcccgaacatgtacatacatcacccagctcccgcagtcatgggtgatcagatttaccctttcctgcacagtagagcacacgtgagccaagcctagcaagacagtataattatcaataatcataattaacacatcacaaaagtattaatgtcatttatctcttcatcctgaaatggtggggggaaagagccttttaagtactttaggatgcggaaatctcatcctaagtatgatgatcaactcagagaagtgtggaatttgaggtgttccggcagtaaaatgtatcaggttgtgaccaaattgaaacaatccaaagctagactgaaaaatgctgaataaagagggctattgtaatttaaagcagcaggttgctgaggccaaatctgatttggaggctattcaaaatcaattgcagcatcagccacttgattcaactcttcacctgcaggaaaaagaaattcgtgagagattagtgaaggtccaaaaggattacatcgcctttcttcagtaaaaggccaaactttattggatataaaatggtgatgctaatactgacctatttcatgcttgcatcaagcagagattgaggcaaaaccgcatcctatctattgatcaaaaacaagatggcagcgtggtcactaatccaaatctcatcactgaggccttcttggacttttataaaagtctgctt

SEQ ID NO: 238401 - DNA, 602 bp, Cannabis indica
accaagtcctcgcacgaaaagggttcatccaattgagtgttgtccaccgattcagtcccacttccgtccgcatcttcttcctcgtctcactcccaaactggggccatccagccatcatccatctcctcgacctcgacgtcaggagcgtgcctggaatgaacaagatgatcacgcgctgacactgtagactcgctgtctcaaatctcgatagttcctaattcagcgagttcctgcaccatcctatcgatatccgcagaagacaatgggcccaactctgcgtcccctgtggcagggacctcctcctctgagatcgaggtcaggataaagctgtcttcctggtggtcctgatcgccatcaaacgcgttgcctcctgagccaagcatttggctatccgatagatcgctcatttgaaagatagaagatcttttcagcgtggtgaatgtgcgaaaacaaagtaagtgacctcacccgcatataaaatataaaattgtcttagggggatgatttgaattcttgcgaaaaccaatcatcccaccaaggcgcaaaatgacagatgtgcgagtagaaggatatctcaaaaaaacggttgggtgtatcccagt

SEQ ID NO: 238402 - DNA, 1528 bp, Cannabis indica
aaaaatacaaaacaaaaaaaaaattgctttaaagtgaaaaaaataaaaaaaaaaaaactacccaatatttttgaccattgaactttaacatgtacttaatcatgtccctaaatcttttttggccattaaattttttttcctaaactattgaaaattgttaaaatttaaaaatatttgtctaattttattctattttactaattttatgattattcatgtactaaaattatccaaaccgactaatttattgagcggattgaaattttatactttcttaattgggtgggttacacttagatttttgtatcccatctttacgttgggttgaataaaatgtaacgtaaactgatcaaactatctaacgtacacccaaccacaagttgatgtataaagatatataaagatatttaaacaaatgaagtagagttgacgagaatgctctaagttttaaaaaaaattaaaaataatttaatgttctaaaaataaaatttaaatattctattttttattattttatatgtccattaaataaattgtttaaattttagtttaatactaaattagttcaatttttaaaaattgcatcttaaatagttataattacaaaaatatgtataactatttagatacccaaaatattattagaaaatctatcactactatttaccgtagatttttagaaatcgaattaaatagatattaggctaaagaaagtttgtttgagaagaaaatgagatactaatttttacgtggttcgggcattaataaaccttaatccacaagacactgctgctaaaactctttagatatgaagtttacaatgtatttatggttctttgaacactaaaattcctaactctttgtatgaaggattaatggcatatataagtaatttgttggtgggtcggtgcggacacgttctcattaaggttctattttgtgtaagaaagtctacttataggataaatacaatataatataggctattagactgggtaggtgagacccaatttggagatagtcgtcatccttacacgaagagacagtcgacagtgacagatgtgcgtgatgtgtcgtggggaataatgaatattgaaatagtagggtgtttgcccaaaaatgtgatttttcttttttgttatgagcctttccaacctgtgacaggtgacaagtcgcctgatttcttcggatcatgtcgtaagtgtgccacgtggatccactttcgggacactaactgatcttggatgccattttgtattccattcccgaatggcccctaggggcatcctcctttggttcacatctttctacttgctaagtgttgattcaaaatttaaatgttcagatttgttgttgagcagtgatttttggaaaatcggaccaagtatatggtttaacctatccttgatggatgggttgagtagtcaattcgtatacgatccagtgaataggcttggttcttttgttggatctttgtaataacttatgcgctatttagaaacacttatatttatgttaaatattgcaa

SEQ ID NO: 238403 - DNA, 1697 bp, Cannabis indica
gaggactgagctttttccaaaggcaggggtaatctcaatttactttgtaactaggccaaggacagttgtgtgtttgggaaaggactcaacaactttgaccttcctcaaaaaaatatgacatgtgatatttgtaaatctgacacatggttgactatggttttaacacttttgtatcattgggctggggtgttaatgtgggttggggtgctaataagaaaaatattgtgggtcggggtgttaatgagaaaaatatggagggctgtgatttgagttgtgatttgcctatgggccgggttggaggagataaagagacactggtccaagacttaattttttaaaatcaactggcaatgtagtcaaatccatggatgttttgagccaggattataataaattggggtctttgggctgtggtcttaagcagtcatttgactgtgggatcccatcacatgctttgggccggagttgtaatgcccacaataaataatacatggtgggtcgtgggtgtatttttaatggagagtctttgcattatttcaaaaatgggcccaatacctgtaagaatatggctacggggataagtaaaactgatttgggtttggggaggtgaataaaacacatatggtccttgaccttaatttggacaatgtggctttgtgtagtgacctgaacaactccttaaatggtcaagatccttccaaacatcttgacaaaaataaagcattgtcaaaattctttcaggtacaagagagttacattcaagaactcgacgccattgggacctcgaccaataataaagtaaagctcccttggtggatattggtgcccaagtgtcttctgaatttaatgaacacactacgcctataaagaagagaagattggatttcaaaaattcctcactcgggaataacctaacctcatattaagaagagtaaagcgtgtggtaagggacttccctcatggagttggttggtaggtggagaggtgaatgctaatgtattcatgtattttctgactctttagaggaactattggccagtgataaacgttaaattgtgccaaggttgatacaacatgttcccaacaagttaacaaactggtctccctggggtagtcagctagacttatggcatggaaggaaaaagtccagttgatggacatttctatcccgtctaaggaggaagtggcaatcgaggatgaggaatctataatttgtgggccacatggtggtgtgaccctgtggaggaggatggtgtccctcatccacaagagctatgagaggtgttgcttggaactatagagggttggggcagacctctacatttttggaacttaaagccctgatttggttgtgctctcttgattttatcttcattacttagttgaaagtggacaccacctatttggtacgttctcttaaaacacttcacttttgttataatatttttgttcctactgtgggtagtgcggggggtattatgctagcttggaaagtgggctttaattttgaaagtatttatatctcaaaaaatcaaattttgggctttgtgtattctgaccttgagcactatccttggttattgtcttgtgtttacggacccccttacttccatgagaagaagaaattctggtcagacattatggaaatcagtatcaaggttggagggccttgattaattttaggggatgtgaatttt

SEQ ID NO: 238404 - DNA, 1410 bp, Cannabis indica
catcatcagagacaagctcgactcgtggtgcagtaagtgttgagagtaaatgcttaacttcttatgtaattatttatttaccgctttcatttttaggcagtatatgaacatttagaatgaatgtgatatgaaaggaatcattaatgttgaaattgataaatgtttattttaataaagaaacatagaatgtatgagttagggttaacccaataagtgtgtaagtgtggatttggtgcatgactcgtcgggttgttgattttagggctatttgagagaaatagaccctaatcattcaactagaccgtagggcgagcatgtggagcctggtaataacaaaaccaatccaccaacaccgtgtgtgcctccgtagaatctcggtgataatgtaggggttaataatgctaatccacttgccgattagcagcaaatgttcctcaaaatgcgaagtatcatacttcgtcaaggagatgagttgcattggtttaggaaaccggctcatgtagcagaacaagtgttaccaccaactcttgttctagtggtgggtaactcaggatttattttgccacattgagattcggtatttgagcgttttgtcaagctgcaacctctagcgtttttgggaggtactaatattattaaggcagagtagtggatgagaactataacttgcattctggataacatgggagtgacgggaactctcgtacaacatttaggctacaagatcatgcccacgtctggtgggatattatggggcagacccgagacattagcgccatgtcttgggaagagttcaagagcctgtttgaagagaaattttataacatcaccataagaactttgcatatggaagaattcgtgaaattgactcaaaggaagatgacagtggccaagtataccctggaattcgattgtctttccaagttcgctggtgacctaatgctaacggacttcactcggaaacaaaaacaagtaagggtgctgaatgccactataagttgggacttgaagattacttccgatcatgacacattatataagattgtggttgagttagccttgattgctaaagaggttgagaaacatgtaattaaagagaaagctgctaaggatgtcgtcacgacatcgaatcctagtgtggttggtaatgtcataaggggatcgacagtggcaaccgagattacaaacagaaggttgaagcttttgaaacatttggaagtaatagaaagttttagggaatcagaggtggttgtcaaggttgtgggtctacattcagatcatacctagagtgtcccaaatacaaaaagcaccatcagggtgagtgccaaaccaaaatatgtttccagtgtggttttctggaccatttattagatattgtctacaatccaagaatgaagaagaaagaagaat

SEQ ID NO: 238405 - DNA, 1029 bp, Cannabis indica
atttttttaaaaaaaattatgttaatatcatatctcataaataacttctttaattaatatacgtagtacccttatgaattttttatttttaatttatatgtaaataatttttatggttagccacctcatttatagttttttgtacaatatatatagattattgttttaaaaacattactacctttaattttctctaatttttaacattacattaattaattaactaatgggtaattaatattgatgaaaaacaggaactgttcctaacagttgtagacaatccatacagcgcagcagaatgggcactatcagaaatgttgaaccaaccagaaatgcttgaaaaagcaagaaccgaaatagatagtgttgttggcaataacaccacactcctccaagaatctcacattcctcaactcccttacatcattgcttgtgcaagagaagctcttcgcctccacccggttacagctttcaatgtcccacatgtctctacttctgattccacagttgctggctacttcattcctaaaggcagcaatgttcttctgagtcgattcgggctcggtcgcaaccctaccgtatgggatcaaccgttgcgcttcaatccagatcgccatcttgacgagaagcattgtgacttgggggagacagatttaaggtttattagcttcaccattgggaggagagggtgcattggattggagttgggtacaaacatgacggttatgcttttgggaagattattacaaggtttcacatggaagattcctcatgggatggagaagatagatttgagtactgaagaggggaactcaatgtttaaggctgtgccattgtgtgcacatgcagtccctcgtttgaatccttctctctatttgtcattagggtaatgaaacacaaacttcacacgtacttatatggcaagtcatttttaacaaatagataattgttaaagttacttgttgtataagtgtgtatcaaatttatgtggcaagtcataataattgttatcattattattacgttagt

SEQ ID NO: 238406 - DNA, 1246 bp, Cannabis indica
gtgacacgtgtagagatccacaacgattacaaaagatgcggcattctaattgacggcgtggatgaatcgtgttcgttactatttgactgtgaaaatccgcagacgtaatttgaaacaaggagaattgaccagtatgggccctacagcccactcactggccttcaccttaagcccaagtaatttttcattgttgtacggttttcagctgagtcatcgtcagcccacgttggcgccaacaaagcagatactcaccagtcacccccatttaatgcgcgtgtatttaatcgccgcaataaaaagggatgcccagcacacagggatagtgactggctagcaatagtggacctaccaaaattccacctgacaaggtgagatcagatgtgttctcaccttaaattgtttactttaaactgtaaaagttactattttggattttttttttggttaaataataaagaatttatatattttttttaaaacaatacaaatataatattaaatttcaatttctaatttatttttctttttttttttgtaataggaaagaaaatttataacataacaaatatggaaagtataattaatttgttatgatactttaaaattggataagtattaaattttattcgataaaaataaatttaaagaattatttagtattattttaaaaaaatatatatagtcaatttattatttaacaaaataaaaaattcacttaataatttttctaaaacagaaaatttaaaataatatttatctattttttatttcattaattcttgattcatataatttgtggtatttgaaatttataaataacttgtcaatattatattcaaaataacaattgaatgattatatcaaataatccaaacgtatataggataagattttatttggaaataaagttcaaactgatacttgtttatcataacactctcatatagcaaaatatttttaaatctttaattatagcactgtaaatttgtaatatctaaaataaaatagtatttgaatttttttgaaataatgatgactcgagaataattatgttattttttgtgttgttaatgggttaagattatttcatagagtagttgtgacaatgttttaaattttttaaaagttgtattaatttcggtggtaaaatattgtggtattttctacaagatatatgatcacttaattgaagcctaatataaaaattcattagggtgtttataatatatttagtgggtttaattaa

SEQ ID NO: 238407 - DNA, 1050 bp, Cannabis indica
aggtaaaagagttaattattgagggctttgccttgattacatacaatagggagattaagataattgactgcttcagctttatctgtgggattaataatagtttgattggaaattgaaattacattcattataggaattaggaatgattgttgagggtggcgaataacatttaactagtttctcatattgtagtctcaattttactttgttattatttttatttatgctattttattctaaacctcaaaaccctctttttctaactttttgtcactaatttctgaataattaaataaacatagttcttgtgggatcgactcttacttacaattatattaaaataattggagctgttggaattaaaatattagtaaattaatttgttgtggcttacgacagtacgcatcggatattttaaaattgaacataaaatgttgcaaaaacaacacacaaaaaacctttacattaacatgaaaaaaactattttattctatttaaatactgtgtggtttgtttagttgcttttaagtttttgtatttcttttcttgaaaattataaaaatgaaaaattgatcatactattgttgatgatacaatattctctttatttttttatcttttacttttgtaacaacacactgtattttttgtagagtaataaccttaatttttattttattttagaatgttaatatttttaaaattatacaatttctgtcaattttattagtagcatcaacactatgacaaccccatgataatcaacacaaaaagacatttcaataaacaaaatttaaaattaatattcccatttttaatttcttttccctaaataagagcaaattttatacctctttaaaatatcaaataccaaccatatcacaactttgactgaacatcaacaatattcaaaaacaactacacatcaacaagttttttttaatcgaaactacacatatcaacaataacttgtaaatatttgaactttttaataatgatcttggtaattacaactctaaaacaatactacatatacatgtacagttaact

SEQ ID NO: 238408 - DNA, 1258 bp, Cannabis indica
cgcaaattactctaaaaaaaaattaatattttacataattatccatatcttaaataactactacagatcatctaaaaaaaataactacttcagacaacaaaaaaaaaatctaaaaccaaaaaagatgacaaaaatttgagtttgaataaagaagagtgaataaagtttgttttcttaccagttgaataattaatggaagtagcgatcttgttccggtgctccatcaaccggtaatcaggtccgataggagaaaacccatttggtccgacggaaaaaaccagtcgagacgaaggttgatccatatccaattgaaaactcatgtaaaaccgcgacgattccaccaccaccgaagaagaaccctccaccaaactcacgttcccttgatctttcaccaccagagccggcgaagttccacccaaataataccgtttcatcatcgctgtaccgtccgattcaacccatccaacgatcgcgctcgaacccaccattcttccggtggtcgaaaaccccatagccacgaacgatttcggattcggtgtagagagaacgaagctccatatgttcccacttgctttgctctgtccgtactgattaagcatacaaaaattaagttcggggacatgatttggtacatgtgaaaatttcgggaaaagaaattgtaaacttactctgaggacgaaatcttcattactccaaatggggagacagttaagggaagttgcatcaaagggtaaacgacttttgaggttgagtttggagttgcaagaatcttgggaaaaaaccagaactgaaaattgaaaggtgagtaggatgaagatgaagatgaagaaaatggtatttgggtttttcatttttgattattgaaagttttggaatttttacgtaagagaatattagagatgatattttatgatatgaagaagtagaggaagaagagtaggtgattatggtgtatagccatctaaatttacctggaattagttgacaatatttacttaattattttatttatttatttaaatagattaatataattgaatgattcttttctacatattaattaagtaatgatatgaatatattttgggattgaggataagaaataaaaataatgttgcagtatgaggaaatattaggtgagaagatatagctttttcataacgcattcatgttatgacgttttttttagaatagttaaatttagtgacattgattatcttttattgtgtggattgtctttagtagtattttttttttt

SEQ ID NO: 238409 - DNA, 1117 bp, Cannabis indica
caatggaagaatgctcaaaactcgagtacgtaatggtgcagagcattggatttcaccacagctgaatagtaatgtcaatgtagatgcagctttgtttggggacaaccacagttttggcgtggggatggtagctcatgatgcaaatggtattttgattgaagggtacactgcactttttcaggaatagtggaacccgagctagctgaagttataggggtttgtgaggcccttagctagatcaaggattttcattggcaatttgtaactcttgaaactaactttgtgttgtgcaagctttgaggagcaactttactatgatttctctatttggtcatgtgactaaagattgtaaaagattgcttgttttcttgagaaatgtctcttatttttttttttttttttgtaaaatggtcagctaatatttcgttcataactttgctagagtttctattttatctcttgattgtcgtttcagtttgaggtgtgttccaacagatttgctaccatgtttggtagcagaagttaatggttaataaaattgaatttttcattcaaaaaacaatttttttaaataaaagaaataattttattaaatcaaattagatgacaaagcatctttaacatctgaaggaatatcattccttcaaaaaacacaatcagaaataagatgagatactctatctaaattatgagcaaccctattagctgtagagctgcacatcggcgggtactactacaaaaaacttctttaatatctctttttcatatccaacaaaattattagtggacataaaaaggttttagggagttttctagtccactagaaaaaaaaattattttgtccaacaatattgactaaaaaacttgtagtggatgtgatatatgtatttttattttttttaacccggtctattttcacgtccaactctgctggactagaaaaatattttagagagttttgtagtccaacatagctagatgtaattttctatttttagggaggaaaagctgaaaaacgagtgagctgcagttactcattgaatattttaaaatatattattattattagatataaaaagtactcatcataacacatttttctaactttttttttttt

SEQ ID NO: 238410 - DNA, 1752 bp, Cannabis indica
aaagaggccccacgcctccatcacctcagacaaaatgagggtccttacgcctccgtcacctcgaatcaaaatgggatcatctcggcccaaacaggggcctcacaatctcatcacctcggccgaatatgagcctcaacaagcttgtcatcttggcccaaaatgaggagtatcccgtgttcttcttgcgacctactgacaacatggccttagcatgtgtttctcgtaatggaaatatgtcaacacgtgaagttataagatattttaatcttttatcattttttagatgtttgttttgaaatgtaatttttgtattttaaacctaactcgaccacagttacggaaaggtgttcctgaggttaaaagattttaaatcctagatgaaaacctatataaggggagtgaagtcacttgtaaagggacccccaattttaattttcacgaaatcattctcttgagctttcactctctcattttaataaaagctcacttaatgattaaactcttggagaacataactctggagaactctcatcaagcatattgtgatcaataacactctaagtggactagcctattatcgccgaaaaggggtgaaccactataaaatccttgtgttcatctttgttaaattttctttcacaaatcgatttattttgattaactagtgcttgtcttcattttgctcgtttacaattttttttagacctgttgacgaaaaattacgtcaacaagtacaattacgtgtcgggccctatataatttaatgtattaatttttatagaatctcactaaccaatggtaaggcgctacctttaagtggtgctaggcaccattagtgcattttagcaattacactacctagtaacttccaaatgcccaatgtaattactttgactaaataaatattattattttatatataagtactatttatttttccaaaaaatacaattggaatttatatgtcctcaaatttaaatacacttcgtattttaaagtacaaatattttccaaacaaaccttgaaagttgttattcctataataataaacttttatgctatatatacaataatcataaaattagacagtacaatttattttcccttttagaccatatgagagtcaccctataaatatttttatttatatataacatatatatttttttttatggacattcatgtaataaataatatatattaagtatatttatatataatttgtttgattaattagcaatagagattgtctccaggagcaacaccaagctggttgcagaagtcattataataattggcgcgtgctcgaacaaggtcaggcagtttgccatcacattcacgactattgattttcctagtggtggcaccaaatccttggtccatcatagaatgaacgtactccatccaaaaccacaatgttgatcggaacgaaacgacgacgtcctgcgccaccatttcgggtgcgttcaaccatcaattttgtaggcattgccgaaacctatatagttatagttccatgtcagctggagtggtccacgcccgtagtaactcttgcttgggttgcatggacccatactcagatcgcagtagtgtgaattctccagacttgaacctcctgtctcctctatatgacatagagctgcacaaaccaaattaattaattgactgattgaagttaattaagaaacagggttcagtaaattatgtatgtatatagtatcttacatctagtttcgtgggagacatgggcga

SEQ ID NO: 238411 - DNA, 860 bp, Cannabis indica
taagaatggagaaggagaccgaatggatgcaattcataattttagtagtccacttcttatcataacccaagcaaatcatcatagtttccaaaaagtcccactcaactctatcgtacgcctttgacatatcaagcttgacggccattttctttccatttccaaatcgtccttttcgcatacaatggaggctttcaaatccaataatggcattatcttgaataatccggcctccaatgaatgcactttggttggctgaaatgacagagctcatgctttgcttcatcctattccctaaacacttcgagagaactttgtatatgacattacatagactaataggacagaattcagacatcacggtgggttgttgaaccttcagaatgaggcatatcagggtttcattgagcattctacagtcggcatcattgtttaacacgtccaggcaggccgaggtgacttcttcgcccactacatcccagtttttttggaaaaaaagtcccggaagaccatctttacccggtgctttaagaggatttacttggaatatagctgactttacttcatcactagtaaaaggctccattaaaaaatcattttcagcattacttaggcgatgaggaacacatctttggagagtattcaaaagatccaaacctctattcgctttggtaaatagatgctgaaaatatttaatggcaatggattcaatctctttctcattagttcgccattggtgagtatcatcaaacagccccataatagtgtttttctttcgtctatgagaagccttgaaatgaaaatactttgtgtttcggtctccatgttttagccaaagagcacgactccgttgcttccaatag

SEQ ID NO: 238412 - DNA, 753 bp, Cannabis indica
ttttagagaattcatatttagaatgttaatcaacatacttgttagtaaatttagatcctggtaaaatattctcaacacaaagtcctttccaggtgaatgagaatcgggaatcaatagactcaacatgaaattagtctctttcatacacaaccacggcggcaaattatacgtcgtcaacacaactggccacatactgtaagattgactcatgttaccgaaaggattgaatccatcagcagccaaacctaaacgcacattccttggttccattgcaaacgttggattatttcgatcaaaatccttccaagcctccccatctgcaggatggcgcaacacaccttcttctttgatacgttcctcatgatgccatctcatgtgttgagcaatatgcctcgatgcatattttcgcattaaccgaggggttaaaggaaaataacgcatcactttacgcgacactttcttacccttggtgttatttccacccatcgatcctccccacaaataggacattttgattttccagcatgttctttccaaaataatgtgcaattattcggacaaacttggatattttcgtaccccagccctaatttacgcatcaactttcttgccgcataatgcgttttgggaagtttgttcggggctggaaacgctggagtccatggttcttgtacgaatcagatgcgtcctcagctgctggggtttcattctctaggttggtcggaggttggtcagcatcttccttcgcttttt

SEQ ID NO: 238413 - DNA, 787 bp, Cannabis indica
aataatttaattaagtaaacaatattttgtattaattattttgccaaaatcaccacaatttacaaatgagcaattttcttaccaatactaatcttttttcatacaaagaatccaaatgtacagtatgaacccaaccaatataacacttgatatcaacacttcaaacccagaaaataagaaataaaattaaagttacaactcaaacccaattacaaaatacatttctaaaaaatattgctcattttcgtccacctgcatacacacacacagagaaacatacaacagaaaatgactactaatttaaattaacaaaactcttcacattcaaatcaatataaaattaaataaaatatcaaaatgacaacaatttcttttacttgttcatacacaatcatgaaatcggcacctgagaaagaaaaaccattagatctaagactaaaagttggagtgggagatgagcaagagagagagaggcagatcaggagagagaaatattggagaaatgaaaggtttcacatggactgctgggcgctcgaggaggatcgacgacgacgacaatagtctggcagagctgcaatcggcgacgggtcggtggagctgcaattgacgacgcattggtggagctgcaattgacgatgaggggtggagttggagcccagaacttagacaatagggcgaagagagagcggtggggttcacggggtttctttgggcatggacgacaaaaaaatttttggtgaagtctgccatcggggtgggtagatcgcagagagagagagagagagag

SEQ ID NO: 238414 - DNA, 1601 bp, Cannabis indica
ctctctctctctctctctctctctctcacattagaaacctcctctaattattcattgatcatcatcaccatccaccaaagcttctcttctcaatctcttcgtctccatcttgcgaccgaagaatgatggtaggtggttttgaacgatcgactgtggaagaagataacggttgaaggtaatgtttctcttctcaatctctttgtctccatctcttctcttctcaatccaaatggaggataacttagtaagaaacttgttatggggtggggttaatatgtaatatttgggaaacagttgagttatattctaggtttgataatgggtttggttatttggagctgttaatgtctccatgctctataaatgtgaatttgtaagggtattgactcagtgttatactgttgtgtgtctttgtattgtaaaggaagaagaagaacaagaaattaaggagttagggcattccataaatatgggcagatatcaaaatttatgtttaaagtgaaaaaagagaaattaaaagtaaagaaaaagcagctttcatcatttgtttcatgtttttgactctatagctttaaagctatgagattccttgttatgaaaaatctttcaatccaaacaaaaattggtgcttaaaatttcaacctaaattttttatgttttctaacttaggtccatacctcttttgtgtagattttttcttgtgtgatagggcgtaaagataaagctctatggtgtggtcaagtaagttcatattaggtgttggttgtccttatttgtgattgtgtggtttgaattcttgattgggcaccaaatggttatcctcataatgggtttccctgcaatccattaaagtgtcattacaactaaaaaaattatagcctgtatttaaaggtacttaatttgaatattccaattacatcaaaatatgatataaataagtaccaagtatagtaaccccaagaatgttgacatttgacttattatttttatgtgtactttgagagttatgatgtgtgtaaagataataatttcaagggttttttactaaagaattgtgcttgtgatgcaagttggcaattagtctagatagcttactgatatgtttggcatggatgctgatgatgtgccagaagaagaagagcattgcggtgagggtgatgacaaacagcgtggaatggtgaatttaaatcttttcttcttctcaatgcgttgagtgatcttttaatggtttcaaaagacatgcttatggaccgatcaatgagaaaagagattgatatatagttaaacttatcttcataccatttgcattgagattacacagcactcattattgttatgcttgtttggtaatacaatcctcaataatagacctagttttggtccgacccttggtagctttgggagtttggacaagtcaagttcttgagcttggccattaaacttagctctagcccagaacgatgaggttattgtgtctctagctgatagttcctgggaggttcttgacatatctggttcagatgtttctaattttgggttggtaaaagtggttcaaattattccctgactttatatgtgtttatttcatcgttttaaaaagt

SEQ ID NO: 238415 - DNA, 721 bp, Cannabis indica
aatcggggtccccatcggacccattggacccaaaagtttttctagcacatgcatcagaccctaattggggtcccgtcagacccaaaaataggatttttgcaacacatgcatcggactccatcggggtccccatcggggtccccatcggaccccatcaggccatcgtcttccccaaactgcaatttccccaaatcgcaaatttgaacataaatcgaaccctaaatctaacaaaactcacggtagacacataaacacatacattatacattatacattataaccctaaaatcaatacctatcaatattccgaatcatatatcacacacacaaaaaaaaacaatgacaaaaaaaggggtgaaccttaacttggacatttcggttttgatggggcggcagtgtaggcggtaggtggtgagaagtgctcggttttgatttgggagggggccggtgttgtgggcggtggtgaggggccgacgttgtgggcggtggtgaggggccgacgttgtgggcggtggtgaggggccgacgttgtgggtggtggtgaagggggttggggttcggttgagagagagagatagaggaagagagagagttggggttgagttatgagaggagtatttttggcttttagataaagtggtcgtaggttttcaattttgatatatatattagtttagggataaatattaaggtattttatgcatattttttcaaatttccc

SEQ ID NO: 238416 - DNA, 752 bp, Cannabis indica
ataaacaaataaatttctcatatatcatctcatatgtgccatttacggaagaagacaagaaaaattcatacgattgaatttttttgaaaaacaaaaattccaaaccagcctctttttttgcgatcaagaaaaaaaaattcctatgattgatggggtttcgatgatgataggacgatgacaggtagccttctcagaccaggcaagttccgacggtactaagtgagggtttaagcctttcgcagatcgcatcaagcgtcttctcgtccatttgatcgaaaagcggaacctgaagggtagaagattgaaggttcagatcaatttaggctatttaagatgaacttgacaggaatcaagagagacttacttgtcgaactagatcgatagaggtggcacttgatatctcgcctgagatcgacaggaaggtatttgagaatggcttcttcgtcaactcccctggttgcgatccaccggtactgattgtatctccgaacgttctactttagctggtgtggtagctgcctgtgatgcatccattgttctgtatcgattctcctaatcctccactcttccagtttcacggttgttgattgaaggtatgtctatgaataaaagaaagtaaaattgattgaattgcatatcaagtttagatttcagataattttgagtttgatgagaatgaggagaataattataatagaaaaatcaaattttttaatgtaatatatatatatatatccaacctgatatttata

SEQ ID NO: 238417 - DNA, 1148 bp, Cannabis indica
atgacattcttatctactatttatctaagcctaaagttacatgcctataaagtcattttgatctacatgactttggtttacattagtggagataaattagttatacaagcctatggttattgtgaatgttttgtggtaagggaagtctttatgcacatagactacatatatatagagttagtagaattgacattacacattcttaataaaaaaaatacaatattggaagttaagtttaaatgggttgaaattctagtcttttgtttgaagtgcatcttgaacaacggaaagagagtttgcattttgagataaattacctttggtctaagtttcttaatttaacatttaatgattggcttgtttgtttttatttctttttagtttttagttttagttttagttttatttattttttttcattgcttgaggacgagcaatagtttaagtttggagatgtgacgagtgcacatttgtacactcattcttagtcaattattagatggattagtatttatttttgtatggatttgatgtgtttttttcctagtgtgtaggtttgtactgaaaagacattttgtgatggtctgagatcttttagcccatttttgacaatgatttcatcttttctggaagaacttatgaaatccaaaatgatagagctcgttcccagctttccaaaacatgttaaatcatctcatttggagtccggacgcaaaaattatgcatgatttactaagcaatatcgaagcagaaaaaattggtgctaggcactatagcgcagggggtaggtgctatagcgcctgattggaaaaaagattttgtatgaaggaaaaaaaatataatttacagcacgtggttattttgggatttttttttctcttaggcgctacagcgcagggtataggcgctatagcgcaacacttatcatttttttaaaaaaattctaattctaagaggattgatctatctttggcttatataaagaaacatgtaaattgtattgagggacgactagagagagaaacaagcaactttgagattacaaaacacattgaagagcaagagagaagagacttcaagcaatcatcatcaactatcatcattagagttctttttttcttcttcttctttattctttgtttagttat

SEQ ID NO: 238418 - DNA, 859 bp, Cannabis indica
agagggtaaaaataaaagaggacaatataaaaagggtatatagtgcaatttcttctaaattatacaatataagggaaaattataagagtttattttttatggcataaataaataatattataaggttatctaaataataaataatacttagcctaattctgtgttttggtgaagttggtcaccagttcttagagatatatgttttacgcaaatgagagcctcagaactacccagttttcgagtacagtcactttgccagaaaagtgaaaatatgaagttgtgaatttgactcttctaacttcatagctttcaattattatgaaaaacttgacgaaccatcgatacagaatcaaaatcgaacaaagctaaacccagcgcacgaggccatatgtcaacctgggtgttgggtgttctttttggagcttttggtatgttattttgacacttaaaaggttcttgaacttcacgatgaggtctcctaccctatttttgaccattttggagacaatactcggaggagaatttacatttgagtgatcaaaactagggcaccaggttgattattaacctaggtgctgggcttagtttttaggcctatgcaattgtggttttctcccgagtttacatgtatcttcatcattaatgatgatgggaaaaattcccataacactttagggaaacactgattgggaacaactcaagttgccaatatgtcaacctaggcgctgggtccagtttcaggcatcttggaagttctgtttgttccctagaaatatttgaatattaatctttgattaaaaaggagaatatgtctggaagaatttttgaaaaaactcctcgaaattggcccaggttaaca

SEQ ID NO: 238419 - DNA, 1241 bp, Cannabis indica
aatcatttatgtaattatacttaattagctaaatccatttcgttggacccatttgagttttatttttgacaaaaatggcaactcccaacacataagagcatcttcaatgggtattttttaaagatgctaaaaatcttcatatcattcaaaaaatataatattttattttatctttctttcatatcatttttgacactattaattttaaaaacatatagcactcttcaataatgctataattatgatttcacatattattatttcacatattatttattttaattataaatattgtcacactacttatttatatttaattttttattatttttaaaagagatagcatcaatgtcatgtagtgatatcaacacaattttttatggagcattgctattaggcaccactaacactttctcgacatgtcacgttgtgattggctagcgacactcgctaaaaactattatattaaactatatgggagccaatacttagttagaccaatagtaatattgacacataggagggtgctaggcaccaccggtaccctttaacatttctcttttctatgataggctctatctatttattggtataatatttttgtattttgccaaataagcaatctacataagtaagcatcctttaaaatttaagataaatgctaaagagtaccatcctatgtgttaatatcgttattagtcgaactaagtatcgggactcatataatttaatatagtagtttttaaggagtattgttagccaatcgcaacgcgatatgtcgagaaggtgctagacaccactaatttctaacagcaatgcacaaaatttaactattcaatatgctttaatatttgcacgttgacattcttgattggcttgtcgttttatacattttttgtttctctttgttgctcaatgcttctattctatgcatttatttactttttttatgaaaaacacacacaaagaaagagccgttgttttgcacttttccttttcactattttttttaagacaacctcaaagtctccaacctagcagcaaatcttggtaggtaacataataatcttggtatgcaagtttataatgtatattacaattagttataagtaacataatagtaaatatttttttttacatttggtattgtagttggaatggaagaacaaaaatataatcacatatttattgctggtaagaaatttaatagagatgaatttaataagaaaaatgtcaaaatg

SEQ ID NO: 238420 - DNA, 2322 bp, Cannabis indica
taactcttggatcttgttggattgtctttttgatgctgcctctttttctccttggcttattttaggatattttaatgattatttaggctataatgatcgcaacagtaataatttgtccctacccacgctatccatatttttttagcattttatctttaaatacaacatgtttcctctgaattttgtaatcgcttcacttggaagcatggtagtcttcttgaacatctggatttaggcattattaaccaggcctgacacgatatttttcccactgctaacaatttccatcttcctttctatggctctgatcataaagcattcaagttggtttacaatcctactccacatattaataaaaataataaaatatttttctttgaaaattattggataatagaaccgtggttttttatctcattaaagaatgttggtcatctaatagggttagtagcagtgttatccccactcttgtttcttttcttagtaagcaggataattgtattcaggctatgaagtcttggtctaaggataaaaatgaattaaaaaataaaatcaataatatgcaatctgccattgataggatttactctcactccttcatctcttgacatgacattagaagtgttgataattaccaaacctctcttaatgctcccttgcttaaggaggaagttttttggaggcaaagatctagggttaactagcttaaagctagtgataagaacactaatattttcataataaagcctctactagaagaagaaataatatcattaagagtcttactcttgatgataactctactatcagtatccgtactgacgttactaatagttttgttcagttctactctaattttttttacctctaatggcacggatttaggccctatcaacatggctcttaggggtattactaagcgcatagataattattagttcaatttctggccaaccctttcactttctctgaggtcaagactgctctttttcagctttcaggggataaggtccctggtcctgatggcattaaccctcttttttatcagaaaaactagcctattatgggtaaagatctctgtcatgttattcttgatgtcttaaataatggggccaaccttgctctcataaatgagacttttgttatccttatcccaaagaaaaacaatgatatcagggttcaggattttaggcccaccagtctttgctctaccatttacaaagttgttgctatgtccatagcttataaattgaaggtagtcgtctcatctcatttctcacaatcaaggagcctctcttagcaatagaatcatttttgataatattattattgccaatgagattattgaggccattacctataggaaaagtggaaaagttggctgggcagctcttaaactcgacatggagaaaacttttaataaagttgagtgaggtttatttaatcacattctttctcaccttggtttccctgccaatttcatttcccttatctccagttgcatttccactgtttctcccaaactttgcattaataatagtctatcctctcatatctttccttctcgaggaatcgggaaagacgaccctctttcaccttacctgttctttcgagttgctgaaggtctttctaccctaatcccttccaaaactcaagatcatctatttaagggcatatttatatgtcgatcgactccttcaattccccatcttttttttgctgatgatagcctgcttttcacttttgttaacacccaaaattgtgaagctatcaatgatattctcaacatctacgataaagccacatgtcaatctgtcaacttggccaagtcttctgttcttttctctcctaacactatgccccgggacaaaattctttcttccattatctccacatgtaagataaaccttttgttgacaaatacttgggtgtccctcagtgttttcatgctctaagaaatcttcctttcttttccttcttcaaaaggctatagtaagctttctgtttggaatcaaaagctcttttcaaaagcttgtaaagaagttttgctcaaggtagttatccaagcattttcttcgtacgctatgtccagctatagaattcccctatctatctacaaacactttgggaaactgatggaaaacttttgatggggatctttgggtaataatgaacgcaaagttcattggaaaaaatggtccactatttgtaaatctaaattttttgggagcttaggctttcgtgacattgttcatcacaaccaagctagtttagcaaaacaagcttgacgtatatacaataatctagattccctagtggttt

SEQ ID NO: 238421 - DNA, 673 bp, Cannabis indica
tcattgttattcttatactttgatgtttcaatataattttcttaatactcctttttggtattcaaaatccacaataaaattatatcaataataatcatttttaataattttttagttatactcatataaatataatatttttgacaaattgaatatatttacttcaggaaatacttgccaaaatctatagcgatattagattacttttcattgtcctcatagaatacaagaacatatatataaatatgtattcatctcttttattttttgtcagtcagctatatgatgaatattatatttgcataatcttcaagatatatgcaagattttattgaggacgcataatcttcaggatatatgcaatattttatcgaggatacataatcttctggatatatgcataatttatatagattttctctactatatcatagataacaatagagcatataatatatataaattcaataatacacatataaaaacatataaaaatatatacatacatatatcacaatataatatcatatagtgtatatgaattcaataataaacatataaaaatatatacatttatatataatatatagatatatagaataaaaagtaaaaagaaaaaaataggttacttgaaaattgtttctaagtcagtataagtacatatataatatat

SEQ ID NO: 238422 - DNA, 1085 bp, Cannabis indica
aaaaatattactaaaatatttatatatactatactaatcaaattataaaccacagttaaaatatatactatgacaacaaaattatatactaccatagtgtataaaaaaaatagaaactaattaaatattacataataatatattatataattaaaatatataaaaataataattaaatatatgtagcatatcaatatggcagagctgcttgccattcgtctaggcctgactcttgcacatcaatatagtttcagtatctctattattaatagtgattctacaatggcaattggtttgattaataagactcacataaattttagttttcagtctattttattagatatctattcgttattaattgtttttagtggtagttcttacaacgccatttctcgttcggggaatagtattgcccatacactagcaacctctgttactagtttaggagagtgtgtttgaacggatgtttgtccacagtttttgagttcttctgtaacatcggatttatcttaaggaattatgttctttaaaaaaaaattatatacctacattgaaatgtatatattatgctaataaattaatataccccaattatacataccaaaataaaaaataaatatattctaagaataataatgtatcatacaacaaaaaacaaatataatgtacaacaaaatatatataccaacaactcataacaacccataaaatctaaaaaatcgatataactttaaaattgaaaatattttaataaaactaatatagatataccatgatacttaagtaatatgcttctaattctaaaaaaagttaagtctttatgtggcaaaaataatgtaaataataaataggattaaaagtcattttccataaattttaaaataaagatatttacctatataatgatatgatttagggtcctttgttacaaattctcgtgaaaaaaaccccatagaaaattgagtaagtaggctgagataaaaaatagaaggagtaaagaaaagaaaaaaggaaattatagtaaattgtcccaaatcataggactatgttagtaaatcttttcattttcaaaacttgtagca

SEQ ID NO: 238423 - DNA, 1470 bp, Cannabis indica
taggtcaggtaaaccctagatcctgcatcccctgaagttgtatttttaactccttaaattcagttggagccatccgataaggtgcttttgaaacagactctgctccaggtgtcaacttaataatgaaatcaatttctccctttagtgacaatcctagtaactcctcaaaaaatgcatcaaagaactcccttacaactctgacatcctcaggcccgaatgtttcgattttgctggagtcaatcagagctgctagaaaccctacacatccattgtgcaataaatatctagctttcagtgccaagatgactggaatctaagaaccctgaatgaattctacaaacgcaaatggttcttcaacctctagctgaaaagttaccatcttttacttgcaatcaatgctggccaaatacttggatagaaaatccatcctaagtgtaatatcaaactcggttggatccaactccactaaatcaatgcttaactgcctattctcaattttaattggcatagacctaaccatccttttagagataactaattatctgctaggcaatagggttccaaaccctatcttaataaatcacagggcctacccaatttatcaattactcttaacaccacatatgagtgtgtagctccaaagtcaaacagtacagtataataggagttgttgacaaaaagttcacttgttactacagattggctagctgcggtattcacttgtgtaatggtaaatacccgatctaaagtgggttttacctcttatttttgttcacccttcttcaattgggggaaatatttcttaaagtaccccaccattccacactataaacatttcattccctgggatgatgcttcttacaatgaggacactcaggataggaataagtatggcatccccctctgccttggtattcacggaagctcttactctgactcaagccacctggtgccaaattttttttttatttctgatcactgattgaatcaccaccctctctaccataagcaaaagtaggaagagtggtagtcctacaaacattaggagtccctcgcgaatcctacaaaaactcaactacacctttggctcgaagagcattctcaaccatctcagcatatgtagttgtgtcatttgtagtaatgaccaagtcgtgtatgatcttggcattcaaacccgccaaatatttctctttcttaataaaatttgagagtactataactgaagccagcttagcaagtcaatcaaacttagttgtatactctatcactggcatagtctctccttgaaccatctcaatgaactcttttcttttagtactacaaactacctcattatagtacttagcattaaactgttgggttttgtgccctaaataaaacccattacgatctaatagttatcaaattcagagtttttaagtgattatgttaacatgtattttacatgcttatggtttaatatacatattt

SEQ ID NO: 238424 - DNA, 754 bp, Cannabis indica
aagtggaaaagatggtcattaatgttgatgtaccttgaaatcgcacaaccgcaaaaatcagtggacacgcgccttttcaaaagggatcatgatgaaaatatcctttgtaatcattaaaaagctctttttattagaaaagaactttttatggggcaattgttatacccaaaattcggcgagcacatcagaggaagacacgtgtcgatctgggaagaataaagaactcaaacacgtaatcataattacacttgaaattgaataactcgttaaaagtacaattagcagaatatgtttacaactcggttgactgaacagtcttgtgccagataaaattgttctaattgttgccctgtgcctcgatgagaaaccatgtaacttcaagtatacaagacgagacattaacctcgttacatggaggagatataatgacaacagagatacttagcgtgtaatgtacgatatacaaactaagtataaacatatgggtgaataaagtgagagatagcgaggcgtccacctcgccataagagggcatgcacgtgaaaaagatcatctcgtcaccagaaactgcagttgtcagaattaaagtaaaagcattgtcaacctcgggaagacatatgacgagctcccgctcgtcatcaaggttaactcaacttccttcccagcaaggcattacagtatgataaggcttaccatatatctttaatactcattcattctggcccagtaaaagcatcatattcactgggatgtg

SEQ ID NO: 238425 - DNA, 1210 bp, Cannabis indica
ttgaaggaagagcttttggatcggccaaaacactgaggcaatccaaggtatttgtcaaggtggtttgtcatggggatttgcatatagtcttggataagagtttggtatgtgaggcttgtatttggggagaaaaacagtgaggatttctgaaaattgacttgttggccagagatgttttggtattggtcaagggcttcttttatagcattacaagcttggatgtttgacctgcaaaacagaatgctatcatccgcaaacaggagatgggaaatcttaggggctgagcgagttatctttataccaaaagcttcatcctgtctttccactcgtttaaggatagttgagagaccctcgacacaaatgagaaagagatatggggagagtggatccccttgcctgattcctcgagatggggtgacaagcccatgagcttggccattgatgttgaatttgaaagtggcagtggtaatgcacgccatgaccagctttatgaacctgctaggaaactgaaatttttccatcattttatggagaaatttccattccactcgatcaaatgccttggccatgtctagcttgaccgccatccaactttctcttccttgctttttattgttaatggagtgcaggatttcctgagccataagaatgttgtcagagatgagatggcctttgaggaaggcactttgatttggggaaatcaaagggctgagaataaccttaagcctattagccaagattttcgaaatgattttataaacagtagtacaagtcacagtcattagtattttacctaaggccaagtatattaatttataaaagctttacttactgtaggattcaaagttccaactagtaataatcacacaaaagaggcattatgaaaggatctaatcatgcttttggtccatgccaaagaccaacacttttaacattttcatttcaattatttggtcaaccaagggggcttacaacaattgtacaatattgacaacacatgatatcttatctatattatatttatacataatatacttgtccattactcctggttaacttaaaagtgacatctccaaaaggcacaattttgtctcaatctaattttcaacctctatttccaagcaatttcttcgaaccattatttggatgcctaagcatataaattcaaaggaacccttccttcatctttgccactacttattgcagttta

SEQ ID NO: 238426 - DNA, 1601 bp, Cannabis indica
tgaggatattggttctggtttggaagctgaaaaaggggttgttagtggtgaaccagttgggcctacaactgaggagattggttctgctttggaagctgaaaaaggggttgttagtggtgaaccagttgggcctacaactgaggagattggttctgctttggaagctgaaaaaggggctgttagtggtgaaccagttgggcctacaactgaggagattggttctgctttggaagctgaaataggggctgttagtggtgaactagttgggcctacaactgaggagattggtacgggtttggaagaatttttaccttgttttgaagctgaaataggggatgttacaactgaagcagttaggcttggaaataaggagattaatggtgaacatgaagctgaaaaaattgctcgggatgatgactttgttgctgctgcaatggaaggatttgacacttttgggatggggaatggtgaagagagtgattatgatgaagaattgaatgaaaacaataatgttgctgctgagaatgcaggaacttttgaggttaacaatgggccagcaaatgaagacagtgaagatgatggtgatccagattacataatggatgaggaggaggaggaggagactaatgatgaaaacagacaaagagaagggaaaaggcatgtagactttgatgtggatgaggtggttgttgaatctgatggtgaaaaaattgtttttgaatcaagttcatctgacattgaatcagaaaatgaggagactaatgagtttcatacaaggaaaaggaagtccaaaagagctcgaatgccccatttacctgagttcagacctgatgttgacatggtgaaagtgaagtttcagaaaggattggtatttcaatcagggtcacaattcaaagatgctgtgagagagtatgctattcaaaatgggaaggacatcttcttcaagaagaatgagccaactcgggttagggctaaatgtggtggtgttaattgtccatgggagctgtatgcatctaaaatagatgatacgccaacatttgtagtgaaaaccttcaatgaaacacaccaatgcccaagaatcaacacaaacagatttgccacaggaaaatggcttggtaagaagtacttagatgagttcaaaatgcatgacaagtggggcatttcttcattccaactaaaagtgggtaaagatcacacattgaaaatatcaagagataaagcataccgagctaggacgtttgcaagtaagactatagaagggagttatgaagaacaatataatgctctctgggattatgccgaggagatcaagtggactaacaagggttcaacagttgaaatcctaactgacacaacagaagatggcaagcctcggttcaagaggatgtacatatgttatggtggattgaaacaggggttcaatgaaggatgcaggccagtagttgggttggatggttgccatataaaaggggtacatccaggacaattatacagcagttgggattgatggaaataaccaaatgtaccctgttgcttttgctgtagtagagatagaaaacaaggacacttggtcatggtttgtcaaccttttgagggatgat

SEQ ID NO: 238427 - DNA, 762 bp, Cannabis indica
aattgataactaatcacattgtaatgagttttatttagggcacaaaacccaacaattgcattcccgtgcaatatttttttcttcgagacatcccactccacttttagttgggaacttaatgcacaggtgaaaagctgatgtgacagcttttaagtcatatatggcttgtcggcctaacatgacattgaaacctgatgggacattaattatcaggaattgtttcatcacagttatgttcctcggagcttgtacaacagtaagcggtaggtggatttgtccaaggggagtaacattctggccggagaaattatatctgagctgagtgcaagggattaagtctttaagttggagtcccatcttctaataagtttttttaaaaaagaatattcaaggaagctccattatctataaccaaggtgtctttttttgggaagatgacatggctggcatctacttctataaatgttattgctggagcccccacacgtggtacttcaggtttcttttcttcccaaataatgattgcttcattttgctcataatgtaaggctcaaggatatttttctctagttttgcccaagtctacaacaagatgtgtgttgggaatattttaccaggatctagatttactaacaagtatgttgagttaacatcctaaatatgaattctctaaaacaatgaaataaaaacataaggggttaagaaaaccttacattgatagcagcgaaatataatgatccttccgttcaagagatctagccc

SEQ ID NO: 238428 - DNA, 626 bp, Cannabis indica
atattgaacccattgacatgaaagctatgcgtgcttgaagaggtactacccagaagttcaatacactcacaggtatccagaacctaaaaccatataaaatgttgaaacaaatcaaccataaagctaacaaatataccaatatggcagccattctccaaactcatacaaacatgtacaatctaaaacttttcacgagcaaaataataaaggcaaaggagataaattaagacaatagccattcgacccaattgattatatattatttttatgcagaaaattaaaatcattacccttgaaataggcaggcctggactcaatctggttccctttgctcaaaacataaatgaaaagcaaaattgccacaacacagaggggccaccagagaacatttgagaatagtcgtcgcctcatcggcggtcgtattcgaactgagagggctcattatgcgatagaattaggggagagggtggtttctctatgagatgcgtgagggtttgggagaggtagagtgagagagtgcttaggtaggaaactgaaaagatagaggaaaaagtttgagatttgccgctaaaaatgaaaatttctctaaaaaagaaaatgaattattaatatttaactttttgaaa

SEQ ID NO: 238429 - DNA, 508 bp, Cannabis indica
caaattggagcaacgctcggtgaacaatctttcatacaaaatctttctaaaactctattgatataggcttcataagataaacctaagatacctcggtatctatctcaatgaatcttaataccaatgacataggatgcatcacccatgtctttcatctcaaatttctttgaaagaaattatttcacttaatgtagcaaccccttatcattagatgcaagaagaatattgtccacatataaaataaaaaaataaatcttacttccactaaccttcagatatatacattaatacatgacctccttttcaaatccaaaggaatagatgtcatcatgaaattttaattactattagcatgatgcttgttttaatccatagataaacttctcaagcttgtataacaaatgctcaccaccactagaggaaaatccttatgttaacccggaaacttttcctagtgacgtggacatcaatttttaacacacgacaaggaggatgacgtcactgagtt

SEQ ID NO: 238430 - DNA, 807 bp, Cannabis indica
aaactaatttatagaaactcatcatataatttcaaatcattgttatcaccatatctcatttgttgttgccactatattcaagattattgtcatcactatttcacatatagttgtcactacattaaaaatcgaagttatcatcgtatctcacttgtagtcatcaccatcattgccattaggtttgccctcaacataaatcaaatcaaataatgagtcaactactaatagaagaaaaactgggatgcaaaccaccatacagggtgtcaatagcacagttcgacaacctagtggccatggtaaaaggaatcatggccccaaagttttagagtttgaattggacaaagagcgacactcaacgatctcagaccgaatcaaatctttaccaatccatccaaagtttaagagtcctttttggcatcagtagaccgggaaagaagactcattgttttaagagtttaccagttttttttcttttaagtgcttacgcaaataaaatttatattctggccacattaaccttttcacattctttcatgtctatctgcatacattctcataaaaataagaaaaacaaataaagttttatatattcaaaataaaagaaaatagttttgcttagaaataaatcaaaaaaaaattcaaccactttaagttagctcaaatagccataaaaaggtagcgtgtatgttggaggtcctgaattcgagtttcaagttatgtattgttgtaatatataaacgcttaaaattaaaaaaaaaaaaaaaaaaacaaaaaaaacaacacaaacaacaaaaatacgtaaaacta

SEQ ID NO: 238431 - DNA, 536 bp, Cannabis indica
cgggaatggtagcaatgtggaagaaaataacagtactaagaatgatgatgctattatgattgaagaaactaaaggtagtgatactaaggataaggaaagtcaagagcaagtagttgcagaaacagctgcagaagaacaacttttgggtgaagctgtggctactgagaatggaaaggaaagctttcccaaagttgaagctgaaaaagcaaatgagaatgcccaaaaagaaaccgagacttctactgtaactgcagttgaggtagagaaagtgaatgagaatgtccagatagaaactgagactactactgtaactgcagctgaggcagagaaagtgaatgagaatgtccagatagaaaccgagactgctactgtaactgcaactgaggtagagatggtgaatgagaatgtccagatggatatcgagactgctactgtaactgcagctgaggcagagatagtgaatgagaatgtccagatagaaaccgagactactactataactgcagctgaggtagagatagtgaatgagaatgtcc

SEQ ID NO: 238432 - DNA, 1378 bp, Cannabis indica
aagttttttcttttttaactatttattgctgttgtaattggtcgccgtgttacatgtttatcatgctttttttttaatgctgcgcacatatgtatatatcaccaaattaccaaataataataatcacctaagaagtggacgaagttaatttaattaattagtatcacatttaaccatatagataattatagccatgtaaaaaagttttacttgtacaatattatctctagctatatatactcttacaaattgattttaacctccgcatgttcattagagacagcatatcagggtccttataaaagaaagggtcaaaataaacatctatacggaattaactttaactgatcattaccatttctaccttttatatttaattaatggaaattagaacaaaaagttggataatatatatacttttgactttcaaaacacaattcacgtacgttgaattgagttatatatataatgcttttgcttcacgtgaatcaggatcatatgattatagaccttaactggtaatataattgagaaaccccgcagtgaccaatgtatatttaccgtacatatatatgcataaactagtggttctagtcttctataatataattgacttattcaaatatataattgacatatacgtatatatcaaatccaagtactaatattatgattcaattctagaccaatccataataatcatgtacatatttatatgtataataatgaaatatcaccctttattcttatttgtttgtattaattaaaaatttaagaaaggtatcattcaaaataaataaataaataaaaagatgctatagctatatcctttttcaataaaaattaggcaagtagaagtatatatatacaaacatatgtaatgagtatttgacttgtgaagaagtcgtagtcattatttgttcatgtttttgcaacttgtctcattttattatacagaacagccacttaattatttgacaagcactaaaataattaattcattagttgattttataattagaagctgtaatgagcttgttgatcgatcatacatatcctaaatagaaaacatataaaaacctagggcagacttttatatgaacaaaatcgtactacttgaactattctagtagtacggctgaaactttatgcaacttctatacctttatatttggttattatatgtatatatgtatatatgaaatataggtatattgatatataataatcatctatatatctatttatatatcagtactatatatatatattgattcatatatatggcatctagtttatatatactttttacaacttgatatataaaactattatgttattaattatatactttaaattatattatatattaattata

SEQ ID NO: 238433 - DNA, 848 bp, Cannabis indica
agaattttaattctttggcaatcaaaatttgttcaagtggaaattattcatgaagatactcaacttgtccattgtaaaatcaaagtttgtgggcacaaggaaacttttcttgtcacggctgtgtatggaagtaattctaaagaggataggaagagtttgtgggcgaagctatgtagtattggtcacccgaacttacctttggttatattgggtgactttaatgctatgttcacttacgaagacagaaatgggggtagaaaaatccaagcaaaggacattgaagatgctcaaaattggctcaccatggttcaagttgaggaattcaggtgtactggatccttttacacttggactaataagcatgaggttggggaccttattttctctaagcttgatcgggtgtttgttaacaaattgtggcttgatattttcaccaaagcagatgctttttcaaatgggacaatgtttcggatcatactttttgcataatctgaaaccaggatcagagtaatatgggtttcaaacccttctgattttgcaactactgggttgattatcttaactacaagcaaagggtgttaaatgcttgggaaagtcctattgctaggagtggtttggatggtatcatgtagaggctaactcgggttagacaaaccctaattcagttcagtaagattgaagtgggtgatatcacaatgaaatatagggaacccaaggaagtttatagcagaattcaagaggatgcggccaaacatcccactgatatcagcctccaacatgcagcttcccaacaattgcagcatcttcgacatatgcagaaaaataattctagctttgtcacacagcag

SEQ ID NO: 238434 - DNA, 576 bp, Cannabis indica
taataaattacctccacgtcatcaagtaacccttcactagtttaaaaataaatttgagtatttaaatatctaataatactattaatgtgaatcattagatttaatctaatggccaataataaaatacctatttatgggtaatacccatttagagcatacccatatatatatatatatataattacatattgctaacgaagaaaaataaaagtgactgacgatttttattaattattatagtcagtgtagtattgatgatcactactcagtctgagtataatattatgactacttttgtttttctttctattatttgttttcttactactttattattaatctttaattttatcataatatacttttcttatttttcacctattctccttttgttcagaaattgatattctaaattaatctaaaaaaaaactacaagtaataattaaaaacaaaaaaaaaagttacaagtaatatttcaagtattaaatatcacacaatcacgttttttctttaactatcaacctattttttttcttaaactatcaatcatttttttttaaactatcaattacgatt

SEQ ID NO: 238435 - DNA, 1243 bp, Cannabis indica
gtgtaatatatatatatatatgtttaattttttttaatttagataatgtattttttttaatttttaaaattagggtttgtgattcagatctttgaagatttttttttagtctattgcggttacattggtgcaccattgagatgcgattatatatatatacatattttatatgaacaagaaaatccaagtaaaatatcgtggtgaatcgtaatgtgtctgattaagcagaattttctcttattttaatttaaagttatttcaataaacttaaaaatatagataaaaatatttactatatttttagtattttaaatttaaatctaaatttatttatataaatttgtacattaatttttatttttaaatatatataataaattaaaattttttttacataaaaaatatttatatagtttttatttttaaaatatatataatgaaattatagaattaataaagaatattactgttaagtaataatatattctgttacgtagaaaaaaaaaaataccattaaatcaagaattctgttacataaccacattttatatagaataaatatatattattaacgattgagatatttatcttctattttctgaagtaaaatcatatgtgtaacattaatattaaattattattaagttttggtgtatctcaataatttaagtgcaaaaaaattaattgctaagaaaatcttgtttagtgattaattgaaaaactaattagtagttatttaatttaaaaataaaattaatcgtaattaatgttttataaggaaacgaaatatattaatcgtaattaatgttttataagatattttattacttatttttatttaatttttatattaatcacaactgtttaataatgaactaatgactaaaactaatatgactattgttgacctccaaaaattagaaagtgtaattacaaaaattacaaagatgactattgttgacctccaaaaattacaaaaattacaaatgtaatttttgaagatctttagattaatgggaaggaaaatctcaaagtactcttaaaaaatgtaaagaagacaagaaaataggctcaaatcatataagggagtgagccgaaacgaggaggagccaaagcacgagatgagatcctcacgcaaggagctcctaaagcccaaactcccctccactcaagcccatgcgcatgttggaaatattttaccaggatctaggtttactaacaagtatgtttcattaatatccta

SEQ ID NO: 238436 - DNA, 1417 bp, Cannabis indica
aacttgtaaaaacttctaataatggtcttaaaatcatttgagcgggcactctgatagtaaaagcaatcatagttgtaaaatctttgtaacagacttcaatccattgtcatcatcagcggcatgcaatttgttataaaaacttatatcatttctctaaaagcttgaagggacaataatgttttaactgcacataaacaaacaatatattagtaggatgaaaattaaaataatgagtaattaaatattattgcaaatttatattttctttttactacaactaaacaaaataagcattaatagaaaaaaaaaaattataaaaaatactaacaatagtcactatagagaaaatatttcaaaccgaaaaattataaagaaatgagaaataacttatcttgtcaaatgcaattagtatctgaagtagatccacaagcactatttcaatcattaaaataactattataccttaaaaaacaataataactttataactcaaataatcgataacttaaaattaaatcttaaattatattgtaataatttaatttaattacttacacgaaaaagatttaatgataggaaaaaaattatctgaaaaaaattatatgatagaaatttttaaaatgattaagaaatatgtgtatgattgaaaggaaaattgtttattaatacaacattttaatcaagataattttaattaataataataaaaaaaaataatctacatgatcaaaaaataaactgaatatgaaataaatttaataatttaattttaatattgaaattttatcttcaaaattgttgaatgaacggtatgaatggaaaaatttaaggaacaaaaaatatatgattggaagaaaaaatcaaaataataacattaaaagtaaacttctaagaattcacaggttaaaattataaataaaattattgatgaagatcctaaaaagaattaaatcaatatgaacatttcatggaattaacaacatctagaattaaccacaaaacatgaatccaactttgaaaaacaaagattaagagatagaatacttatcattaattttagtatgaacatgttgaaacgtgatccttgaaagcatatgaatgttgcttctacattcaccaccactaccactactcctctacaaaaatactacgtaaaatgtaaaaatttatattgattatcaagcagtgtatataattttaaatatattaagtacctaatatataaaactcagaaaatttttactatctttaacattagtaaaaataactaccaccgagtaaccattagtaaatgttctatgagtaactacccctgacaagtggtgccaagcaaacaaccaccgagagtaactaccagtagtaactgttcaatgagtaactacccctgccaagtgatgccaagcaaacaaccactaag

SEQ ID NO: 238437 - DNA, 778 bp, Cannabis indica
ccgactttttttgagtataggtgcagcgtggtcgcggctgtattttactatcgcgattcgatttttactattgcgattctatgacatggttttaagtgttttagtcttgtctttacgacacaattttgagtgttgtgtgacaagattttattttttgttttgtttcgttattgatcttctttgttcttcgatggctcaccatcaaattactattagtggttaagaaaaataagttctttgtgactgaatgggtacgaggttcaatgaacctgtggcaataatttctcctgttgtatattttcaacgatagatgaaactatacatatgtgtgtatttttaaagttaactgtaatgttgtaatctttttaatttattttattttttaagtttttttaataattaaattgctgattttttatttagtttttcttgtgataatgataggtcaaatttaatgatttattcaaaattaataaataaataaataataaaattgtaatagcaaaatttccttaagattgagtcaaaactgttttgtttggtcaatcagatcagatctcttgccggcggtcaagcctctcttctctgtggtttctctcttcccatcaatttaggtttgttttcccttttctttaatatgcatatttttgcttctgtcttcaaattagggtttcatatttgatttttcaggttatactaattttactactgtctttgaaattctaaacaaaatcaatcaatgggtatcaaaactaagtttgtttctatgttttgttat

SEQ ID NO: 238438 - DNA, 1566 bp, Cannabis indica
tgacttatgaagcaccttgtcagtagcatgatagggccccaggtttgtactcccttccatatcaaggccatatattaataaaacgatgtttatccatgcttcttatgtatgcttctatatggtctttgtgatgcctgtttgttgcctttgttgggccattgcttgccatttgtctacatgtttgcttgtgggttgtgtgagattggtccttagggacgctttgtgtttgcttgctcatgcttcttgtttgcgctcaacatgtgtgagacatgtatcgtgcctaacctttgaacttgtgtgcctgtaggcgcttaggctgacttgctagcttggtgtgccagcaagtgtcgtacgtcccacctatttggcagtgtccaaataggcggcccgtgatagttggtatcagagccacgagaaagggtagcttggtaacacgacataatggtgagcaacacccaaagaattcaagagcttgagaagcgcatagaggagttagatggtctggacgagagggtcagggatttaagctccagcaatcagaactaagggccaacaatgacgcaacaacaagttgccacgttgactcaagactatgccaacttgttggccagggtagctgcaatcgagaggagagatggtgctaccggatcatcaggtgcacctcagatggaggatcgcatcagggcattagagcaagcaacaaaagacatgcaggctgctatcactgtgttacaaaatgggcaggcatcattacaagactccctgagtgatacgctagaggattgtaatgtgtctgtcacagccattcgggaagagtgagtaggaatgtcgaccaagctaaatcttaccatgatagtggcagagcgtgcaaataccggagggcacggaggtatggagtatggccgaccgagagcacccgaggccaaatgctatggaggggcgagggatgccaatgagctctaaaactttctgttttatgtggagcaatactttagggtcgtacggaccgactctgaagaagcaaaggtagcaacaactaccatgtatttgtccggggacgccaagttgtggtggaggacgaagtatgaagacattcagagtggtaaatgcaccattgacacatgggaagacctcaagaaagaattgaatgcccaatttctgccaaaaaaatgtcgcctacctggctcgacgccagctacgagaattaaagtaagttgggacagtctgagactatgtaaagaagttctccggattgatgctcgacatcaaggacatgaacgaagtcgatagaattttctacttccttgaaggactcaagccgtgtgctaaacaagagctgcaaaggcagcgggtgtcagatctcgccactgctcaagctgcagccgagcggctgactgattacacctatgagaattcgcagtcgaagaagacgaatccccaaaccagcaccaacaatgctgcgagtaagaagtcaggaaagcaatggccgagtaaaagtgggggaggggagaagaggactcctgaatctagctcctcctctaaaagtgatgctgcaacggggaagaa

SEQ ID NO: 238439 - DNA, 925 bp, Cannabis indica
tttttttttaaaaaataaactaatttacttcgatccgcatatctatttctgataagtattaaagttttatcatatcacaatgtttctaaatgtgaaaattataaaagaagtattattattaaatttgttgtgtaagaaattttattctccttttcttttacttttctttattatataataaaaaaataaagtaatctctgtataaatacttaagtttaacttctgattgtaaataaatatttaagtaattttttgtggaaataatatttaagttataattctaaaacttctgtaggtacctagctgttaagtgttaagtaaattaccacgtgacaacaatttctgattggtccagatacttatggagttaaaaaaatataatttaagtattattactgctaaaaataaaatttaagtcattgattccgctgcttgtacaatgtgcgatagcgcttgggaatccattgggcatgccctcttttcctgtaagcatgcgaaatcagtatggacaaacactgtattctcttttgactttcgacaggctcaacaaatgcctaatggtgattacctttccacctttccactttacattcacaatgtgggctatatggacaagtagaaacaaatctttacatggtagctcagttttggatgggaaacacactgctacatttgctaaagagtacttagaaaagatcaaagttcacaccagcaggcaacaaaagaatgttggccaaacaacctcagcgcctactgctgcattatatagcagcaatgctttagcacctgctgctgcaacattttgcagctatattgatgtttcagcgcctactgctgcaatatctagtagtactacttcaagagataaggttcaatggcatcctccacctagttctggaataaaaaatcaacgttgatgctgctg

SEQ ID NO: 238440 - DNA, 690 bp, Cannabis indica
ttttttaatttatttcatttttactgattttcagcactcccaccaccaattgtgatgttgttgcacatcctttcctcttacgtaaggaagtttacaacgttgtgcgctggtgagcttctcatggatgcattgggctctactaaaacttttgttgaaagccgattgagttgtactttaatggaaactatgctttgcttcattgaaacattcctcaattattattatttatttttttcgatcttgtgaattttagtatgcgggtggatcttataattatgatttagtcgtagatgcccttgtcgaatggtcgtacatgttcctcttaagaccattagtgagtttgttttaggggaactgctccttctgtggtgtgagttgtatttttggaattaaatgaattacaatactcaatctatgacctatatataaaaatatttacaaaagaaataggagctcaaatatctcaataaataaactaaccgacctaatagaataaccactgacccagaactaactgaagcataaatgtatataaattttggggaagattgcagcataagttcccaaaaagtccagtttgatgcagataagtcctcaatcttaaaaattggcggtaatagtccctaaggtcaccatttttgtttgtccgttactacttaactgttccgtttgtgtatttttttttttttt

SEQ ID NO: 238441 - DNA, 1597 bp, Cannabis indica
tatgtgaaatttgtggtcttaaaaatttaaaattttggttggaaatgatcaaatgaaactgatgcttctttgaatttgtatttctaatttaataacttcattatctgttgttcttattcatttaggatcataattataagtctcaaattattatatatatatttatactagcagaaagctacgtgcgaggcacgtatattaaattttatgttagatattttctactttgattgtagcaataattacactgattgtaatgaacaaaagaattaaaaccaatcctacaataacagatcaaattaattctaatatattaatgacccaattacatatatagtagcaggaaatagaaaaattatgagtgatggagtaatttttactcttgaatgctcttgatcggtataaaattatgaaatatatagtctaccactttaagctcttcatctgtaggttggagatttctactatcttttgatatgcaataccacattgcattttacagaaatagcttcctgattcaataatgagcgtccaatagattagacacagaaagattataaagatcattcaataatgatgaccatcaaactatctaattgtgtgtccttctaatgttaaaatacaatgccatcatatgtagcgggaaaaagaagagtttcctaatacttcagttttaagaaaaaaaacaaaaggtccaaaccaaaacatgtggtacacagacctgcaaataacaggtttcttgaataactaatgaaaatgatatcctaacagaaagccaatttaggtgctaaatttaaaaaattaatgttcaaaggaggactaaattaactcaaaaaaatgtaaaagaaagaaaagatgctgcaattaccaaaggattgatgttacaaaggccccgaccttcaccagatgccaagaataattcatttttagatttcaattgataaccttcataaatgcctatctcaggacttagacaaatgttcctctccttttctaaccgagccaaatcctccatgtacgctaaaagattgaaggaagtgaaagaagaaaaaatggagcaagtgtaattaattctcaaatattaacaatcatgaaaatgcagaaccagagtacttttgaggcataataaaatacgagtaaattgcagaaactacatattcataaaattgcattactgttaaataggaaagattaacaatgggagaacaaacctccaaatccttcacttgcaccttgacacctagctgcgaagtccaaagtctctatgacagtcaattctccattgtaagtgatttttccagatttctgatatcaaaaatcaagtattaaatggactatttaaagaaaacaaaaagtgtagcattcttatttacaagtctaatattgaattatgtatttttttttttttgaaattgattaaattatgtatcttcatgattaagaagcactctggtagccacaatttttatgtatttcagatctataaaatttaaagcttacacctcttctcaaagaggcaaaaggcctagacctttcacaacattgctgacaaaaaattaatcgaacctaatcactgaaagcctcaataattaagcaa

SEQ ID NO: 238442 - DNA, 880 bp, Cannabis indica
tgcacgatttcagattttaaataagcttttctagagagatttgaagcctcttgcttccttccatttatcatatgttaatttgtcaaacatgcattggaatcaacaaatgaaaatctttcttagtccaatttcaaaaagctcaacgaggaaaagaaaaaagcactaagagcatggaaacagagatttaatgaaaataaaaacaaaatagttgtaacctaggtgagttatatctaaagctatattcacacatcataacacctaaaagaagtaatgataggtttatcaaaactaataaactatttaaatttcctctaacctcaatatctataagaatataaaataaactaataaactactcttaactggtagcaagaaacctagaatctacatcaggagcaacaaaactcacatcactctacatcaagggcgaagttgcgaagatttggagatggaagaaactgatcaaaacaattgcaatgaaaggagccctcagacaagttacggggagaagatgagttctggagatcccaaaatcgcctaaaagaaatacaccaacaaaattaaatagctgtgtagcaaatttgtggattgggtttgagatttaagggcttcaaaagaaaatgggtttatggggttgggttcgcatgcgttgtccgatctctgtggtattgcattgggcgaagcgaagttcaaagaatgggtttcgagattttggggttctcccagttctttgggtggctttgttgatgtcgacggaatcttagacagaggtgtagacgaatagcatgggaaccaaaggaaagagggataaatcgagagaaaggattgtaacataagaattcaataaaggcaagaacaaaataataataaaaaaaaaact

SEQ ID NO: 238443 - DNA, 1480 bp, Cannabis indica
tgcttaacccctagattacctcagacacgcttcatgaattcttcaaaaatatgaaaaggagggtttgcaccaaacactacacaaataatagaattctgccaaaacgaagtttcaatttctacctcttcaacatcaattttagcaatgagttgatcaccaacattcatatgattagtaaagtcaagatgagtaaaaggagttctaacttaatttgccttaaatttattccacgcatcgtcgatgattgaaaatccacctaatcaacctcatcttcccaagtacaaggcctagatggttcaattgacgaatcttcaacttgataaattaccaacggagtgagtagatcggcctctaaatcgacacatgaatcatgaaaatttttagacttattcacatcaacaattgcttcctaattcgaaggagttcattcaaaaataacaaattattcataacttttataatgtcaacatacattttcatatataaaataaaaaatatataactatctaaaaaaatactcaacaaaaaaaaatagtggagtttctatttgcaccccacaaaatgataagtacatccccaattattttttagaaaaaattaatacttaaaattaaatttttaaaaatcactcttaattatttttattattttgttttaatttcaataatacttctttaattttttaatccggtataatttttttaataaaattttatataatttattttattttaattttttgttataatatttaaaatataatttatttttatttaatagttttttttaagcaatttaatagttatatttttttaaaaatataaattggatgaaatttttttttaaaagaaaactaatataaataaatatataagatttttcttaagtgataacatcacttttgctctcagttttgattggttcaatagtgaaaatgtatgggattaaaatgagttgtcaaacgtgctattaaattttttaatatttcttttaacaaattaaagttgactttataaaaaaaaaaaaaaaaactctcttattaaaataacaaataaagtaaataattttcatggatcttctttaacatcaagattaataatttcatggatctcctttataaataaaaattatttcataaaccaaaatttaaaaaaagatttaaacttaatttaagatcatttttaagtatcaatactttcaaagaagatctcaaaatacattattctaaaattaattcagtatatataaggaagaagaatgaaagagatcattctaagacaagaagtagttagtactttttcatcgatatttaaaagatcaagtgtattaattacttctatttattattattgggaaattctataatacaccccttaaaagggatataccgatacatctctttttgtttttagtatccgaaataattttttagttcaaattttttcttcatggtcatgtaaattataattatttaagacat

SEQ ID NO: 238444 - DNA, 623 bp, Cannabis indica
aaaacaccacacaagcttcaagacgctagaagttcctcatcccattggcaaccaccacctccaagccagcttaagcttaatgttgacactgcccaaaatatacaaacgaacaggatgggctttggcttgatcgttcaaaatcataccacagatgttgttgcagcgttagttattctttggaaaggtattcaccaaccacttataatgaagcgctttcccttctactcgctctcgaatgctgtcaagagaactcacttatgattcaacacatagaatctgattgtcaaattcttgtagatgctgtactcacaggtcacaccaataacattcatctccaagaattcattatcaaaattaatagcttattgtctttatttcctcaagctttgattacctatatccctcgagaggctaattctatcgctcatcctctagctaagcaagctttaggcttagaacaagaggctattctctgattttgagcaactatttttctctttgttatatcctctcttacattctttaggtaaaataaataattattaagatacctttaaaaaaaaaattattaggatactattatcttaaaaaattaatagaataaagagattttttcattttta

SEQ ID NO: 238445 - DNA, 978 bp, Cannabis indica
atatgttaatgagttggtgtgtattcagtgacacaagctaaagctctagctcgttgggtgtgttgtttgagaatgttataactttattatctaaatttttcgagaacagttttgtcgcatgttgctcgctaatttttaacagttcataatttgacaaatcatgtccttcggctagacaatgagctatctagtttcaaagagatttcactacgctgtttacgaatatctgcattgtagatttttaagtaattcgaatcactacctaaaaaaaagagttttaaacataatttaagaaacaattaggttaaatataaaagaaaatgaaattaatttctttcctaccaaatcatatgaatttataaacatatacacacaattcaaaaaaagaagaaaaaaacctattttaggtactacaaaaacaaatatgctctcttagcatatgaatgagcacaatattatattggtccatgtaatgagtgctacttaggtagtttacgtaatctaaactaaacaaaattgttccttaaaatgtttataatttagtctacaaaataataccacattagatcgagtttatttatttctttatttatttattttggtggttttttgtatgatgtactttattatcaataaatagccaacagtacaaaaccacatgcagttgttatttggcatcatgaattcaacaacatccaccatctatatatgtataaatataaatatgtttatataaaaattaaaagaaaaaaaaattgtataaatatgttgttgatagttttaaccaccgcataggagtaaatttttgtcactattgattaattgagtaaataaaaaaataatacgagcattatcatatgtttatattaacttagtgatttaataaatataataaatttgtttagtcactactataaaaatgatttttttttccgtacgtttttaaactagtcgtttaaagaattcccgtcggtttct

SEQ ID NO: 238446 - DNA, 1124 bp, Cannabis indica
tgcttagagcatgagttatggaaagtctggtgctcaccctcacatacattaagaatcctaaaaccacttcatagggtaatccttcatttatgctttctctttcgcattgtttaaacactgttccttcaataaaacaaattgtctgcctaacggaacgcaagtactctttgcatcttacatggtaaacttctgaataactttcttcatgtacctaaacttctttaagtcgattgtcccttccttcttattccttgaaatttcaataccaagtatctttttaactggtccaagctcctccatctcaaactctctcttaagcttgaatttgatacttttgatcattgatttgtgtttcctcatggtgagcatatcatccaaatagagcaataacatcacagctataggttgctctagattcttgaaatacaaacagtgatccatatatagattgtatgaacctaatttgttgcatataattatcaaatcttttattccgttgtctcgaggattgtttcaaacatataaggacttgatgaacttgcacactcattcaactccttttccttccacctgaaacctaggtggtttcttcatgtagatctcttcatctaaaaatccattcaaaaaagtagtataaacatcaagttgttcaacttcaaactccatttgagctgccaaagacaacatcaatcttattatctagtattttaccacatgtgagaagattttagtgtagtctattctttccacctaagtaaatcccttagccactaatctggctttgaaccacattggttcattctcattgattccctctcttaccttgagattccattttaactccacaatcttttattctttggcttcagtacaactacccaactcttgttcttcaagagtgaatccatctcctcatacatggcctggagccattttgacttgttttcacctaaaatttcctcttcgtagcttttgggctctttaattttagtttgttatactatcgccaatgcaaatgaaatcaagtctgcctcacaaacctttttggagggtgaatctccctttttaattctatcacgcgccgactgataacctagaaaagttcccttaactgatctaggttc

SEQ ID NO: 238447 - DNA, 1353 bp, Cannabis indica
gactaccaagtacctaacaatgtacatggctggaaacaattgaccttccaaaagaatacttgtctagtcctgctaatcctctatcaacccgaaatgaatatataaataccaagcacatgtcttccagtccctcaatgtcaaataagcacctaatcaacaacaaaagctagtttgctataactaatgacaagtgaactttgtctagtctacagcacacaagtattagaggaattctaaagttctacccacctcacaaaagcattgaatatactagtttaaatttgtaattgtttgcccatttcaacaatagaaaagtaataaactggatgcttcaccactaatttcatttgaaaaatcgttcaaagcatagacataaatttcaagcttaattgtttttattattccttgaatcagtattattcttactcttatttgttttattgttccttgaggatcagtataattaaatcgaacaagaaatttacgaacaaatttttcttctacaatggatataaagttactacgaggttggatcagaagtgtaataagtacctgcttaaacctttccttagttctctcagcctgcataaaaggaaaagttctgtgagaaaaaagatgtaatatctttggtttaggctgataaatagaaaattgtgatcaaagaaaagaaaacatacacatacacccactgaaaaatttatacacaataatgcttctttgagtaatcccattcccagatactaaataaataatctagattttactacctgcatcgctactgtgactaatctcatacagatactacagaatttagttaatacccaaaacaagttaaaaatacaagtgttaattccatcatcaagaattatacagtaagtaatgggaacgcacagaaaatagataatacgtgtaactctaaatatgagattttgtaagctgtaaaaagcaaacatacacaactcaaaaataaaactgtaaggaaatccatatgtactaagcaaatcatagataattcatacaaacatgtagataaaaataaatagatataagtgtgtctaacttatgtggtggctcagcaattgcttacatattcaatacgttaaactccaaggaacattttgcgttaaaaattttgaacttcaagcatcataatcccaaaaaaggatcagttagtaaaaacttaaattaagtactaacgtttctactaatcttaatcttatttgatgcccattagaaaggcaaaatgctgtcacaaacatcaaaatttccccaaattcgactaataatctatcatatgatcaataaaaacttttgtaacccaaaacctgaaagtcataaagagattccagaact

SEQ ID NO: 238448 - DNA, 844 bp, Cannabis indica
ttaatagggaaattatcccatatcctattttttaacttttattttttattttttttcaaatttacagtttgggtttctaaagtagtttttccggtggtttctgtgtggattgctatacgatttttaattacaatttaagttgctccgttaattgcaataggagtttctatgtgaaattccgtaaaaatgcaaaaaaaaaaaaaaaatattattttaataatttttaaagatgcttaccattaaattattttagaaactaaaaatacaaaaaacgatgtgaaagagagataaaataaaataatatatttttaagtatttgtagagatttttgacactcttaaaaaatgtcaccattagagatgttctaacaccaactaaaagttactcattgtaattagttagtgatatgttatgatagttatattaaattaaattatgcgagactcgatatttaattatatgtacaaggtgtattttatcattttttttatatcacaatcgatattactctaatttagttgtttatttccattccccccaatattaatgcatgtgaaattaatttactagaaaaaataaactatttttagtgacaacataaatttttgtgattaaatataatttttagtgacaaaaaaaaagttattatgactaaaacagagtatttagatataaattgtcattaatttaattttagtcatgacaaatatttagtcacaacaagtattgtgactaaaaacatatttagtcataacaaattatgatttttgtgactaatacttttagtcacagaccttttaattacaatataagaaaaatcttataattagtcttaattatttac

SEQ ID NO: 238449 - DNA, 1159 bp, Cannabis indica
acctaatagccatccttgtaactccttcagtgcataatccttttctccttttacttgattatttattttaattgaacttgtctgtacaaatggggaatcatctaaattaggtaattatatagaccaaaacaaaacccacataatttgtttaaaataaattatatacacacaatctgtgtgtatatttacaaattggtaaaatagatgatgataagagtgagcaaaaacctctatggtatggttcttgagaagaggatgatcaaaagcaggttgcttgtatatatcaacacaatcgatcacgtcaccatcatcactctgccggccaatttactaattaaattttattaccattaagaaatatatatatgtaccattttttaattgattttgatcattgacattgagaacatatttttaaaaatgacaataagaaataattgtatagtaagtattgccatgaggaagcttgtacaaaatattgacatataacaagaatacaaacctctatggttttgatcgttcccttacgtttgcctatatctgtactatgcaatcttcttccatctgcaaagttaataaggataaaacataaaattgccaaaggtaatatgctactccttgtaacgacggttctaatcatgatattagtgttgtgaagatattccaattaagcacagctatttgatatccatatccatgtctctgtatatattgtgtgttttatgtttacttttcattcagtatattcatactatatatacaaaataactaagatatcttataagtatccaaaatttctatatattacaataaaaaaaatctcaactttattaaaacttttatggaaaaaaaaaagcatatattatagtattttagtatatatttaaaatagaattttgtttattttaattttttttattgtagttaaattatgagattcaaaatatatatttactgataaaatatttgaagatatatagagattatatgtttttttttatctgaatatattttatcaaacactttatatgatgatttcttttacgtacactttttctataagatatgtctattatatatgaatttaataattatatagaaaaagaaagtgaagctttttcaatcaaaatcataaatgttctttattattattattatt

SEQ ID NO: 238450 - DNA, 1160 bp, Cannabis indica
aagggagggagaatctcgccttcttcctcttctattccctcctcctcatcaattaaagcgacttgtcaagaggaatgctggaagaagacctcccaggattcactacctggtcttgtgcctgaggaagaactgagtcgggactataggtctgggaaagagcgtccacgagctcatccattggcttcgctgcttaaagagatagacaaataacggcgttagaacattatcgagaaatcatgcatgcaataacaaagcaataaaactaatcctaccctgacgatctaattctgccctagcaaaagcatgtattaaaaggctggtgtcgttgtcccctagaaagttatccgaggggaggaaccaactggaagataaataggcagaatgatctaggagaataggtacgggaggaccggatcccatccgggactggcctaaaaagtgaccaaggttggaaaaataaaaacccttggcatggtcaccccatcgggaagggggcatcctaaacctatgaagccgttcatcaaactctaatggcctacagccaaaataatcctgaacggaagggacacgatgaacaattagcagggactttccagcttcggaagtactggcatcagtagccccagtgttggggaccaggaacggaagtctagaccgggaagtcacctgctcttttctggcctcgatccgaaggaccctccctacgacggcttgggccttgatgtaggcaagttcttgttccctcctgaagaggcacttcttatactgaccctccgcgaaagcaatgatgtccgcccgaagcgccttctcggagtcaggattgtgaacgttgggacaaagaaccttggataaattgaaatcatccactgactggccctctgtgatcaaattggcccttctacagtgtacaatcgtaaccaagtccccaacattcagcccatccttgtcgtacgtggagaagaccttggcgtgttgaaggaaaagttgtgtggggctggtgcggtgcattggtggtaccctgacccactcagtaagtagctccaagcgctcaatagcttggaaactagaggagaagaaaaactggtgacgatattccttaacatttttttggaagttaaaaggaaccgaaccctcattagcaggatgggcccggagtgtga

SEQ ID NO: 238451 - DNA, 1051 bp, Cannabis indica
agagtgtaagagataaacacttcaagagaatctaatatagaattgatttcaactgtaatgtactttgtttttgctcaatcaataaagaagatttcggtggtctttcaaaactgaagtagagctatagatcaaatcgatttataggacttgaactagtatatatcttggtgttgattttattgttctattactttaatcgtttctggtttctagttttttgattgctctgtacttttctatttttatctccgattattatttgtatattgttaattttgttattgctaattatttgttgattaaatttcagttgatttgattctgcatattagttgtcattttcccacaatatctatttcacccataaattgtcttactttgaggaaatagcccaaacatatttcacaatcacaattgtgttccatagcaatgaattttgaattcccaaacttccttcagattttgatttatacaactgcttccaagctttatatcccgagatgtatgattcagcaatgccttggcaataaaaatcgacaaatatcattaatctttttgagcactctctttggtaaccataatttgttcttaataagagtgaattgagataagaattaatgtgatcctaccagcaaataagatatttcacaatccccaaactcaaattctttgcaccattttctcaataacgcttcatagtccgttgttgaaagtcttttaacataaattggaatacccaaatatttaaatagtatctcacttcgagtaaatcccgaagcttccaagattcctttgacttcggtattctcttccacaacaataaaaggttgtggaataataccaactaaagtctcgaactctaacatgaaaatacaaccagttagttatgttagttatagggttacttttttaatacccttatcaacaacaacaccacaaacaacaaattcttatcgatgttgtctacatactttgttcattgcatataatatatattttttttacaatccaaaaagtcttctaaacagtattattgttattattttcatta

SEQ ID NO: 238452 - DNA, 783 bp, Cannabis indica
gtcgtgtctcacccatccaactaagaacctccaaccaacataaatcgagtaagacaaaaaaagttaccggtgttagtgtcctccagtggaacacatcgatcatcttttgtagctccggtgagctgcggtttgactttgatggcgtatctcaaagagccatcctatggttcttgactataagtgttctcaagatgcttctcaaatctaagacctcggatgcttcacccttatcagcttcgtctcgttgttcatcctcctcgatggtagtcactactgttgttacttgtggaagcagcatcttcaaacaaccttatgctgacaccatcgagtcaacctcagtcgccattagagtgtcgttggtgtttcgtgcctctctagatttttgtatccgatcgatcattaggtctaaccatttcacgatgggaccaattgtagcctcaagagctaatttcatcatctccaattagtttggagcttgctgaaactccgatcgaatttttgtcacacctcgccccaaagaatcgacgtgctttgatacaatttgataggaatttcctataatttcagtgtaaacagtagcaaaatagagataatagagctgatatattgatattggaatgaaaagggaacaagtttgtcaggtattcgagagacccaactctctcccaagagctcatgctcactttaacaaaataattctctacctttttacctttcctactcacttatatatatagcaataattcctcccattacaattacccaattgttgggttttatgcc

SEQ ID NO: 238453 - DNA, 1298 bp, Cannabis indica
ggagggatttttctgagtttttatcactaaggctctcaattaatgtaccaaattattaacgcagattttcgttaactaaaaaaatagcctttcagtaataaactttctacaaaaaattattaagtaaacagagatatgatgacactagatatttttacgtggtgttgtagttaaaatctacatactccacgagtccttattattagggatatttattgagtacaaaatccaatatcagaatttgaataatagtattttctctcaatttattactgtccatttttccatggaatctgcccctatttataggagtataggttgagagttattccttttgggatggatttaaatataactgctcatgaaacgtggacaatccccacgtttcatttaatcacatgtgagataatatcttataactttccaactactctttggttttatcctttagatggttattgctgacgtggaaggttatatctgctaatatgagtttcctccttgtccacctgaagaaaaaatgctaagtgttgggaaatagttcatcttgtcatattctcttattggctttttacaaagtgaggtgatcttctcactatgtgaaatgcgaggcatcttatgttgatatactcacttcgctcggatggatgaatgttcctttcttgtcagtatattctgaggcatgcatatgtgtcgttaatctcatatcaatagttattattcttgtctcactattgactataaagtcaatgagttttgaatattatctatttaatatttaattaataaatgagttatttaatatgcattttgtatcattcagatttttttgtattccttttgttggacatgtgtcaacttgtgaagtgcagtcgaatttcgggtataacacttatattcataaatcaatcgattaagatttcacctaaaagtcttttgctgtacttttatccacacactcttgggaacgtaactttggtgtgtcggatctaatcaataaaaataaaaatagacgtagccccattacaatcgcgacatgggagtgaactactacaaatccctggtgtcaatttaatttattacgcttttattagttaaattaattcatcgtggtcctcgttatttttatgatcttcttagattagttgacgaaaaactacgctaacaatttgtttttataatttatttacaattggttcaaaagaaaaaaaactaagtaaaaaaaatatgaaaattttacaccaaatactgaaatttcttactttttctactgtgaggtggaatttttttcaaaaata

SEQ ID NO: 238454 - DNA, 709 bp, Cannabis indica
tcacaacatgcaaactcataaactaaaaatttcccacatattttaccatcaattaacaacaacaattagggataaaaatcatatttcacaacttggaaaatcaaccctaaaaatttctaacaacataagtgcaaaatccataaattaaacaagttcaagttacaaagcccaaaaacattaccctcaataaattttagcacgagaaattaaatttaaaatagtaataagtacctcaaattatagcaaagaacaatccccaacacctccaattccaagctccaaaagttagtaaaattcaagcttgaatccaagctatttcaagcaaaatcacaactttgggaagatgagtttaaggagagagagggaggggtcggttggtggagtaaaaactagaaaaataattgcaattttactcaaaaatgctttttgtttcaaataaaccaattatggaaaaattacaaaaatgcccctagggcaacataacactcatttaggcatacaagggcaattaggtcaattacatcacataccacatattctattaatttttagatttctcacatataaataaaatgccaataattcaatccaaacttgtatttcgtgcccaaatctggttcggcccaaaataccccattgtgactataccgcgctaacttgtgagaacacacctaaaaaaagacaaaacagccatactatataataatat

SEQ ID NO: 238455 - DNA, 1930 bp, Cannabis indica
catccatatagatacacaccaaaatgatttacattatcacaagtcttaaagtataagcacttgtcagcggtattgtgattgaagcaattagagtaatggcttgattaaacttttcatatcatttttagtgcttgtttaagtccatatagtgacttcacaagtctacacaccttgtgttcactttccttcaagaacaaaccttccagttgttctatggaaatctcttcatggagatttccattaagaaatgctgttttcacatctatttggtgaacacgtaggttgtgtatggatgacgaagcaaacaacaatctaatagaagtgattcttgctaccatatcataagtatcaaagtaatatattccttccttttatctatatccttcggccaccaatctagccttaaagatttagatggttccatcgatgttgtacttaattctaaatacccacctacatcctataggcattgatccaaatggtagatcaactacttcccaagtgtggttagatataattgaatcttttttatcatttattgcctctctccaaaaaacgacatcccttaatgacattgcttcttaaaggttttaagatcaccttcaatttgaagtatcatagggtacatcattttcacttcctctcaacgcaccagctacgtcagccaactggggatcacgggcagccaagccctgcctagtacaaggttggccgaccatggacagttgcccaacacgagcttggtcgcccagaatgaacccccttatctgggagtggccggtcaaggccagcaacacttgatagggctggctggcctccaccatacactctcctatggtatgtccgaccagaccctagaacatttgagtctgtagcccatccaaggagggctagtcagtcaagtctctgcagcaatggatgcttctgtgcaagtactgttggatcaaatagggacatgatcaagggcctagcgggtccaaaaccttcaaaccttaagctagacaagtcaaggggatcactattctcgacatacataaatgccttgcccttgtccaagttcaagatgcctgtatcgaagatgtatacagagcgagaagacccactagcacacatcaagtactttgatatacaacttgatctccagaagattactggtgatgtgcgatgtcacatattcccaacaactttttcagaaatagctcaataatggtacttcaagctggctccaggaagattcaattcatagaattagttttctcgagaattctacactcagttctcgtcctcaaggcttataccatcgcagctagaaaaccttgtcgaagtcaaacaacaacaaggagaacctttgaaggattacatccagaggttcatggccaagaccaccaaggtcaaaggctttacagaagaaggccgatatacgaccatgttggggggcatccttctattgagtgacttctggaaagatatccaaaggatctcaactaacaacatgaaggatatcaagctagaagaagttgtccaacaagcctagacatggcaagtcaataataggcagtcacaaggtatcctatagccccatgacccaccaagcgcacaggcaggtaccagcaactctgcccaaacctccagtggcaagaacactaggagcaagcccaacaacaacaactttggaagaaacagtggaaaaagaagtttaacacttctcccacgcaacaaaaccagaaacaaggaggagaactatacatgcttcaccctcctaatggagaaacctgaggccatcttcatggccactcagggaacaatcccatacagaaagccacttcccatcaaaagataattgagcaagaggaacttgtcgaatttctatcggtttcacaacgactttggccatgacagtaacgacagttaaaatttgaagagggagatt

SEQ ID NO: 238456 - DNA, 1057 bp, Cannabis indica
aagtgattaaaagtttggccattctgaaggctagcttagctgtaggtagtgttatctgtgtgatgggaacccataaagtattaccgatgacccaatcaaagtaggatgaaatattaggcccctataactgacacgtacgtaattcccagaattatcaatatgacttaaagagtagggaaaggatctgaatcacgttatcttcttttatttaataataaaaagtggaattttgaatttagatatcttatttttgtttgttttgaaatattaaggtggaattgaacccagtttggcagcagagaaaattaagagagttttgtaaagaaaaggggattttgatcacagcatattctccattaggaggaaagggatcaatttggggaacaaacagagtaatggaaaatgatgtactcaaacaaattgctgaggctaaaggaaaaactgtggcccaggtattattattatatatttagaatagtaatttttcttcttaaatttttgacactatcaaattttacatttacagaaatttaattttctagttccttctcattatttcatttagttcaaataaacaagcagtgtatgcttttggtcttatggttcaaattgttttggcaaggttttaaattcaaatccattacttttttttttattaactaattttattctaaaaaaataaatatcattttggaccatgtattttgtaaaaattatcaattggaccttctgttttgttaaatgacaaaatagtccctttatttttcaaaatggtaaaaataagacactgaacttaatttttgacaacttgtatttttttttaatataaccaacttgaagacaatttctaatatgaacagatacagaaaatgttaatagttttgtcataacacctttaaatcggattattattaaattttattttgacaaaaaatcagttcaggagtcctatttatactatttttgaaaaatataaggttcattttatcatttaacaaaacagagaatttaattggtaatatttgtaaaataagggtctaaaatggtacgtatttat

SEQ ID NO: 238457 - DNA, 873 bp, Cannabis indica
cgtcggttattttggcaaatagcgtcagttatttgtgaataatcgacgccatagtatacatatggcatcagttctttaataataactgacgccataaggtatcatttagtttcgattattttcaatcctacatcatcggtaacgaatttcaccaaaattgacgttgaatggccttaaaaactgcatctaaagcctagatttgtagtagtggcagcaacgtatgcgacttgatgagtcgcgagtttcttgttcatattctaacacattggctcacagactttaggtgtatttatattcgtaggatggcttgcgggcctaacttttagatgtttgtgttctactttaatcgtataaacgaacatctcatgtgttgacaacatgaaacatgtgaattcttaacgagttatcaaacacattagtcactcagactactctatataaagaatcaatatttactaattgtaggagagatctacttggtcatcgcataaaatcgatatatgcgtgaccagtatcaaatcctcttgaccctgcttattccttatgctatacgaggcatagcatggcactagaccatgtttcggtcgcatcatctcacgagttctcttcaagcgaggttagctctatgggagctaactattaacacatcattctttccgttgagaattgggtccacatgtcaattttatacaaggctatactcgtacttctagaaaaaaaatttgcactataacacatgctcctagtttctcaatcacaattgtttgtcaaaatgagagacaagcaagttgttctatcacatgacggtggcttttggttgtcttgtcgagggttttcaaaagacgactgtatttatttctttatttcctgaag

SEQ ID NO: 238458 - DNA, 2929 bp, Cannabis indica
caaaagtttaagatggaaacttcacaaatttgattctcacttgtcagctttaacacctttcatgtcaggtaccccttttgagatggaagagatttgctttagttgcagcaatgtgcattcttgctgttcgagcagtgattgttcaactagctttttttcttcacattcaggttatgatatgtctaattacgatacaaacattcttatttttcgtgcccaaagctgattgtcttctaatgaagaaataagttatcattatcccattaactgatagacaaaagataactaaattacccattacatagatatttgagtctcttcaaaacttgtttcaatgcctgaaccttacttttccaacaaactcatatttaagggaaggaacaatgtttatatggtaatctagttttaccaaatagctgcatatttgagtctttagttactaacttactgtgatcatgtaaactatgatagtaatgtactttcagatttcaatgattctaagtactgaaatatgcattgattttcagacgcatgtctttaaaagaccagctgtcttctcaaggcccctcattttcgcaactgcatttatgagcttcttctcggttgttatagcattatttaaggtatcaaccgtctttttctttctccatggaacaatgttttgttttctatctctgcttgcttgggcataatagctcaatttttcttcttttgtttaataatgcataggatatacctgatattgacggagacaggatatatggcatccgatcttttacagtgcgcttaggtcaaaagcgggtcagtgttaaatatttttaacctatttagttactactttttggaaatcttattttgttcacatactaaatcacattgtgcaggtgttttggatatgcatttcactacttgaaattgcttatacagttgcacttttagtgggagcatcatccggcttcttgtggagcaaagttgttacggtaaatgtttgagtaactagtttccttttttttttgacatgaaattgcaacttcattaatttagcattccaaatacaaaatagtctgaaactcggaaggaataaaagtcccaagaatgctacgaccagataagaattgagcgtgcctagcaacatagtgggcagctcgatttgctgatcgtctaactaatttcctttttaaaaaatattactttttcgtttttcttgttgatataatggcaagggctcaatggtgatagtactatgaatttcaatgtttaggtattgggacacacaattttggcttcaatactctggactaatgccaagtcagttgatttgagcagcaaagctgcaataacatctttttacatgttcatatggaaggtaagtaactatgctcctgaacttagctcgtttgtttgtcgctcattcttgggtagtccctcaattttttgtgcattggttcgaactgcaattatttaggactcaaatcacttgttcccatttctctctgtcttatcactgaatagtaactaactcatttaaatgtccattaattgtcattttaaatgagttggctgctattgaatggcgagaagcaaaaaatggggacatcatatatgaatcgtcgattgattcgagcgttagattacttacaaaaaatttaaaaatacttggtgtttggatgtcattttaacggtaaataatgcagaggattctggattttgataccaattgatgtggcagttgagtttgttatacattttcaacaaatataccacatcagttgatattaaaatactagtctagtcctttcttttaatatgattaacataaacagttatagcatgaaatttttattggaactttagaaatctgaattataatcaaactttttgtagaaaaatgaactttagaactctcttgtgttatggatttgcttgttttctcttcgatagtttttatattttatgctgtatttttgaactagctgttttggcttatttatgaaaataaacttttttaaaacatcactttgccaaaataggccatgttaaaagattattttcgaaatagtcttctcaacacacttgtcacggtgttacaccaaagacgagttcagtttcacgcaccctaaaaatgtctaaagtcttggtttcacgcactctaaatatgtctaaagtgttgttgagaagactactttgcaaggaatttattagcataaatccctaaaattagaagctagttttgcaatagttcttttgaaaattattgtacaaaactttttcattatatttatttttacgaagcatttccctcaattgtaatatcattcctaaataatgatttttagtatgatacatttgtcaatcttttttttttattgtttccaaaaaagataattatatcaaattattaattaaagtgggagttccctctaattcaatctcttagttatgattttaaaattgtcattaaaattttgatgattaggcacttctttatgaggttggtttgggttgttgttgagtaatttttgggtttttggcacttttttttatcattattttgtccaacggccttgattttattaatttgcaaaatggccctccggacatataattccaaacacagtgtgtcagaaattgcagacgcctatttgcaaaatcataaacattgttagatttcagactgaggtcattctgcaaacagtgtagggtgacgtggaggagagagggacagacatttatagaaatattgtagaatcaagatcatatgttaaaagattgtattttcatagtgtattaaaacgaatcttattgtgacacatcaattaatttgaccatttttaaagattttttaaaaaaaaatctgtataaatgtttaattttttaataaacgaaaaattagttaatgtgtcaaacttaaatagttttaacacagtat

SEQ ID NO: 238459 - DNA, 665 bp, Cannabis indica
aaaagtcaccattttttcgcttacaatctatactggccgaatacttggacagaaaatccatcccaagtataatgtcaaatttcgttaatttcagttcgataaggtcagcactccactccctatcctcgatcctaactagcatagacctaatgcgcctattggagataactaactccccgttaggcatttgggttccaaaccctctctcaaggatatcacaaggcctacccaaaagattaattaacctcgtggccacatatgaacgtgtagctcccgaatcaaataatacagtataagaggagttgttgaaaggaagctgacctgtcaccacgaaaggactggctgcagcatcagcttgggtgatagcaaacacccgagcaggtacaggttttgcctctgacttctgctcttctttctttgcctgagggcaatccttcttgaaatggcccaccatgttgcacagaaaacatgtcttccggttgcactctcccggatcatgtttcttacaacgtgggaactcacggtaagaataaccctggcgcccacctctatcttggttcccacggaattgcttactcagccctgaggcaccagattccatggtaactttcctcttctaatcagtggtggaatcaccaccatccctaccataaacaggagtagga

SEQ ID NO: 238460 - DNA, 797 bp, Cannabis indica
ggcaggaatttggtcacgacaaaatgtagatcaatttcaatgtgcttggaccttgcatgaaaaataggattggcagcaagagctggtgcactctgattgtcatcctagataactggacaatttgacatgtgaacacgaagctcagtaagcagagaagtgatccatcgaagttcagcagtcgtattagctaaggctctgaattcgctttctgtgctggaacgggcaactactggttatttcttagcagaccaggatatgagatttttgcctaagaacacgacataaccccagtagatcatctatcatctacacaactggcccaatcagcatctgaataacttgtgaaagtcatttcaatgcatggtcgaagcacaagtccctatgaaatcgttccttctaggtaccttaagagtcgtttacatgcttcccaatgacatgttgtaggaagcctttaaaaattggctgagtttaggacagtttgacaatgacatattgacaatgaaggccacatctagtcttgttaaagacaaatattgtaaggcccctattgtacttctgtacaatgttatatccaaaaatggttctccatcagttaaggacagtttggcagcagtattagtgggacttggagaacttttagcaccatccatgtgaaatttacctagaagatcagtgatatatttggtttgtgagaggtacattccagttgaatctctaaagatttcaacacccaggaaatagtgaacttctccaaaaattttcagtaagaactaactgtaatacccggcattaagaaa

SEQ ID NO: 238461 - DNA, 1165 bp, Cannabis indica
attccatccacaatgtgcaagcccggtaacaaaactttctcagccatataccatgcaggttggatgcagacataacatgcaataaattatgctgccatggtggatgaagctatgagtttttattttgcactcttccatgatatagctccaccacttaacagatatatgtagtccaaagtggatctcctactatcttggcatcctgtaaaatcgaattcagaatatccaataatctcaaagtgatctgacctcctatatgtgagcatgtaatctcttgttctcttcaaatatctcgtaacctttttggctgctttccagtgatcaattcctggattgcttaagtatctgcctaacactccaacaatctatactatatttggacgcgtatacaaacttgagcatacattagactcccaacagctgaagcgtagggaatctttttcatttcttgaatttcaaggcttcttttagggtattgcttaagacaaaatttgtctccttaaacgacggggctatcacctagtctacaatcttgcatgccaaacggtttgagtactttatcgatataactcttttatgataatccaaaaataccccgagaacagtctcaatgtatttgaattcctaaaataaaagaggcatcaccaagatctttcatctcaaaattcatagacagaaatctcttggtttcatccaataagcctatatcattagtggcaagcaatatgtcatcgacatatagaaacaaaaatatgcacttactaccaaaacttatgatacacacaatcatcaaaaacattcatctcaaaaccaaacaagagaaccatttgataaaatttgtagtaccattaacgggaagcttgcttgagtctgtagatagattttttttttaatttacaaactattttctttgggtcaccaaacacaagttttctggttgctccatattgtctcatcaatgtctccattgagaaacgctgttttaacatccatctgatgtaactcaagatcaaagtgagcaacaagtgccattattatcctaaaagagtctttcgatgaaactggagagaaagtctctttataatcaatgccttctttctgagtatagccttttgctacaagacgtgccttaaacctcaccacattaccattttcatccctcttg

SEQ ID NO: 238462 - DNA, 813 bp, Cannabis indica
actacttgcagatttagttaattagttttaattcataaattataattctaaaattaggctatgtcttatttgtgaatttttactaaccaagagcttagttgtgaagaaaagagattttggagtttatttattaataaagagactttgttaagtctaattaataaataagataaatgacaattttatttgatagttaattataattattaaataaatagttttgacatttataggattgaaattggaaaatatggtactattgaaagaaaaataaatagttgaaataaagtggcgaaattgtagtgagacccacattatggccgaccacttagtgtaattttttcccattattttatttttctaatccatataattaaatcctaaaccctagttgaaatactataaaagaacatgatgctctcattgtcattcaacctttcaacctacctaaatctagtttctaactttgtcaaacaactagtagatgagagactctttctatagtgattttgcaccttattcattgttcttcaccgattcgagccatagtgatagagtatcatgcccacagatagcaagtcaagtactcaatcatagtgcggaagacggtggtaaccaaacccgaaggagagaaagagattcaggctcagatcttgttattattctgcgacagaaggaaacaagggttagagatttgagcggaaagagtcatattatttcgctgccatcaatataaagttttttaaactcttatgtgattaatttcatcgtcttatagaattcatatttaaggtgtaatgaaacatacatgtt

SEQ ID NO: 238463 - DNA, 850 bp, Cannabis indica
aattaagggtgggtcctggttgtcaggcccacctatcattatgaattttttcaactgaaatttccatggacttgggaacccatgggctattcaatttcttaaggatattgttatccgaaagagacccatggctagtatatcaaaatgtgattttatactctcaatttttgtgagaagttcttttctgattctgtaagtttttatttattttttattatatatgttttatttttgtggtttttttattatatatatgttttattgttgtctgttatgttattaaacaatagtttctgtttattttaagttaccagtttcttatgtttggtttgattttttttttgtagcataagttttaattttttttatttggttattttaaaaaactagttttgatgtgttaatttttaatttggttgcttggttgctttactaactgataaatgtaaccggtttctgtaagttaattttcaacgtctaactctggtgatgactccagcgtcaaactccagtgatagcaataattctgacaactttttcggtaattttttccatcgaaaatgcaaattttggcaaattttctggcactgacaacaatttcagtgatttttttttggcaccaacaacaaatctgatgatttttttgagactagtaacaactctggtgacttctagtcgccgctgacaactccgatgatcattggtctttcatttgtttctattgttttaaaaaaaatatataaaagaaattttaatattttttatggtaatacaaagtggcatatcccatatatattaagttttttattttaaatgccataattaatggtcttttcaatattatacttaa

SEQ ID NO: 238464 - DNA, 1110 bp, Cannabis indica
tccaattcctagaaccgcaaagcctttgaacttgtttggttgtgttttcaatttttagtttttaaaattgtgtttttaaaagtgagaatagaaaataatttttttgtcattttaaaaatttaatggtgtttggtacaaatttttttaaaactatttttaaatttttttcatattaaaaaaaattaatattttaacaccataccataacatgaacctatttgggtccggatttgatttgggtctaggatccgagtatgtgagtaaaaatgtaagatataatatgttagacaaaataaaactatttttaaaaattgaaaaataacattttgatgttttcaattttctagttttttaaaactcaatttttaaaaaactgttttttaaaatttttgccaaacaactcctattagtttttaaaaattgttttctgtttttcaaaactgaaaatagtttttaagttttaaaaccaaacaaccccttcgccattaatcaaatttattttgtaaaagtagtcttggcccacaaaatttagtaggcttcagaaagagaaactattgggctttattatatggtatatttaaaaattaataggaaaaatgagtaactttaaaaggaaaaagattaaagcccttgtgctgatcaattggtcaaatttttttgacatggcacgaaactagtacgagtttgaaacactgacatgaccaagtaagacaaaataaaaattttaacacgacacaacacaatgttataaattagcatgacgtacacgatacaaaaattataaacttaaacacgatacaaaataataagtttgaaaggcatggtaaaaatgctccgaaaatgatacataaacacgaataaataagtcctaatcacaatacattaaagagtaataataataaatatatttattagttataaataaattgaaattataataaaaattaaatataatacgtaatattataaatttataattaaaattattaagaaaatgtaaaactatatatatattaatgggtgattctacaatgcacccccttaaaagggatgtattgatgcacccttaacttatttcggcattcaaaaaaaatttaatctatttttttt

SEQ ID NO: 238465 - DNA, 2330 bp, Cannabis indica
aattgttaaagattaatcaattatataggtttacaaaattactatacatatatcatattttttgggtgtaataaaatatttatatatatatagatgagaatactaatagtttaaaagaatactaatagattataaaaaattaagaatggggaggttacattatttatttcttattattcaatagaaaaaattacaaaacataagaaaatagagaaatagagaaatggaaggaaaagatgccacatcaatgctcttatgctttcctttatttagatatatagattataatagaagagaaagactgagttttctttgatgaaaaaatctgataatttgaccaaaaaaaaaaaactacataataaaatacaaagttataaatgtagatattattttgtaaggatagtaagtgatagaaacattgacattattttttttttggaagttcaaagatttcaagttggtgtgataaaaatagttgtatctattaaaaaaaaccagctacattagaattgtaaagaaaaactaagcacaatgttaaagtaaattataaattctaaagtgttgttgtaatatctaaaaaaatatactaatatttaaacagacatattttattaaatatgtaattgtatgaatattagagtaggattataatcttacttaagctaattacgaattaattagtggaatttgagtaatgaataaataaagcgtaatttataaattacggagattatatcggattatgggggtattgtagataccattttcaaaataaaatattttggagttcggcggtcgtggaaactcgcttaagtggtcaaaaatgtcacgataattaagatgatttttattggatttatactggactagtttaaaattttaagttgtcggttttgtggaatagttaaaaaatgaccaaaatgcccttaggttatgatttaagcttaagagattttgattgagggtaaaatagtcatttaccaagttttatctctttttttttgtggtttctaggctgaatgagagggttagtattattagggttatattaaaataatagtagtaattgaagattaatctaaagacagaaaaaaaatcacataacacttgtttctctctctccttcccttcgagccctagaaaccagctaaagaactagggatttttcatctcaattcaagtttttgctagctagattaaccaagtttagagattgttcaagcattgaggtaactcttcactaaatctatttgatttcttaggttttatgttaagttttgattgggtttttatatgaattcgggttgtgggtgatgtttgagttcaaagtatatttataggtttaatttaaggttgtttaagtatatttgtaatattgttgtgagctgttaggtttgaatttgaaagaatgaactcaaggttcactcaagcatggtgattttgttatcttgatgtattattgcgttttgaaggcttgaatatgttattggtatgttctggaaggtttcattaggatcggaggagatttggttcgattttggagcaaaaactagagtttcctgtttctgcagcagggaaaccggtttcacaggtacagtgaaaccggtcaatcggttttgccagtagaggaagccctagttttaggcttcgaaaccggttttgtttggggtgtttcccagaacttagaatagggtattttaatgatgtttgagttattttgaaccagggggagttagatatatccggttacaaagttagggttattctagagttttgaataagttgttcattgagctttgttgtcgtgacataggatcccggatcgtcgagcgtagttccactccgcgcacctgactattggactgaggtaagaaaagctttatgcactgctaagcatattggtaagaaacgattattatcgtttgtgactcgattatgatcaagtaatgatgaggaacgattattatcgtttgtgacttgattataatcgaggtaatgatgtggaacgattattatcgtttgtgactcgattatctatttttctcaaccattatctacactagttagatttttgtcatttttctcatccatttatctatttttcacaaataccactttttccactttcaaccctataaatgccaaaactatttatttaataattaaaataattatcaaataaaattatcatttataatatttattaattagactccataaagtctcttaattaataaattaaccctagattcctatttcttcacaatcaagccatatcaattcataaactaggcatagtccaattttaaaattataattgattaactaaa

SEQ ID NO: 238466 - DNA, 984 bp, Cannabis indica
tggtgatttctagggaggcaagcatcatattgaccaggacttgctccaacttctatacaaagatcacccctacctccgctctaatccatcctcgtctagtgacgatcttttgaattctagttttgaagattgggaagtgagcagtgaacatacaccttccccggagctcgaggtgcaacatcacttgtatcccgaccaaatacatggcgaagaatacgaccgtttcatctgagaactaatgaaaggttggaggcactatcttcctgtgaactagacgtacagggtccatccgagcatggtcgacacactgctcgagggctatccaatcccaactactgaaggaaactttatttttgagtttgttgtaactgttgcaaagcatacctctaaaagatctccgcccagtcataaaatgatagcacagaccaagcaggctgtcagaaagccttcattttctgaccctcatattgctcgactggctaccgtggcaagggcagaacaggcctgacctgaggtcaaggaggaggagattgcaggagatgttgaagttcaggagatggaggaccagggcgaggtccgtcctgcaactactgctgaggctgaatgcaaagaggaagagggagtagttcgggtgctgccatctggtggtttcaacgagacgggggaacctgtctctcatatgggtgaagtcttagaagttggttgggactatgttgaggaggaatatactgaggctcatcccataaacagaaggggtcctaagggagctcgatggttttctccaccattcgttttgaataccaatctcttttaggatagtctcctagggcaggtcgaatgcttccttccctctcctaggcagctatcaacggaccttggacagggttattgtgcctggttgggtcctcatgccacatagggtgcaatgctgcctttgcattcgtattttaaggagatagctaattaatacaatatcagtctgat

SEQ ID NO: 238467 - DNA, 959 bp, Cannabis indica
aaatatttatgtgtttttatttcacaaatatgtgcagtgtcctcaacaaatatcggattttgagtgtggatattatctaatgagatacatgcgtgaattttgcatgaattctagacctatcaattggctaaccactcaggtaagtaatatatatttggggtatatacacactataataaaatatttttctatcctattataaatattactatataaactaatgcttacctttactcattgcagtggaatgggaaaaaaacttatacaaaacaagaaattgataaaattcgtttggaatgggctaaccaatttttagaagaaattacagaagatggagtgctttaattgagtgatcacaatgaaagaaactttgttattgtgttatgaaaacttttcatttttgaaagttgttctagaagcatttgtgcttgtacttttttttatattattattatgatacattttttatagtcaattattaatttgttttaaggtagtaagtgctctttttttccctaagatgcttttatctatgttggtttctttgatatttttactgaggcttattataagagggtccatctagtatctttgtttcaacaaagttatatatatcctatatgacttatgtagttgtttattacattatttttctttcaagtttttatggcgtttattatttttataaatttagtttatcttgttcatttattataaatttaattatctttttttttacctttctttaatattagaacaaaatataatttatatacatattgtttcttaagaaaatatagattaattttttttatttggagcacaagtacagatttaattatgtttttatgtttactattcttacatatatattatattatattatattctacatttattaattagtaatacacaaaacacttcaactagaaatattttatttgctagtgtaaaaatat

SEQ ID NO: 238468 - DNA, 1273 bp, Cannabis indica
attttttatcatataatatactatttaataattttatttaatgtcacattaatttaaagttaatatttaattcaaatggtaataaataatattatatatttttttatcattttatttataaatattttttgaatttataaatattgagaggtcatcaaattagtattatcaagccgaatggaatgaaaaacaatctataggtgcatcttttgtcttcatatatacactacaacacaaaaaataaagtcaatctttatttctatatattaatatgaaagaaagcacacaagagtgtaggtggctttctataatttttcttcatatttttctaattttttgagagtaccgtgttaatgtactaagaaaacatgattattcaatatactttttgtaataatcccacattatttagaaagtatagtgcaacattacataaacactataaataaattttttctcatgtcattttaatttatcccaaaatatgtatttgaacttgagacacatttttctttttcagtgtaagtgtagtatcactaacctatgtctatgaccactgtaaaatgataattttagactttatgttttgcaacatgaaatataataacaagctcaatattagtgaaaacaattacaattaagatagattagaaatcggataacaattgttaatgaaggttaggaagaaaaagctttaagattagagtaaaaatattttattacaattagactaactgtatcattatattttattttgtaaatattgagaaatatggcttcttagtaactcttttttctttttaattaaaatcccacctaaattaaaaaatacataattagtacacttttaaattataaataaagtattcttacattcattttaatttgtctaaatatacatggttgatttatcacttgatattgcccaattagatataatcttttttttattattattttgagttctcaaatcaactctatatatttatctaatatatttatgtactcatttaataaaaaaatacttaatatatggatttctaaaataaaaaaatacaaaaaataatcataaaaatttattttcaatgattataatgattgtacgagggacgatataattataacgatcacgcgattgcacaatcaactccatacaatattatcattttaattattacaaaacataagacaaataaatattttttatatagaagcaattagtcatatgaaccgtgacctctctttttaatcatttatattttaaaggcatata

SEQ ID NO: 238469 - DNA, 1268 bp, Cannabis indica
aatatatatacaatgacaataaatttatatacaaccattgtatataataaaatagaaactaattaaatattatttaaaataattaatatatcatacaattaaaatatataaaaataataattaaatatatgtagcatgacaataaaattatatacatacagtagaatatttatattatactaacaaaatcatgaaccactattatacatagcaaaataaaaaataaatatcatctaagaataataatgtaccatacaacaaaacagaaatatattgtacaacaaaatttaataccaacaatccacaacaatccataaaatattaaaaaaatcgacatcacttaaaaaaaatatcttaacaaaatttatataaatataccataatttttaagtaatttgcttctaattctaaaaaaaaatatgaaagaaaaattattaatatattttatatcgcaaaagacaatataaataataaatagcgtaaaaggttcatttgtcaacaagttttgaaataaggacatttacttacataatgctataattgggagtcatttgctctaatttctctataaagtactttaatagacaacccaataattacaatttgagaaaagtataaacaattcacattattagggtttttagacaaattatcatattttttttttcttaaaattttacatttgaattgtagtaaaagattttttactatagtataatgtaaaatttatacattaaaactatctctctctttcatcttttttttctttcttttctctctttttttctatcctttttttttttctcacacttctatataaaataaaatatgattatgtaacagaattattaatttaacactattttttttttattgtattaaatttaacaatgttaactctaatgtttgtttttcaaagaatataagttaaactcttaaaatataaattaaacctcttaaaatccaatcctaactcttctgccatcacacagtagagacgattggaatgcgacacaaccccctaactcctctacacccaagtatggctactctctcaacctgctcagtaggattatgtatactctgggtgtgaagaattaaagagagaagaaaaagggagagaaaacaaagtatgtttatcatggaagaatttggagaaaactttatcaattgtattagagaagcaatcgtttatatatacagattttacaggcaaaacgaacttcacagaaaagtaacagaaattgaaaaaaaaacaaactgaaact

SEQ ID NO: 238470 - DNA, 1473 bp, Cannabis indica
attttactttcattttgtgattagaaagttagaatataaaagtgttatcaaacgatacctaactaatttgtttttggtattgttttttgtttgtcaggtggttaggcccagcacgattcatgaacacaaattgttcctgtcaggcctatgttctcgtcgtgttttaatgggctgacccgtttttgttgaatttacttgctcattttttgttatatagttcgacaagtttttttaaatggcccgaccgatttttgtttagtttgttttcttattagtttttttttacacatgccatatgataaagttggtactttttttcttatttttcaaatcaaattgaagcataagtaataacattggtgtaattttatattttagaataatttaaattttatttaaagagtatttatataatttttaaataattcagttgaaaaaatatatatgaattacgaaataaattttttatatttagtttgtacttttattatgtgcttacctttacttttgtgctaatatattcgtattttcaattcaaatgctccaacaactaaccttaatattcagattgaaaaaaggaatatgattgataattgaaaataaataattaaaaatcaccatacatgcacgaatcaatccaaataatttcacaaaccaattatcaataagcttgcatcatttaaccttctccactaatttcaataacatgcacaaaatgttttctcagcgatgctagatggccctccgaaagagtattagggacgtctgtgcagaccttgtatgtccacgaggctagaagattctgcctctagtctttatttagctcccaaataaatctaatgtacccctctctattgatctggatgaggtagtggtgatgttgtacggtagattttggagatccactggaaacctctcacttaaaaaagctaaaagaagatgaattttcacttgaagacgatggtgactttgcttggagtctaagttgatcttcaaagagtcttgggagggcacgtgggattaggtacgtgtcacccatccgagcaacctaaagacaagaagtccacacacgaaaaactattcccacgcagacttaaggaaaatgttatcccaatttctgcacagggtgacatggcattcaatagggtgacatgtcaaaaacgtatgaagaccgagacaacctatacttgctcgatgtttcatccagaaggaatcaagctcaaaatggttgtttaagtcttcaacatgcaatatccgaacaggttctgaatctcataatgttctgagcaaaacacatatatccagcgaagcattatcccccgcgtagaaggacgcaataattatagaatctctaagatattttcttcaaatatctctacaattgtagcataattaaatccctatatttatgtgactgattgaggtcatccgagagatttgagagaattaatacttagtttcctgtttcttttc

SEQ ID NO: 238471 - DNA, 838 bp, Cannabis indica
taatgagttaatcattaaattatatgcattttttataattttaattagttttatatcattttttaacaattatttacaaataatcatataaattagaatgactaaaatttaaatatttatcggtaaatacatatattattattattattattaaattataatgttgtgctttcgggttactatatttatgcttatgtgtttcgggttgtcacgttgtgttgtgcttaaatttatattttttgtgtcagatcgtactcgtttctcctgggctcatcatgcgagtttcgtaccgtgttaaaaggctcggctcgtatttaaagctctatattatacacattaaagtggtaccgtcattagtttctactaacaatactcttatattgctaattattagtatatacaaactgatgagaagaagaacaatatattttggaatggaagacagaatgactttattattaattattacaacaaaatatttaagcctactcctgtggactacagagagtcataaatggccaaaattaccaattacaccaacacgtactctattttccatatcatataagtccacaaggaccacaactactattactaatttgaaaattatatataccaattaattaattaatatataatcatatcaaacaatgtatatggaatattaatatatatatatatatatatatatatataaattccatgaggattgatttctataattaatatggtaatcgatagacacctttttttttctcctgaagatttcatggaactactaaataaaatgaaataccactgtgatcttcaccacatgcaaaaaattaaaaaaaaaaaa

SEQ ID NO: 238472 - DNA, 837 bp, Cannabis indica
atattaggatgttaatgaaacgtacttgttagtaaatctagatcctggtaaaatatatccaacaacattgtggtattttgttggtgttaggacctcgaaagaatccacgaccaccagccttggatccctaaggtggtttgtacgcaccatttcttgaattcccaatggccatgttagcttgcatctgcatagtcagatctgtcaaggcactgtgatgttcaagacggctttcatgggagagcaagagagcttgaacctccttaagactcaatagatcgcttcttgcattaattcttgacacaaccgaatcaaattctagtccaagaccattgagaagctgaagaatgatatcttgttcaagaattggagacccaactgctgcaagagaatcagtaatggattgaactttatcgacgaagtcagagatcgacaagctgcctttacgaattgtggagaattaactctttaactggaggagccttgccttagattggctggcaaacttgtgtgcaagagctctccagacaataacaaaggtttggaagtttgcaacagaggcaagaattcgttcattcatggaagaacgaagccatgagagaagtaattggtcttttcatttccattgagcaaagacaggatttggtgcaccagtaaccaaatttgcagatggtggattcccattgaaggagaaggatcaatggcaatctgataccatataaaattcatagatgaattttgagagagaaagaaagagagagacgaagatgaaaagcttcatttacaacagaacaaaaatatcgagtatttatagacaacagagtactctttttacagcaa

SEQ ID NO: 238473 - DNA, 1192 bp, Cannabis indica
ctccctaagtcgccgacgacatcaagcaacatcttcttctagcagacaatccgaatatagcaacatcttcttctagcaacatcttcacaccaacgacggaagcgcacaactcctccctccccaaagacaacacagctcctccctctccaacgaagacacatcttcttcctcgcaaacggcagcaagcaactcaggtctcttaagtttctcttcttttttattttttattgttaagcccaaaataataacaaaggaatatatagataatttagctctgtgaagaagcaaaagataatttgttacttgggttttgttttttgagttgttgtagtttgtattattaattagttaatgttattgtaattttctacactcggatcactgcttagaaaaactatgggataatcctattcattctagttatggtgatcatgtgattatatgagcaagtgaggagtcactatgagtgaaattttcttgatttgtaataatttgttgctcttgtttgtaatgtttttctttctataatactctgctatacttgattgaaatatggtatagagaaatcactgcaaaatgcaggagagattattagagagagaattggcttgtagtgtataattgtactgtggttgggaatggtagctaaaaaaaggagatgatatggggttgggaacttgggagagttgggaccccgaaacactccaaactataacagatagttttcctgtatcgaattcaatctattatgttagtggagaaaactttgctgtaccccatttgttaatttataacaatgagataattaatgtatacttatgtatgatgtataggatagtactatagagcctttacaaccagttctccaattgactagctccaggcataggggtgtggggagaacatgatcatgtaaattgatttatatatcttctaaaagttgttggccttttattttatagatttgaacttacttggataatatttcttagtttgtttctaggtactaggtctccactacactcgcaattgaatggggaaatttgaggttacactaccaaaatttagacttgttttctttaacattatttagcagaatttttatttttaatttggaaaagtatactttttcttgcattttagtaccctaaattttttcctatttttttttaataatgtgaattatatcaat

SEQ ID NO: 238474 - DNA, 900 bp, Cannabis indica
gtgagctaaaagctcagtaaggaaatgcttatcaaacaataccatataatatcacacataccattaatgtatttattaagttttagcaatatcatacatgctcttttataactataaccaaataactgtacatatggaaacctttatcatacaagtctatactatttgttcacaccgtacacatatacagagatcataactccaatatcatactcataacataatcatatcaatactataaataataataacattatcacaacattggcatatcatagccattacttacataacccgggcctagcctgaccctacaatatcctgggcctaatctgcccatataataacatgggcctatgcagccctaccattgttataggatagggtatctctatattcaacagtaacatcactgtatcatacccaccataacaatctcatacacgactcagtaaaatgcagggtagggtatctctacattcaacggccttaccctgtatcataccccaccataacaatctcatacacgacttaaaaaaatacagggtagggtatctctacattcaaccgtcttaccccgtatctacgtatcataccccaccatagtccctcactttacctgagacgttagcatacagcatacaacataaaacatgcaacatacaaatacatcatacaacatatacaagtcataacaaccgtaatatatatcaattcacataattcatattgtctccaaaatcatacactctcagtatcatatacacattcataataataaagcataaattataatctaatacacaaagcattttaattcatacatataaacacattcaaaactactttgaaaaaccgtgtttttacaaatgtcagttgtatataagaaaatataaaaac

SEQ ID NO: 238475 - DNA, 1446 bp, Cannabis indica
aagaaagtttctgatgttgtggctcggtaacagaaagagattgataaattaaaagccaaatcaaatcccttaaacagaagaaaaacactgcccaacaaaaggaagaaggaaaggtggttgatcaggcgtatgttccacaacaatacgctcgtgaggatgagggtcgaccaaatatttatgttgaggagtttgtttccctcaacgagctacctctcatatacaattttgatgaccagagggtccttgatcagcaagtatatctctactctgacaatctcgacaatgttgtggcccgaacgtatctgtacgagcataagggtccaatcaaagttcactgtaaaaactacgatgattcaaatgcccgtagtcctgattttgaaaatgctaggaagaggatgctgatattccaatctaaattacaataatacattgtcacgtcattaaaaaaaatccttaaactctaaaataatatgcctgaaacgaaattatcccaaattctatttctttttttttttattaattttcctgggtttttcaaaagtaactatttaattacttatgatgctgataaataactaattagttacttttacataaaaaaaaacttcttttaaaattatataatttaagatgcaattttgttacttctaaaatcttatttgttaaaatcttaataatcaattgctatttttaagttatcatgatatcttattatttaaaatacatttgggtaaccttaaattttattttcaaaactaatgagtttgtcatataatataataaactactatttttatttacaaattattttatataccttattgttactttgaaacttatgtgtttatttttagattatattaaattaatttgttattttaaatacttttacgttactttatattttacttttgtaaaagtatttatgttacttaatctatttaataaactaataaaatacaacaaaattcaaaaataaaaacttacataacttattagtaaaattggtaaacatttatattgctaattatttattttaaagttatacattttaagtttacagtagaaactaattagttttcatattttataagaaataagcataggtatgaaataattttatttagtatattttatagtaatatttaaattaattattatatcgataatatactaattggttacttttcacaaaatgatcaacttcaaataaaaatctctcctgcagataatcttcaatttttagatagttatttaaaaattatatattcatttttaacttaagtgagcaacgatatggtcagaaagtagttgtaaaaatctggttactttttagttaactaaatgaaaaaagaaactacggtttaatgtggtcattttgacatgtaagaaaatatgtattttctcatcgtcaccataattaaaagtaactatttagttgcttat

SEQ ID NO: 238476 - DNA, 1055 bp, Cannabis indica
tattgatgtaattaagtatcggggctcatataacttatgaaaataacttttaggcaatatcgcttatgtgctgggcactactggtgctcaatagcaatatactcataatattaatatatagtacacacatctccatacaaaaataattattaaaatccaaaacaattaataaaatatatttagagtatctattgtagcgtattttgttcttttattttttttaaaaacttttctagagaaattattgtgagtgctcttagtatttgattaccaatatttgtcttcttcttctttatttttttggaaaaggcttgaataactattattatagggcatggcatatgtgttcatgacaacaacataagaatattattttataagttggatacccatactaacaataatgagttttaataatatattactattttctgtgagtatttttttttggggaattatattatcctaataaaatataaagtggctttgagtatttttgttctttttctgatacataatattgtatggcattacactactttaatacaagtcggcaattgcatagaaaaggtttttatgaaaagtacaaataatgcattttcttctgtctcataaactaggtttttttatggactcaaaaactaggttaatcattatgaaagtaaagaaagttctgtcaattgagataataattgtataacacattttcaatttcaaattgatggagccctagtctagatatggaccaagtatttgtaattttgttaggaatctaagttgataatgtaacgtctccgtttcaagtttttattggacagttacactttacacacgttttttgagaaaacttctcaggaggtcacccatcttgaaattactacaagtcaagtacgcttaactgtagagtattttttcgtgatgggctactaaaaacaagatgcactttgagataggtattactaatcaatccatttaagcactctttaactgtgtagtctcatacctacacaatttcagaatcatgtcacttgaccttcctcaagtaatgtttgcac

SEQ ID NO: 238477 - DNA, 743 bp, Cannabis indica
atacataccattctagttgttcctaaataaatgacttcattaagatcaccatttagaaaactgatcttgacgtccatttgccatttctcatagtcataagtggtagctatggaaagaagaaggcggatacatttaagcattgtcattggagataaggtttcatcatagttgacgccttctccctgtgtgaagccattagctacaagcctagctttaaaggtctaaccttcccttcagcgtttctcttcttcttgaaaatctatttacgccttatggatgtaatatcttaaggtggagtttcatattcaagactttattggtgcatgctattaatgataaatcttgtagtgctttcaaaaaaaactttgaaccgtcaaatcggtcaaacaactaatttatcatcaattaggatactttttcttaatttgtaaattgatgattcaatttctaataaccgacatgaagtcagaaaatgatccatcaactttcttggcaaacaaatggagtttcccacgaagaagtgctatattcccgatgtaacatttttccaataactcccttatatactatgtatcaaattagcgaactatgttgttatcgttcagtaaggcacaatataaataggtcaagcttcaagaattaaatcaatgcaaaactcaatctccttatccggtggtaaccttggtaaatcctttgcaaacacatttggaaagccactgatatccaagggaactggtctaaat

SEQ ID NO: 238478 - DNA, 696 bp, Cannabis indica
tatggactgaagcaagcttcaaaacagtgtggtttgctaagttctctagtgttctaaccaatgaaggattccatcattctgctacaaatcattcccttttcatcaaactttttgatggcgatttcatctttctattagtgtatgtggatgatgtcataatagctagcaataacttggaagaacttgaagccttgaaaaagagattgaatgacagattcaagttgaaagacctaggaaagcttaagtattttttgggcttagaagttgctagatcagacaagggaatttttgtctctcaaagaccttacgcattgcaactacttgaagaccttggattcctaggcagctaacctatgagcacaccaatgaatggtaatctgaaacttggacaagatgaaaaagagaaattggctaaccctactttatacagaagtattgttgggaaattgtagtacttaacaattactagaccttacctttcctactctattaacaaactaagccaattcttgtcaacacctctggtatctaattgttgctcagagggtgcttcaatatgttaaaataatccaggacaaggattgttctttgacagctgtctacagtaggtcaaagaatacatagcctactcaaactctaattaagcagcttgtccaggtacaagaaggtcaactacatggttttgtatcttcatta

SEQ ID NO: 238479 - DNA, 1501 bp, Cannabis indica
agtagtcctacgtgtcaccccactgataccaaatcccagcgaatcaagagtttgccactgtgtcagacttgggaaaggtgcacaacaaaaaagaaacccacctttcatataacgtccactactttgacatttactgtacacgatcggtggcacatgaccgccagccaacatcagactgtacagacaacaaaaaaccctccaatttgggcatcacctactcgacccaatgtcaatattatacattataatgtattttaccctaatagtgagtttatttcacattcaaatcctagcgggtgtgaattcacctaagaacccctccaacctataaatagggttttcaccctttgtgcaaagtgttatgaaattttgccacacactctgcttagaattttggcaagaacatttgtgtaaaataatccatagccaaagagctcaataatattgacttgtcgattaagctcattaacgccccaaccacgtaaacatatttatcttctttaccttttaattatatatatttatcatttgaaattccaatacaataagatatatattttcattttttatttgttgggttgaagaaatttaaaaaaaaattctaatataatttggatagattaggctacaagcattgaaaagaattcaaagagaattaatgcaagctcttagactaaatcaaaaagggaaaaaaaatgtaaaaaatgtatacaatatgaggattaaaattaatcaatcataattaaagttgtatatttatattaaaatgcttttgttacggcacccatatctctattatacatcataacctcttattttttttttggtctatttatctatttaggttaatatttttcaacctatttgtgcccttctaccggaaaagtcaaatgtaaagctaatattaatttttatttttattctttttaaaaaataaaaataaaatgcatacttttcaccttctattactatttacccttattagttttttttttttatatggctatttactcattaaatagtaatatttatttaccatgcatatgcatgaacctcaataaaatagttactatgaatatagatcaataaaattcaattttattattttcctatatttggccaattttgtatggtcacccattaaatttttaagctcaattaaataccaaacaacccttcattatctccacatatagtaatttatttaatgaatatttatttaaaatttaatatctccacatatagtatttatttatgggacaaaattaaattgttgtattttaagcattaattattcaaaaatacatttccaccattcaaaaaagataatttttttaacaaaaatacaaatgaaataaataaataataaatataaccttcttcccctatgtttgttccttattaatatgcatggtgttatttgtttttgtttaagctttttttctttgttaatgtcactcttttctctatcacacattgttgggtgagttttttttttttt

SEQ ID NO: 238480 - DNA, 885 bp, Cannabis indica
ggtcgtgagattctgatcaaggcaattctacaggcagttccaaactatttaatgagtatcttccagctacctgtggctacttgtgatcagcttcggtccattattttacagttctggtggggtactaagaatgataaacggaagattgcgtgggtgaaatgggagaatgtttgccaacctaagtcaaaggggggtttaggattcaaggatcttcggctttttaatcaggctatggttgctaaacaagtttggcgcctacttcactctccaaattccttggctggccgtgtattgaaatgtaagtactttcccactacttcaattttggaagctaaagatcgccaaggatcgtctcatctatggtcaagtttgatgtggggtttggagttgttgcaatcggggttgaggaaagtggtgggggacggtcagagtgttaatgcttttagggatccttggcttcctcggcctaggacgtttcggcctatctcgctggctcctggtggtacagtgatggtcagtgatttgattggtgggcagggttcctgggatgttggctctttgtctcgatattttatgcaggctgatattgatatcattcttggtataccgttgcggtatgggccttgtgcggatcgttggtgttggcattacacttcgaatgggtgctactctgtgaaaagtggctatgcagttgctcttgatatggttagtgaatcgaatggtagctcttctggtgaccaagcccattggtggaatgggttgtggaatttgcgggtgccgcaaaagatcaaaatatttgtgtggcgaatgtatttccgggctctcccgactaattcccaacttatcaagcggaagatccctcttcagccgctatgtcacagatgt

SEQ ID NO: 238481 - DNA, 1656 bp, Cannabis indica
ttagagttatccataattatacaaagaatagaaacatacatttaaagctcaaaattcaccatacaaacaccataaattcaaatttggtcaacattcaaagtaaagctccatacttgagcaaaattccttttcaagagcttgaagaaccaagagtaatgaaactcaaaatcactcacttgcacataccctaaaattagaatctaaactcaaattttaatctcaatataactccaaaaatgcctccttagtcactaggaacaatttccacacatttacaacacatacatgccaaaataacaagattattcccaagtttcatcacacatgcatggatggacataatcacacaataaacatatctttcaatctcatttcaacaacatgaaattcagaataaaatagttaagatggctacttcaaactcaaaccaaagccaagctcaaagatcactaaaatcaagcttgatccaagcaagctctcacaaattcaacaatgtttagaaatggattgagagaaatagagggggtcggtttgagagagagaaaaccaaaatataaatccatttctcaaccaaaaatccattttgtttaaacataatccaaattgtaaaattacatgaatgctcccatggccatacttacacataacacccatacaaaggaatatagtcatttcatcacatcacacattctcataaatttcaaattaatcacatataaataaaataccaataaatcatcccaaaattatatttcggccccgaatccggttcggtccgaaatacccggttgtgactataccgcaccgacttgtcagaacaaaaaaaaaagatcaaacaggcatactatataataatatagttcataagcacgtaattaaatttaatctacaattttacccttctcgtgttaaaattactaaaatgcctctagctcaccaacgggatcttaacatgtcataaattatattaattcacatataataaattacataataatataattctataataatacacaattaactagttagggtttgctaatccatttcttaatcttagggtattacaatagttgtcatgatattatttttctagttattttttagggtaaatactattttggaccatatgttttataaaagttaccaattagaccctctcatttgttaaatgataaaatagaccctatcttttccaaaattgtacaaagaggaccctgagctcaattttcaataattttattttttaatataaccaactttaagacaattttaacatgaacagatacagaaaatgtaaccagttttgtcataacatctctagatcaaattattattaagtttcattttgataaaaaattagttcagggtcctatttgtataatttcaaaacatacagggtccattttgttattttaacaaaacagagggtccaattgataacttttacaaaacacaggttccaaaatggtatttaccctatttttttttaattattttatagataatttatagttgtcgtaaagttgatttctcgttgttttttagttattttcttcttttttgctgagcaaagtgtatttttgtaattttaaaatatcataagaatatttttataaattaaaactttaggctgtaaaattgtaaataaaatat

SEQ ID NO: 238482 - DNA, 739 bp, Cannabis indica
acattaataatgtgtgaaaattaaataccatatataagatgcataggctactcattattaattggttttgagatgaaatctcatgcatcttatcctacacactctattctaactttctcaaccatacgatcctaaattcaaatatatggtatcttagctaaaattaaactctaacgagtatccaatccaaatctaaaaatcgatccaaaaatacgagccaaaaagagatgcttgtgattcaggcttagtgagccaaaagagccgttgttagctaaaaaagccacttgtgatcgagacgtgcaagattggtgacttaaaattagccaccatcttgaggagagatattggagagtctcacataaatcactacaagaaatgtcattttttctaacacatttttgtattggaaaaagtttggtattgcaatagtaaaatagaatttacttctgatgtgttggcaaaaggggttggcaaattaacgttggtattagaacttttgccagcacaaaataaaaagcgctggcaaaaatgacttttcccagcgcgtaaatacactaataaaagttagattttagccattgcaaatgtgcgctggtaaaacttttttttatttgacttttttaccagcacagttacttttaccagcgcagtagcgaactgttttggtaaaagtgacacttcttgtagtgaataatatgtatagaaactaaataccgtaagatgcatgaaactcctctca

SEQ ID NO: 238483 - DNA, 1192 bp, Cannabis indica
tttctaattctgatgcttcatcttataaccggcctgttagaactacttataagccttcatatttgcaagattatcactgttttcttgctaaaactaactcctctgttgtgtctcaaaatccttcattagttaccccttactctatttctcaagtgcttgattatagcaggttggcaccacacttttgagaaactattttccatttccagccactttgaacctgagttttttagtcaagcttgaagcattaaagattaggatgatgccatggacattgagattgatgctcttgagaaaaatcatacatggatagttgttactctccctgcaaagcatcatgcaataggttgtagatgggtctataagactaagtacaatgatggtggttcagtggagagatttaaagccagacttgtggctaagggttacaatcaacaacatggcatagattacactgacacctttgctcttgtgacaaaattggtaacagttaagcttggtttagctcttgcagcattccatggttggtatcttcaccaactcgatatgaataatgatcttttgcttggagatttacatgaagaagtttatgtgacccttcctctagggtatactcccaagggtgaacttctcccaaatgcagtgtgtaagcttcaaacatctttatatgatttgaaacaagcattaaggcaatggttccaaaaattttccaatgccttgattacagaaggcttccatcgcaacaatttagttgctttgaaggctctcaaagtcaagttgaacagtaagtttcaacgcaaggatctaggcaatctcaaatatttccttggattgtaagtagccatgtttatcaaagggatcttcatctcacaaagaccttatgccttacaattgcttgatgatcttggtcatctaggatgcaaacctgtcaccactcccactcaaggcaatttgaagttgaatcaagctgaaaggataaactgatagattccaagttgtatagaagaattgttggtaagcttcggtatcttatcattactaggcaagatattttaagtcagtatttagctcttcctaagtcctatcatatgaaggctgagttttgtaatatattaagaactgtcttggaccggggttgttctcccttattacactagccatttaacttaactgatgctaatttctattctta

SEQ ID NO: 238484 - DNA, 3787 bp, Cannabis indica
aaattacagtattactaacataaaacacttatgttgttgaaaaattattaaatttatgtcaattaaaaacttattacttaattacttatgacacaattattactattgattgtgtgaaattacaattatgaaccaataaacgacagtgaaatttaagtctataaacgacatagaaaatacaaaaacgacatcaaaataaatatgttaaaataaattgacagctgtgggatttgaacccacgccctttcggaccagagcctaaatctggcgccttagaccactcggccaaactgtctgtcttttattctttgttagttacatatttaatatataattaaaataactacaaattagagacaaaagtcaaacaattatatttacaatttacttgaagattatcaagtaattttgactttttaaaatttacttactaaatccagaggtggtcggcggcgaaccctgatcggagtaaaataaggtagcggcggcaaatgggtttagagagaaaccttgggaaattggctacaacaatcgaaaaatcctctcttttctgttaattgtttgaatcgagactcaacacattatggacagcactgctcgcagaagattggattgtatttctcatcaccttttactgccgtatcaacgcactcattttcttcaaccagtgagtttattgtaacttctttttgttttgtttcttacaattaggttggtgatttcctgtgtttgattattattattattattgttatgtaatgtgagaaaggggttagtcagtaatgggcaattggaaagtgaagtgtttgagcctgtgatcattggtggtatggttttggacattcatgccactccttcaactcctgcaactccaaggaccactactcctggaatggtatacaattactcttttaatttctacttcaatcgctcgtttgataatgtatgtatgtatgtattttcattccagtcctttttaatggctatgaaaaatgcattattttcatgttgttgtaatgcccatttggataatggctgccatttcattgtggcttaaactttgttttaatggactggatttgcaatttctattagaggcatttttcagatagaataaatagggttttctataaccgttagtgaattatgagacttctgttaaatattctccatcatattttgcccctcaaatttttcgagtgtcaaatcttatcccttttgttatagcaaataaaagttccgggggcaaaatatggtagtgattatacttccggagatgaaattgttaaacattcaaagctgagggggaatatttaacatcgctaataatttggggggtacaaacttattaaggacgaagtttagaggggaaaaatacctatatattctttcagataataggttcttgttacaatatatgggaattttagaattctttcctttgggatctttttactctcagataaactatgtattgggtggtgtagcaagaaatgttgcagagtgcatgtcaaagcttgcaacaaaaccttttatgattaatgtcttgggtcttgacatggcaggtactttgctaccattgtttattattgtaatttataggcttagtgcaggccatatttatgttgtttctcaaagaagagtgaaatgcttaaattcttatttttcatcatgaccaattcagttgtagagattttatacacataagtttattcatgccattttatctgctgattaaaattcagactagtatttgtgacactgaatatgtatattttcttggcctaggaaatatgttgctgggtcactggaaatctgctgagctatcaaccaaaggtaaccccaaatatgcttagtccattgagacttttgatttggtctcattttaattccatgttgcctatattagtttctctctttcatcaaaatttggtgttttatctctaaaaggtttgggccaatgtaatttccaactatttatttggaataatggtttttgagtaggaattctgaggcaggatgttatcaagactgctgttgtaagaaacatatttgatgttaccggagagggggcggctggtgttgcaagcgtggaagctattgtaagtacttaaacacgaaggattaaattttggcagcataaaattagcactcccaaaacttgatctttgtattatttaatgtagttatttccattgagttaagctgattttatggtgcatggtgtaggaaaagtatcttacaccagattggatccagaaattcaagcacaatattcattctgctcctgttatgatggttgatgcgaatctgaatctttcagctctagaattttcttgccaaagtactttgcataaactcttgttctttatccaatttcctttgttctcttctgttaatatatagttaatatgggttcctttcactttctcagtagctgcatcatcgaatactccagtgtggtttgagcctgtatcagttgcaaaatctcgaagaattgtgtcggttgccaagtatgtgagtgttgcaccactttcccattatatcaagatcatcatatgctctattttatggattttcttttataacaattgactagtcttatggtggatttcttcaggtaacttttgtttcgccaaatgaatatgaaattatttccatggctaatgctttaactggtggaagcgagttttctttctcttcatttgaaagtgacaacatagaatctttgctccaaaggctaaaacccacgatacgagtactgctgaaaaatggtatcaaatttgttgttgttacgcttggctcgaagggaatgttattatgctctaatggagagccaagatttacgagcgttgatcatgaagggtacaaacaagatgttactagaagaaatttatataagactgtcgcttcagcctgtcctcgtaaacttttctctgactgtactaaatcagagactcttctatttgctatccatcttcctgttcttcctgcatcagttgtgaggcttaccggggctggtgattgcttggttggcgggacactttcttccatttgtgctggtttggatgtgatacaaagcttggcagtcggcattgcagcttcaaaaactgctgttgaagctgaggctaacgtccccaatgttcttgatttggcctcaattgcaggtataacaagcatttgtgtcgaactcgtttttgcttaacgaatgactgaattatgttctttttatatttcatattaagggttaattgcggcataactacctaaagttttgagtatgtaaacgacatatatttaatgattttattatggcataagtactcaatgttagtgaaaactgtaatttttttttcatttgaatttattaaaaaaatgtttagaaataattgatactacatgtttctattcagacctataaatgatttaaaatgtgggccttataatgaagtctgtactgataaaactagataaaaattacaattttacaaacattagtacttatgttggtaaaaaatcattgagattatgccacttaaaaactcaaaactttaaatacttatgacactattgtaccctcatattaataagactgggtgtgtgtttatctcggaaaaacacctagaaacaagataacaacctgtaatcaacactggtttttctataaactttgcttatgcttatgcaaattatatttttttaaaaaaatgcagaggatgcaaggttggtttactctgcagccaaagttgtgtgcatggaaacaatggtctgaaatcaattttttttt

SEQ ID NO: 238485 - DNA, 849 bp, Cannabis indica
gagagcttgatgcaatttttgttaacctgttctcaaactatatggcagtcaatatcaacatgtttagtacgctcgtggaagaccgcattctcagagatatgtattgcagtttgactatcacaatgaatggttgtcggttgagatgaggagatgccaaagtcagtcaaaatgttgtggagccaaagtatctcacaagttgtgttggcaagagagcagtattcagcttcggcagatgacttggagacaatagattgcttctttaatttccaggagataagagactggcctaaaaagatgcaagagccagtgatggaacgtcgtgtatcagggcaggtgccccaatctgcattagagaaagcttgaagttggaggagtcgatctacaggaagctgtgagaggttgtgaatgaaacatgagtccttagccaggagttcctttgagatattagacaattcgataagcagccttaaggtgtggttgtcgaggaccactaatgtattggctgagtctattaccagcatatgcgatattaggtcgtgtgattgtaagaaataagagcttgccaatgacgctgcgatgagaggtggcatcactgacaggagggccaacatctttactgagtgaaagattggcatccataggggtggagacagcctttgaaccaaggagacctgtttcatttaaaatatgtattgtaaagagtctctgagaaatagagatccctgctttggatcttacaattttgagaccaagaaaaaatctcaaatggcaaggtctttgagcttgaattttgagttgagaaaagctttaaaagttgttgcctcaaaatcatttgtgcttgcaattact

SEQ ID NO: 238486 - DNA, 1824 bp, Cannabis indica
ctcaactttttcttttagggaaaatttactttttgacagttcatctaagttaatgtagcaacttttgatcacagttcatcatatggtttcgggttggtggcaaaggatcacaacccgtatttggtggaggccaaaacagtctatcacaggggtacaatggcaccaaacatggttgaagctttagatattaaagaggcgttaagttggatcaaggatcatgaatgtcataatgttcaactcgagttcgattgtctctcaattatctaagctattcgaagtaacatcaccatggatggactgccgacggcttctatctattttaaacaatgtttctttgtttttcattaaacgatctgctaatatgactaagcacagctttgctagagcatcatattcttttccagatcgagttttcagtgagagggatgttcctactgtattacagtcttgtcatttgactgatttagcaaattaataaaattccattttgcattcaaaagaaaagtgtgtcagaagagaagagtgaagaaggacgatgaagttagcggagggagactgcccgggacaaaccgggaatttaagctaaatgaccctctctcaactttttttttagggaaatttactattttacaattaaattgcacaaataacgttagtcattactaataccgtaatttactttttaatttgatctttctttttgttgttggtttaactttattgtaaaatagagtgtctgccgttaaagtgctctaaggcagttattttgtaccactttctggtttttttcttcttttcttcttgttcattcatgttacttcccttaaccgctccacgcacttgcatcttctcttttattatcaatcactgaattccccccatttgaattatgaatccatcaactaataagatgaaaaagaacgatgatcctcactgatgaggacgactcaacactgattttggatgatgatcaagacagcttaactactagtattgataatgttctggttgcacgaattcttacaacaaaaatggttttctttctactttgcagaaatagatgaaggttcattggaatggcagatttcacactaaaatcactgaaaaacctcctgatctctttgttctaacctttggatgcgaaggagacaaacaaagggttcttcttaaggagctttttcattttcaaaatcatcgcattgtgttgtacacaccaagtgctttacaaaatgtctcgccaaatgatctcatctactctccgttttgggtccaatgctatagacttcctgttcttagtaagtctaaatcgttggtaaaagcattggaaaacatcattggagaatttctggaagtccatgatgattcggtggaagaagtttggagtccattcttaagatttcgcgtcaaaatggatatcactaaacctctgctcaggggtcgaaacattagactccaacaagttcgtgataaattttgggtggaatttcgttatgaaagactccccgaatggtgcatggaatgtggtaggcttggtcatctataccagaaatgcttagtatggatgggaaaaatcgataatggaattgtaatatcccggaaaataaataatatttaaatagacatattttattaaatatgtaattattttggtaacgaagtaagattatgatcttgcttagggtaattattgagaatttactcaatgaaataaatagcataatttattaattacggagattatattgggatatgtgagtaccgaggatatcaattttgaaataaaatactttttcgggcccgacaattgtagaaatttagcgatgt

SEQ ID NO: 238487 - DNA, 1200 bp, Cannabis indica
ccctttattgggtattgatgatttcagagtgtatgaacatctccaaggcccaaggaaaagaaaagccatggatggtattctattcaacgcttcccctgaagctaaaaactccacatcaaccatttcagattttaatccttctcaacatcaaggatcaaacttaattcctacccctgacgaacacaagcctctacctcctaatgaatgtttcacgaatgggcaagggagttcctatggtacggccaagagacggggtaggccgagaaaggaaaggagccctgctacaatggacaattattctccaaggagaaggggaagaccaccgaaaacccaccatagcctctcggccacacctaaatctttcaaggaaaaaaaaaacacccatgaagatggcttcggagtccacgtctgtacagctacaaaagggtgggaaactgtttgacttgaaggtggatttggataaccggtttgttctagtggaaaagaaacaaagccttaaaggcaaatgcactatcactgagattgaggaggatgtccctcttaaagcaatgatcaacaaagggaaagctaagctggattttcaatttggggctatggagacttgcccggaaaagtctccacaatcgccatgaaggtatttgcttggaactgctgtggtctcgggagcaccacgacagttcgtcaattggcggcccttacccgtcaacataaacccgagctgctactgatttcagaagcccgccttacacctgataaattccaaagcatttgcacaaaactcaggtatgaaaactactcctatgccgcacctattgggagatcgggagggctgggattatgctggggaaaggaagtaaaatgtgtgattgattactcctctaagtatgttatctctgctacaattgaattggaaccaaaaggccttaaatggaccctgttggggatctatggtccgcctcatagagaggacaaagaagcattttggattcaagttggtgatattgttaataattcatctagaccagtccttctcattggagatatgaatggaactctcacggattcggaatgcttccactacgctaagcaaggcaactcttccaaatattcctttgactttcgtcgaatggttcgagcgggtgggacgttatagacctaggagtttcaaggccccgtcgcttcacttgggcgtaaggccgg

SEQ ID NO: 238488 - DNA, 2146 bp, Cannabis indica
ggaaagaaaaccatgaactataaatgcaagcaagtttcaatcaacacttttattcaatgatttgctgatgtattcaagttaccttagattcatcaaaatcgaagtcaactacagatgtcgagtctggtgttgaatattcttccaaacatttatagtttcctaatgaccacagacgcataacctaccataagaaacatatagaaaaacagtaatttaacaattattaagggaaaagatttataagaaaaaaattgcatttataagagctctacatttataatttactatggaggctaatgactaatgatgaagattcatttatttaaataactatacaatctacttgtgaacttcttaaagcctatgtaagatctaaacagaacatctgcaaagggaacttatctatgatgagcaaaaatcaacatataatcacagtctactaagcaagattatatgtcaaaatcagcacagaatccctcattttcacgttctaactaagtaatcataagtgaaaaaactctactattatcttggtgagaggtagaatataccttatcacctccaccagtaagaagcaatcccctcttcattcgacattgattcgccctaaagaagttaacttagaaaataagcaacaacaacaacaaaagttagaaaacatgatatacactctttgaacccattgattacatttcaagtttaaaacaaccatcttgatcgttatgctcattttttaagcattgtcattggtaaacacttaaattccaatagctaaccatagatgaaacaacatataatttcataagtgaattaacatcttccaaagtaaccaaaaacaaagtttcaaacttgaagaaatactatgtcagtaaacattacccaattgaatggcctctccactgattaacaacaaccgatcctttagccaaagccaatctatggcgctccatagcaagctcctccaaatacacattcaaaggcttctccaaactcgtagaaccatccaatttctgctgcttcatgtaaaagacttgaagcagcttagacttgttgataaccacatgccttcatcaaaacacaaaaattaaaaattaaaactttagatactttttcaaatgggtttgtcatatagacaaaagggtaccaagatttgcagacagcggagcagtgagcgaggtcgaagaggtcaaggaaggagaaaatgatgcagaggacgttgtggtcaaggcagccacctgttgtacgagctcttgagcttccatgagtgtaaagatgcctcttcttgttgccggaaggcgtggggtccatcaccgccggcgaggctggcactatgagccggaatagaggttggggaggaaaggagagaatggctaccggtttggttagaatttggatgtcgtttttgtgttgttgacagttatgtagttttcgttttgatgacactaaccaacgacatcatattttaagtcgtttaccgttatttagtagaaattaaatatattttttactttgaagtttgaactatcaacttttagaattttacatcttttcttttttgaaaaaattcactcaaagctttagtattcattagttgcatctatttcttttttttctaatgtaaaaatacttttattaatcattaaactctataactataactataacgggacaaagtaataacttagttagaatagatttcaaactaaagataggattatggtacaaaatagagactcgaataaaataatgagccactatagaccgcttaataaaaataattgaaacattacataattcagtaagcaaatttctacaaaccgaacaaagatatcatacgaatagaactatgtgaagcttgcagaacaccaaaagtcaatcaatctctgcagttacttgttaccattatttctatataatccaactcaaagcctcacgaacttctattgtctcggctaaaattctccccaagtacaaatgaaaagtgcatcataagtttcttttgtcgcttcaaagaatgattattgttgtagtcatgcaagaaactttaatcgtgtaagtagactcgattgaagtttcgattgtttgagtagttgctcactcaattgacccttaaccaataaccatagttaattaaattaattctaac

SEQ ID NO: 238489 - DNA, 1108 bp, Cannabis indica
tagcagagaataggtatttgttcctacagtgttggtggaatttgttttgatgagtatgataaagttgttgatcatttcctcaatcacttttgtaacttcatggggaggcagagctctgctacaagaaggatggaacatgattgccttgataatggaaacaagttgaatatcttgcaacaagtgcagataacttgtaccgttaaataagacggatgtgaaagaagctttatttggtattcactctttgaaaagccaagggccggatggttttggtgttggctttttcaaaggtctttagggtgagataggagatgacatttctaaagcaattttgggattctttcaatctggatcccttccgaaagaggtgaatgagactactattctctcattccaaagattgataatcctcaaaatgctagtgactatagacccattgcctactacaccactatctacaaatgtatatctaagatgatatgtacgagactcttagaagttctcccttgtctaattcatgataatcaaggtgcttttgttaaacacatgctgttagctcacaacattcttgctagaaggatatactcagaagaatatctcttctagatgcatcatgaagattgacctgagcacagcatatgatactgtggagtggtgctttgttgttgatcttttaaaaggtctatgttttccttccaagtttatttcttggattcaaagttgtctccatggagcctcttactctctcattttaaatggaaggattcaagggtcttttaaaggtgagaagggtcttcgtgaaagggaccccaatgtccccgctcctctttgttcttatcatggagtatctgactagattacttattcagaagtctaaggaaaaggggttcggatatcacccccctttgtaaatctttaggccttgtcaacctctgctttgcggatgatctcattattttttgcaggggtaatgtaagatatgtccaggttgttaatgaggctttccaaatgtttagtgaagctgcaggtcttgtgggtaacaaagacaaatccacagtgtactttgagggaatccaaaatgacggcaaataaagcttttaaatgtcct

SEQ ID NO: 238490 - DNA, 1160 bp, Cannabis indica
atttaagggtaaaacggtaaattttgtccctactcgatgtgaatcatctatagaggatctttgattattttgattataataatggataattaatagcgtatttatatcttgaaacatatagagtgttcaatataattaagagtgggattccaaatttatagtagagtcaggaagaattaataagttacagaatttacttagtaaattctagaactacttattggaagtttgattatataggcccatggttcccacattagttgaaataatactgcttgtagactcagttaattagttttaattaatcaattataattctaaggccaattaggatttttttccccttgaactttgacatgtaccaaagcatgcccactgaacttttaaggtcgttaaaaatgccccatgaactattgagattgtttgatttaaggacttttgtctaatttcattcaattttactatttcagtgattatttatatactaaaccatgctccccagacttttatatctaccaaatcatgcccctcgaactttgacatgtactaaattatggccctggactttcatccatgttagacttttttactaaaattggaaaaaagttcttaaatccaacaatgggcattttttagcgaccttaaaagttcagggggcataatttggtacatgtcaaagttcagggggcaaaaatcctaattagtctaattctaaattagactatgtcttatttatgaattttcactaagcaagggcttaattgagacgaaaagaggttttagggtttatttattaattaagagagactttgtaaggtataattaataaataagttaaatgacaattttatttgataattaattttaattattaaataaatagatttggcatttaaaaaaggtttaaagttaaaatatggcatttgtgaaaagaaaaaatgaattatgaaataaaatggcaaaattgcaactagtggggtccacaatagtggttagccacttaaggagttatttagccatttttttatttcatataatttaaacctaaccctagaaagaattctataaatagatagtgataggctcttagcctgacaacataacataagctcctcggtctaatttgttagataaagaaagagtcttttctctctctctct

SEQ ID NO: 238491 - DNA, 935 bp, Cannabis indica
aggatatactcttggtcatccatcaatcttagaaatttgcatctctattgtgtgaatacattgcatctaacagcgcatggttctttagtcagagttctccttgtgttaaccatgatgtttgatcagataaattaacaactcggtctcaatgaaagcacaaaattgttgacctcagattaggccaactgacagcagtagagtcatatttaatgttgatacttgccaagttttacacaataaaaatagaaaactaaatagacacgagatttttagaggttcggtccctttaattaattagtggggtaatgaattactccctttttagttgaattgattccaaagataatactactcacataacaagtattgtcgaatcttgaatagctctcttaagattacaatataagaatggatttggccaatctccattcagagagagagagagagagagagagagaattgagatgagtatcagacttagagcttgagagttagaactgagagtttaagacttagagagttagggtttgactaatgccctttatatagtaaaacttcatcattaatatcccttaaaaattggtaaatgaagttattatttacataataaattaataaatttcaaatgaataaattacccctcgaaaatagagaatttgctaatattttccctctatttttgtgggctgttaaggcccaatttgttgcaagacctgctatccacggatgaaagctgcgcaccaaaaatcttcaaggcaaaagttggccggccatgcacctaacagagtgcatgctcgtcaaccacatggtttctggaagctggctagcctatcttggccataaggttggccaggggttgccgactgtctcccttgaggtggctggtgttgggttttatgctctaaataaaactctttacaatctgattagttatc

SEQ ID NO: 238492 - DNA, 2808 bp, Cannabis indica
acgattaatttcgaatctgatttctctctgccaatcgaaagaaaaacaattgaaagagaaaagaaagagtgcaaacacaacagaatagatacccaaacacaaagaaggcaaaagtataaaaccacaaaatgccaagaactgccggagaccgatgcaaggaggacggggaaggggcaagagtgtgacgggcgatgactgtcacggagacgatgtcaggcgcgccctcacaccccggcgcgtgggattctgggcagcggcaaacgacgacgcgtggggcctacacgcagtgaattaggatgccaaaatttggaattttacagtgcggtggctcggcagtccttctatgtgggcggtgagaaaaaaatttcagtccaaataggatttctgaaaaacaaccctaaactcaaaccctaatttcgaatttcgaattataattctaactctaatgctttgataccatgtagagaatggtgaatagaattatatttatatacaaagctaggagactaaatgggaaactactaattacaaaataggaaactattatatcctgttaaattgttgatttcattccaccacaccagatcactgccccattatggtgtgctggcagatatttgaattctagatatctcctattgatgagctgtcataaaatccccaaaaatcttgggattctctttgtacaatcaaccaatcattagagaaaggaatattttattgttaggaaaaatattcccctccttgtattatatatacccacgattacactgtaatacttaccaagaaatacaatattgaatacagaagctattttacctgcaatactctgcctctaaatactctgcttctttttctgtgttctttagtgtttaatcttcagttttgtcttggtatcagagcgggtatggcgtctccaggcgattcctcagtcaacaatgccagatcccaagctgtcaaagctcctcctcaagctccagctcctgcaccagccattccagcacaacccgtgcccctgctgcaacccttggcacccattagcatccgcctagacagagataactatccctactggcgttcgcaagttgttccagccgttcgtgctcacgatttggatggctttctcttcagcacaaggccagtaccacctcatttcatcgaagttccagacgaggttaaccccgacttgcagcagcagcaggtaaatcctcacttcaccctctgggttcgaactgaccaagctatcttaagttggattttaaattctatttctgaggctatgcttggccatgttttacgttgtcgtgtttcctatgaactctggtctctgctggaaaatctatttacaactcaatctctagcacacatacttcaacttcgctttcagctacaatcactcaaaaaaggatccatgaccattcatgactacattctcaaaatgaagtctatttcagatggcttaaactcggctggccaaactttcagtgatgacgatcttatattatacattctagggggtcttggtgctgaatatgattcagttgttatcacccttacctctcgagcagatcatctaactctttctgaagtgcagtttcttctacaaagccaggagatgcgaatcgatcaactgaacactgcctctgcacctgatcttgctgctccatctgctaactttgcagctcgtggaagaagaaattttccaccttccaacactggtaggtctactggttcacgtggccgtggccgtggccgtggacgtggaattcaggggcgtataacttgtcaactttgcggtaagcctggacaccctgctagcaagtgctattaccgatttgatgttagcttcattcctcctactaacagcagcaacaaccaaagccagaatgcctcatttaacagcagcaataacactcatcatggcacaaaccagcaggcttttgttgccaactcaagccaaaacccacggtctgatgatgctaactggtacgtggacagcggagccacgaatcacatcactgataatgccaacaacattcagacttcgaccgaatacaatggtaaggctcgcttgacagtagttaatggccaatctcttgtcatttctcatactggtaactctgttataaaaaccagcaaccacttgaaacctgtcaagctaaacaatattctttgtgttccaaaaattgccaaaaatttattaagtgtgtcccaacttactcgagacaataatgcctatgctaaattctatgctaactcttgtgttttgaaggacatggattcgaggaaggtgcttcttcaagggaaacttaacaatggtctctatcaactcacaacaccattatcacaacctacaagtcacagtaacaatcatcaacttactgcaaaaccgcccaacattagctctaatattaagtctaatgagtcttgttttctaatttttgtcaatgaatcaagtttgtggcatcgtaggttagtccatccttcctccaatgtactcaaacatgttttaattaatgaaaagaagtctttaccttctcacttgcaattttgtcaaagttgtcaacttggaaagcctcatcataaaccatatcttgctgcccttaaagagtctaaacagccccttgagttgatacactccgatatatggggtcattccccaacgatatcaagacatggctatcgttactatattcactttatagatgactatagccgctacacttggatattcccactcaaaactaaggatgaagccttacccacatttaaaaactttcaactacaagttgaaaaacaactcaacac

SEQ ID NO: 238493 - DNA, 1237 bp, Cannabis indica
aacataaaatgttatttctgatctttattaataagtaaatctgaatatattgaaatgggttttatttagggcacaaaacccaacaaaaggcgtaaaaccacgcctcttggaaggtctgagggcctctccaagtgtacacttgagcgaccacctttgcaacctgggaccacttgacaccacacaaatgtacaaggcgcaagaccaccttatgcacctgcagtttgtagcctaaaagcgacaacttgtcttcttgggatcaccatgtaactcagccattagagcatataactatctaattctcaagtgtgagagggggttggaaaatcaattctgtaacttacgtattgaatacattctcttactcatgaaatctcttagtaatttaaacttcatttcacttcatcttcatcatatctcttagtttcactttaaattctgatttttggccacaatgttagttgatgagttctcaccgtcaacacaagcaatctcgagaagtaaaggagatcccttgaaagccaaaacagggccccaacgcccagttgacatgggtactggccctgcaccaaggttgatatacatcttggttcgaatattttctctccctaaacacaaattatgctctagacattctctttagtttggtcaaaaacgaggtaggagacctcgttcacaatctcaaattccttagaagtattaccctggaagttgctgaagaagcatccaacgcccaggttgacatgcagcctggtacttgggctctacttatcaaattcttgttcggtctctagatctgactattttttgtagtaagggggactactctttgtgacaagtcaaatttaccctttgatatttcgcctttttggcaaagtggaatattggcaaattaatcgcaaattgggaagtttcaagtctgcctgattttttgaaatagcaacatctccaagaactggtgatctaacatcttcaccaaaattaagaaattagctaagtgatcacttatgtttcaaaaaatacaagtccgacacttttttgtactcatacagcatctaggttgatgtcagtatgtcaactcgggcgttgtttgtttaacaaccttcagtaaaataatcataacttcctcaatattgatttgattgacgtgattcaacttatgtttcgaagctctttcaagtcaagtctcacaaccatattgtaattcggaaaatttgaagtcctaaattcatccccaaga

SEQ ID NO: 238494 - DNA, 725 bp, Cannabis indica
ctcttcgagtgacggactttctaattcaagcttcaaagatatggaggtgagtagtgatcgttcctctactccaaaacccgaagagcaacaccactcttactctgagcagatcacaggagaaggttacggtcgctttatttgggagctgaagaagggttggagacgttatcttctgtccagctggacatatattgtccgacctggtgttactgataccctttctgctggccgtccaagttctggttactttggtattccaatagttgcccctaccgttactgttgcacgacatacaaaccaatgtccgtccaagagaaggatgatgggccgtaaaaagcagacgatgcaaaaagttaatgcgtcaaactctcacatggcccagcatgccacgttgccaagtgccgagcaggatcttcctgctgtggaaagggaggattacgagtgggacattgaggtccaagagatagaggagcaggacgacgtttgtcctgatagcctttccgaagctgaggaggaaggagtggccgggcctccacactttggagggtataatgagattgggaagccagtattcgagcaggatgacgtcttggtcgagggggaagactatgtcacccaggagcttaccgtggggatcctccataggaggcaaagtgccttaggggccagatgggtgtgtcctccgtccagcataactgagggccatttaagggacctagataagg

SEQ ID NO: 238495 - DNA, 643 bp, Cannabis indica
caccaaaattttagaattgagggctagtggcaaaaatctgagcatttaagaaggttatgccgcaaattactcttattctatataaattgtgcctatataactgaaattattggtttatgagaaatttatgggtgactttttatttttatttaataaaataataaaatattatttatatataataaaataataataaaacaaatcctactaatatttgaactgatattaaattgattaattaagtatataatcctatgatgcgattgaatgaggatggaaaattgaatgtgaaatttttttttgttctctctgaagcaaaaactctagcctccaacacaacccataccaacttgtatgtataaaaagtggctatctaacacaaattcttggtttaacgttttattacttttctccgttaactttaacactacatgttagtaatcgttaactttgttacctataacgattcatgatcttgctcattgaagactgagtttccactcccctaaacccttcttgttcccaaaaggaccacgacaaggggtttgagacagccaacgatggcgagtttgggcgtagtgacagaggaaaggaccattcacaatcagttaacaggtttgaatcctgtgatattaaaactctt

SEQ ID NO: 238496 - DNA, 756 bp, Cannabis indica
gctattgggcttagatgcatatcagaagtctatttatttttgaatatttaaatagactaggttactaaaataaaatattaccttgatagttttatttaggctcaattagtattaggcttattcaattaataataattatttaataaaaggttaaattcttctcttttgggccttgtgttagagttaggaggccaatagtagtgagtacgacatacgggacccattcatccctcacatgaaccaccccaactctaaaacaccatttgccttatttaaataattgtattaggctaatcatattagtttaacctaaataaaattaaattagcaacataattaattttaaaataaatgaaattattttttcattagattatttaaaattaatttagaaaaacacatttagtttaaagaaaagattctagatagtaatttctagtaactaatttattttttaattgttgacctcacttttagccaacgacaatgagtctaataataagcgataaaggatatgatttagatataatattagaagataaataaagaacacaaggtgtttaaagaggttcggccccgtttagttcggttatagcgtactctctttgatttgtattaacttaagaacaaagaacacaatgtttcctctcttaaagctcttacagtaaaatctctgagtatgctctcttagatctctctaaaagttattctctcgacccctttatttgtgagaatggatcactatttctagggcta

SEQ ID NO: 238497 - DNA, 981 bp, Cannabis indica
ttaagattttttaagtatagaaaatcaaatttcccattatatttaagaaaatatatataataatttcagtcttatgctacaccaaacacaatataatacaaaaataatccaactcggtcccaatccaatttaatcctaattaataatttttttagacgcagtgaacagagtcacacatgattaacaaaacagcaaaccacaaacgacggtagaatcctcgaatcaggatagctcatcgtctaaccgaagagcatgttttgccaaaccataaactgcagaaaactaattgcgagccatgggataaaactgctcccgaaaatttagacaataaagctataacgtcttcaaacaacaccccaacatattaaaaaataccttctcattattaataattaatttggtgcaattacaatctcttataccaaacgagccgatgacttagttttcatttatagaaatgtacatattttagtaggacaaaatgtataatttttaatacggattttctttttttcaaaataaatcatggaattttattaatagcaatcagtttaaataatagcatacaatccaatcaaacatctccctattagaaatacagccagaattaaaattagaaaaatgagttaattaaataatcaactaccaatttcgagatcgttcgataaaaaactaaaataaaataagatgaaaaagattgcagcatcacaattatacttaagaacacttatattcagtttcatctacgttcagaaaatgtaatagtagaaactattgcagcaagcttattcaaactcgtagcttgagcactcaactataactacactactaacaaccccttcagtcgtagaaaatttattatttccaaccaagcatcaatttgatggtgagccatcgaagaataaagaagaaccaacaacgaaatgaaacaaaacaaaaccatgcatattacacagttcaagactaaaatactcaaaatca

SEQ ID NO: 238498 - DNA, 1948 bp, Cannabis indica
tctattttacatatgtataaaataaaaaaaacacacatacaataaattctgaaaaccctatttattacgacatattaaattattttaaatttgtcaaaattttataaaatattttaaataactacaatatatacgactataaaactattaacttaaatatttctaaatcttgattgtgtttggctaagggagattcttcctattatattttctgttattgcaaatgactctttaaatttataataatagatttattcttaaaaaaaaaaaatactaaaggcattagtggtatctagcaccttattacgtgttaatatcattatttgttcaattaaaaatcaagtccatataatttaatataataacttttagagaatatcactaaccaataataaaataatattttttaaaaaaaatatgaaaactgatgcataataatagagaaatgctaaagggcactagtggtgcctaacacactcttatgtgttagtttcgctattggtccaactaaatattgcatcccatataatttaatataatagattttaatgagtatcgctagccaatcgcaacgcgacatatcgagaatatacaatacattactagtacttaataataacaatgctcctgaataaataaaagtggatccatacacaaatttataaatagaatttttgaataaataattattaatttttatttaaaaaaggcaagacgtccgtgatggcctaagtattcgatcccccacgccacgcgcctgcgtcaccatcattactcacatacactcacattttctctctcctctgtccccctttatataaacccaattctctctcacctcttttgcctcactaccctttctcaaccctattatttctcatctcaacaaactactctccgtggcattttcgtaatttcactttactccaaaaaaatattattatgagtactaaacgattccgagatgactcggccgagtccgaactcgactcgttcgaggtcaagaaactcagggaagagttccttggttttctcgacgattccgaccctgacccttcgactcaagaccttgcctctgttatgaaaagcttagaggaagagatttccgctccttcttgttccgttaccccaactccggcgccggttgtagatctggcgtcggaatctggcgagtctcaaccggatctaggttatcttttagaagcttctgatgatgagcttggtttaccgccttctaattctggtgaagatgttttgaaggaagaagagactgagttggtccgagttgagtctggttcttctggaatcggtgagtttttggggtttgatgaacaagttccgagttacgattcttttgagtttggaactggtgataactttaatgaaagtaacgatttcttgccctttgatgggttgtttggtttttccgatgtttattatgattccgccgatttctccgatttgtcatggcggtcggaaactttgccggcggcgcaatagtacagtttgaaaaaaaaaaggagaaaaaaactgttctttttttgttggaacggaatgtaaaacgacgtcggtttgtaaatttagcaaaacgtgatatgtaggattagactgatatttaaaaagaaggaaaaatatggcttaacacgtgcgaagttctgttcgttctttattgtggtggaaaattagctttattaaatattattattattaggtagggaatataaaattattttattttatttttatttttactaaattatctttaaaatcttggaatgaacgatataaaatacagtgataatataatagctttaatatttgtaatttttatttatgggtagaaaaaaaagaagaaagaatattaattttttgccgaaaatataatagagaatataatatggtactcaatggataattggctcaatactagagtttttttttttttttt

SEQ ID NO: 238499 - DNA, 4499 bp, Cannabis indica
tcttcttcttcaagacaaacaaaaatatagagataaggtttcctgcaaaaatattataaacacatcaaatacgtcccaagttttatttaaaagaagcatatttgaggctcaagatctagttaaagaaggtgtatctgtatggattggaaggggagactctgtgagtgtgctttaagacccctggatgcataatattaaagaccctttcgtccatacagttagtgactctttgattggcacaatggtttcaaatttaatgattctagggcattctcagtgggatatcaagttcatcgatgacacttttactgaacgagatgcgaacctaatcataagtattcctcttatggaaggtgcgaatgattcttggtattgcaaacaagatagaatgggccaatattctgtgaaaaatgcgtattgtgtattgcaagatggcaaagaggttaggcatactagtgacaattcaggtttgtagaggaaactttggaatctgaaagttactcccaaggttaagaacttttctgtggcaagcttccacaggttgtctacctactaaatctcaactagaaccaagcatgtcgatgtgaattctctctcccctttgtgtaatcttgaaagagaatcaatttctcatgtgttggtcttgctcttactctttttagcatgttgggtcggagtgagatttgctatcataacagatgttataaggacattttttcgatggattgcttttctattttttgattacgttaaaatggaaaggaaagaaaaatggttgcaatagttagttgggcatttatggattgcgtagaaaatgatttagtatggaatacacaaaaaaaatagagatgttattaaggtattggtgctagtaaggatagtctttaattggcaatgtgcttaagaaaaattataagatacatccttaggtttgatgaatcgagaggatggtactaagcattggaaaactccaaatgaaaatataattaaggtaaatactgacattgatctctttgtacattcaaactgttttagctactctcttgttgcctaaaaccatgttggtgatttagaggaggctagagcaatctgtactaaaagtaatgtttaactagaagtcgtcgaggccattaggatacgagaagcactaagctagattaagaaccgacaatggagcaaagttgaagttgaaacaaattgtcttgtagttgttcaagctatgagaagctccagtgccatgttatcctattttaggagaattgttgatgactgcaagagacgtttgattgaattaaaagttacaaatttctttaaaatttattaaacaatctgctaacaatgtaactcacttcctagcaagatctacttgttttatttttgatcgtgttatacgagtgaacgatgctctcccatagttcatttctgtatggatgaataatttgattaattaatgaaattttatcttcttctgtaaataaataaataaataaataaataataaaaaaatatatatgctttaaatatgttctatattcaaacacaccttttaaattctcttaaattttttaccttataaaaatacttacacatggagtaaatctaaacagaggatccctatgagatcgactactatatctacgttaccaaagctacttttcgtgtaaacattgtcttatattttttttaccttacaaaaaaacttacacatttatggagtaaaaaatttccactaactataaggtaagtctttgttatgtgtaatttatatgttcacatatcatactcaagaaaaaaaatatcaataatcaccggaaaatctaaaacaaagtataagctaccttgatttctgaataattaaaaaaaataaagaattaacatatgatatgattttgataaaaaaattgtagatttcttaaatacctctaattatccctcaatgtacgattttgatcccaaagttattaaaccacaatgaagacataatccataatccagcttcacttttctttattgaataaaaaacattgaagctgataaagaggtcctataatctggacctttgttttacaacacggttatgttgtgtcgaatcttttttggtcgagattatattgatatactttttaacaatctcttcagctgaaaaatcagtgtagtatcccttcttcacatgcaatccttcttgggcccccaatatctctactaggttttggacctggtctgctccaatcttattgggctctaagagcatgcaagttatctcagcataatgttcaccatgaattaggcccagagtttgtacagtgggaagcccacctcccttctcactcaccatttttgctatcttttgagccacgaagacatctgtggtcattatgggtacattgtacaagtcaatccatgggcgtgcaccaatcattgagattcctttgtctttggacattgatattgggccttcattgggctttagtggtagaacttcgggtatggtccacccggcccattggttgcccggggagttggacgtgtagtagcccaactctcgtctgatgatgtcaatggcctttccggtagggtgtgctgcaccgtataaatatactggcactacaaaacaattcacccaacacacactcacataccagtgttgaaaattttagaaatttatatatatattaaactaaataaaaaattaaaattaaaactatttaaagggccgaaacagaaagagggttccaacttccaatgcaattttaaatttttagttagtgtaactttgacatactttatgttttaattttcatgataaatttatatatatatatatattaaacttaaaaaaaaaatatactaaaaatttcataaatattcaatactttgaacaataatcaaaattatcttctactttcccaccattataattgaatattataaatacatattaaagagcaataattgaaacaccaataattcagataattattgaaaagagcaagattacttccaatttgctatactttactaataagtattgctataaggttcattattgagttttataagtagttagtaaattttataatttttaaataaagaaaacttatattaattacatcaataaaatatcaaacattgagtaccattaatagcatttctcttttctgatttctcaacaatataaattaaatataatatggtctttaaaaaattaaatgtccttaaaattttattataccaatttaaaatttaaaaatttcattcacatttcaaaaacttacatgtaccatattttaataatgtttattttacataaaatatatatttaattgtattatttttttttatttatattcttaaaaaaatatatatttatcaaataaaaataaatttttttaaaaaataaaaattaaaataaaaaattatatgaaattttattaaaaaaatacataatttaaaaaaattataaaaataaaattaaaattaattcttaaaagtgaatttttaaaattatttttaacttaaattttttttaaatattaggtgattttgtgagaatgcaaatagaatttgcctctaaaatttaacttttacactctttattttgtaaaaagtataaaattaagcctataaaaaatttagaatttaagtacagacgaaatattttgaaatattactggatctgaatctatgatgatgatgaattgatggactacaaatcaccttgaaatttagtggcgacgtcgagggccacagccttggcaagcatagcagcgtgatgaagttgggcgttaggcaaaggatggaaaagaatttcatcgacgacgcccaaacgagggtaagctcccaaatgagtctccaaatttatggcctcgaaagcagcctccaccatggccatcactgtcttctgaagcggactatacacgcgatccttaacgacgtcgtaacaacaatacgaaacgattgtgtatctcacacgattgtaagcttcgtcctcaaacttgttcacaatcacagcttcttcttcttcttctactctagtactgtttctgttgcagctcagtctcagcccaccaccagctctttcaatggcctcaacagccttactgttgcgtgattctgagatgaacagccggcagcatattaacttgttattcttcatcttcttccatttctcctcatcctccattattttcttcatcacacccatttttgtattttattttatttaattttatctgtatatcaaaacatctataattgttgttgttgttattattattataaagtggcctgcactggtagtagtacacgtcaggagaagaaaaaagaaagtttgggtttgggtttggggttcacgtgtctcataaattgaattgacttgtattttgtattttgtttaatgaaaaatttattaaatttacttttgtatgacatttttttctttgaaaaaaaaacgttcattaatgtaagtaaattaaactacttttatatgacataataaa

SEQ ID NO: 238500 - DNA, 742 bp, Cannabis indica
aaaaaaaaaaatcacccaataatttcttataaaccaagaattcaattatataatcacatttcatataaaataaatatatatatataaataaaaatatatatatatatatttgccttaataagtctttataatatattttttgtttttattttttcaatgtatgtatttttcttcaaaatatggaatagaagggggaaatgaaaaaataaataaataactgatcacatagctagtctggagaacataataaatgaattcacatcaaataattaattaaaacgaattgagaataagtacgtatacaaatgctccctctcgtgatcaacatgaacaaaattaaaatattcaacatgccatatttcaaacaaaagattatacacataacattacttaacaaatcaaactaaaaaagcacaagaatgtattttattgcgaccatggaaactattacagctccaaacgacatcgttcgagctccaatagtaaaatcagatgcactggaagcattattcgtcttctgatcatcatcattatcctcacttgctccaccagggccatccgccctggaggacattgaagaagaactcgatgatgatgaattcgatgaagaatcttttgttggcttagccaaaagagcggagggtgaaggagaaggttgaagttttggtctcggtgcaaaaacaccgagaggaagcaaaaccttatccactctataaatagccaactgatcgtcagagaacac

SEQ ID NO: 238501 - DNA, 2048 bp, Cannabis indica
aattttgggaattttcactaagttggtgaaatatagaagtaaagagaaataaaagggtaatttattaattaagaccttttttgtcaaattaataaatatatttaaattatattttatttaagaattatttgtcattattagatcagaactagtatttaaatataaaaaattaattggacgattttgctgagtacttccagcaaattggtcagaagaaggattagggctgaccttgcccatctcaagttgaatggtagatatccctttttgtttttcgtcttgaatgactgaggcataagctttgttgatactaggtagaggttcttgtataagaatttgtgaacgagtattactatatgattcattcaaacccaccaagtctccaaggctctgtcttccacccggttattcttgaataatcttcattgtgcttacatttacaaacaggtagtggtctatcccacaaagctttacataatgagatccctaatgaagcagttgcgtagatcacttggcttcaaagattcttggagcatttcgttgatgaaacctttctcgaagatcatttcagatatctgatgcattttccacatcacattatcaacaatgtctacaatcacaacatgtaaaatccaagaaatgaccaagctattgcatcgattccaaatatcataatctttgtgttcttcatctggttgcttgagctttccattaacaaactgcgttttgtttcgggcaagcaatgctaccgtcaacgatcttctccaaggattataattttcactaccagttagaatctttggcaccaatttagctctagggtgatcgccatgggagagataataaggaccttgtgttgcatcaatgtaaggtcaagaactaggctcgagaacggaaaatgggttggattcttcagaggtatttccttgagtggtctgactttgagtgttgacacctccacgagccatggacacaagcaattaagaaaaaaaaaaattgaagaagatggtttcatgaatcatgtggttctgatactattgtagctttagaaagcaaagtaaagaatgaatgttattaatccaaagaatgaattacagagtgtttatatactagactgaagtgttaacaaactagtaaccaatctgttactaaaaccagttacagctggtaactaactgctaacagtcaactcctaacaaactaactaatctattcactagctaagtttaatacttgcagaccattgtaggaaaattattctgaattatagttacgaagatagtagaatcgaatttgtgacaaaaaaataaataaataaataaaggaaaaaggtcttcattattaccttgcattctctttgctctttggtaattaattgaaatagaacaagcaatgatggagccagaaatgtactgcaaattgtaaagaatggtgggataacatatgtaaatgtttattgcatcttttatttacagaacatgtgaatcaaaatgggtttgtttcattattagtcatactaattgaggtttcttctgtagtgaatgctatgaaagcattaaaggactctcttaaaattccagacagaatgggttggaatggggatccttgtgctcctactacctgggatgcttgggagggagttacatgccacaaaaacaagaatggaactgccctcgtcatatttcaaatgtaagctatctacttatcatcttcactttcttttgggtttataacagccagtaagttggacttatagtccatttaaaggccttctaaatctttcttatggagacaacattccaattcataactgttcagcagccagcatagacacaaagtgaaaaaaactttatgttgtttttagatcatcgatgaaactatacacaatagcaataaaggaacgttacctttgggaacttaattatttaatagtagttttttttttttttttttccacagcttcatcttgtgtttttttttctttttcctttaagtatattattcctttactaaggtctttaaatttttctaaccttaacctagtaatt

SEQ ID NO: 238502 - DNA, 632 bp, Cannabis indica
ctctcattggtgaaaataccctgtttatgttaactgaagaggctccggagcacccaggtgagaatgcgaccaaggcagtcaaggaaaagttcgagcgttggcaaaatgctaacaacaaagctcggtactttatgctgtcaagcatggtcaacaccttgaaaacaaggtttgccaatactctcacgactgcatatataatgaaccaattgactaaactattagggatggcgtgaattcaggctcgatttgaggcgaccaagaattttatcattgcatcatcagaacgtgcatgatcacctgctccaaatgactagttacttccaagaggctaagaatcatggagctattctggatcagacaactcaagtgagtttgatcttgaatagtttgactctagcttttctaccctttacatcaaattatgtcatgaacaagttggattttgacttcaacaagctaatcaacaaccttcagacatttaaaaatttaattggaggaccacaaaaaggagaaactaaagatcctagttctggcactgctaatggtatggcaaaggctgaggcaagcattgcctatactttgaaacccagcaaaaagaagaattggaagaatagcaagaagcctcttaaagc

SEQ ID NO: 238503 - DNA, 1034 bp, Cannabis indica
cttgatactaccacaatatttaccttgacaagggtatattttttattttatccgcttattttttgagtattgatatgtggctgatatagtactttgcatcatgctgtttagtgttgatatgttcctaattttgatgctctttttcttttctgtataaggtgactcaacgaagttacaagctatttttacactagggatgttggtaatgtataatcagtggccttctagtaccgatggctttcaaccagctcttatgggaggaatgcaaactatgacagcattgtcgatggtcccattgattatgggatctttcacaatttaagtttaattgggatgtatattatcaataatttaaattatattgctccttctaattgtttattcaacctcttaaatgataaaggacattaatggcaaacacgaaaattaataattcttccatccattgatctccatttttgctttgtatatattatttatgaaatttcccatcttattatttaagcgccacgttgtttgtcaaggctatacatgtatgtatattagatactgattagtccacattgaacctctattctgcatagttaagcccactattcgcagataaatttcatgtcctatctactatctttaatgatgtctcaagctttaaatcccatcaaagaaatactaaaaaaaatcaaagaattggagaaggaagatggtaaccttgctgattattagctcttgtttttttttttttttttagaataattggttattattagcttgtaacctgaagatatcattagtttagagggttttttctttgaagcttttacgtgcttcaagaaaattatttagggatatttttttttcctaatcgactcttataattatttgaggatacctaattttattgaatagccataaaaaataaataaaaatataaatctattaaaaaggaaattaacttagttggtgacttgttataataagtcaccaattgccacatcattataacttttagtacctattaatgggtattacccatt

SEQ ID NO: 238504 - DNA, 679 bp, Cannabis indica
taacacgctctccttattgttcgcagatagaccgcctcgacctgtattggacccgactagcaaaaaagtcgctgaggttctcggttgtctccctgttcaagatcgcgactggcgattgctgtgcacgactttgaaactgcgggaacacaagttaataccagaggacgccagccttatcgggagccagtatacaaggagccgtctgaaaaacaaaaggagaaaatagacaagcgtctttccaagcaggcttctcgaccgacatcaggtaacatatcgcacatatagacttatgcatttgaatttattgctattttaacttatcttttcttgtccttgcagagatgacttttctgaaacaagcacccgttcttaatcgcaagacgaagattggaacaacgacgacttctcccatcgttcccgagaatcaaaaaagcgatgtcgtgggtatccttgccgcggattcatccaagaagctagttaagcctacgcaagacaaggggaagaaagtcttgatcgatccagctgttcgggctcacgatttcctagttcttcaggagaagttcgtgggcgaggagttcatgtccaaggttgagaggactccctctgaggaacttatgccccgctatccagagttggctttacagttcatgtgtaacgccctaatgctaaggcacgctac

SEQ ID NO: 238505 - DNA, 502 bp, Cannabis indica
agatgcacaaaatatattatatagcacaaatgtaacaagagaagaatatatatgtatatactcactcacaatcttaagtgtagattagtgggaatgagcatgacttgaacaatgtacaattatcacatttgttcaaaaacttatttctcctatctctaagtcattaaaggagttattctaagaaatagctttgagaattattaagccttagagttttttagcaaaatatttttttgattgaaaacttcatcataatttaaacactttagaccactttatacagtgtttgagatatcaccatttgaacttctaactcgtagcttttcacggaagttatggactcaagagttaaaattcattctccaacaattatgactcctataacttttaagaattttaaattaggctaattaggattttttttttcctctcgaactttgatatgtaccaaatcatgccccatgaattatctaactcttttattgaattagtaaaattaaat

SEQ ID NO: 238506 - DNA, 1606 bp, Cannabis indica
ttgaaatgaggacatttactaacatagtcctataatttaggggcatttgctataatttttttaaatgaggacatatactaacatagttttatgatttggggccatttactataattttccttaaggaataccaaaaaaaaaatccattaattaaaaatattcctatattttataattattatctcaatatacatttatcttttacttaattctagcatataatttatattaacatagaagtataatacgtcatctataaaagtagatatatctttaaagaatataaaaataaaagtaaaaattaaaatagataaaataatatgagtatacaattgttaactaactaactgttttgacagttggttagttacagttctgttattttctattactttgtttgttaaatttctggttgtattgttttggttctgttgtaattcttggtgtatataaacaccttcagttcattaataaagttgagcttcttttcatttttctctctatttgaacaaactctgttcttcttctttcttcctctactcaaatccttcatggtatcagagccattgacttgtgtcaatggctttcttcggtgaccactcgtcgcaagctggaggctccgatcctgttgtgatgccagctcagtcctcctcgacggcatccccatggaatccattttcaaattctttgacagcttccctgactctgaaattagatcgcacgaattttctctcctggaaatcgcaagtagttcctacagtcatcggtcatgacctcgacaatcttcttttcagcaatgaagctcctctagaaagactcatcaatgttgttgaaaatccgcagttcttgcagtggagacacaaagatcaattactattgtcttggcttcgatcatctatgacagaaggcatcttggctactgtggcatgttacaacacttcgaattcggtttggagagccttggagcagaaatttgctagccaatctaaagctagacttcttcaactcaagagtcaactaacgaatctgcagaaaggtaatatgtccatctctgattatgttgataaaatcaaatctatctgtgattctttggctattgctggtcaccctgttcatgactttgatcttgttttacatcttctcaatggacttggtcccgagttcgactctgttatttctagcatcacctctcgcagtgatactttatcccttgaagaagtccaagctctgttgatatcccatgagtctcgactggaaaaacattcatctgtcatggatctttatgcaaaaatggcagcaaatctcacagttggttcaagaaatggtcaatataggtcttttaatggctctgctaagggacaaggttctgaaaacacaaggttcttcaatcggacaaatggctctagacctatcaataataacagacccttatgtcaagtctgtatgaagtttgggcacactgctattacatgccactatcgttttgatagaaattgggttacacctaaggcttctgctgctcagccacaggttaatctcactgaacaaagtttcgaatatgaccctcaggcttttgttgctcaatttgttcctgactttggggatg

SEQ ID NO: 238507 - DNA, 1358 bp, Cannabis indica
ggtggaattatggtcgatccgaaaaagatggagtcagttaaaagttggccaaggccaagaactgttacagaagtatgaagttttctcggattaggagggtattatcaagattatgttgaaggtttctcaaagatttcaatgaaactaaagaaattgacaaagaagaaccaacagattgtattgtccgacaagtatgaaacaagttttcaagaatcgaagtaggagatgatcacaacatctgtgttagctttgccattagaccaagaaaagattattgtttactgtgatgcatctagacaaggtcttggatgtgttttgatgcaagttgacagggttatagcctatgcctcccatcagttgaaggaatatgaacacgttatctaacacatgatttagaacttgctgtcattgtattctctctaaaaatatggcgacattacctatatggagaaaaatacgagatctataaacaccacaagggcctcaagtattcttcacatagaaggatttgaatatcagacagaggtggtggctagaattagtgaaggattatcaatgtgagattctatatcttgggaaagccaatgtagtggcagatgctttgagcagaaaaggtcctgaacaagtctttagtaccataatgatagcacctcagttggcttcggatatggttaaggctggaattgagttgtggttggaaaattacataacttgacactccagtcagattttttggaaataattaaaaagacacaattgaaagatgttgagctaattaagattcaggatgatatattagcaagtaggcctaaatatttctcgatctcaaataatagaatactgctttacaaagctcacgtttgtgttccaaacagtgatgagctcagaaaagagacacttgatgaggctcatactacaccttattcattgcacccgggaaccagcaaaatttatcaggacctaaaaccctattattggtgttgtggaatgaagaaggatgtagtggacatgtctaaatgtttaacatgtcaacaaatcaaaacaaaacattagaggtcgacagggttattacaaccattaacacttcttgaatggaaatgggaggatataacaatggatttcgtggttggtttgcctagaaccacgggaatgaatctatgactcagtatgggtcatagtggaccgtttcacgaagtcactacattttgtgcccgtgaaattaacttatacagtagatcagtatgcagagttgtatgtgaaagagatagttcgtctccatggagcttcaaaatccattgtttcagatagggatccaaagtttacattgaaattctaggtaagtctttagagagctatgg

SEQ ID NO: 238508 - DNA, 628 bp, Cannabis indica
attggttagccgtgaattgcacacataaagaaataggatttgtcaatcaacttacagatacaatattgtacttgaaacttggaacgtatagcacattatctagcacaagatccttagtaataccaacagtgccactttgatgtgtcataatgtgattattgtttggcaagactaatctggtagggttagtattgtagataaattggaaaagggtgatatcatggtaaatatgtctagtagctcctgtgtcaagaatctaggagccttttatgggaaaattagacatagatgaaagcacgatattatttttcatactagcttgttgggttgcgagcaagttcagtagttgttgatattgtgtagcagtgagttgaggcaaaagagcttggttgtctccagtcgttttattactgtcattattggtctgaatttgatttgctgcagcatcctttgagttgttgtttttgttgtagcctggtggataccatgaattttatagcagttttcaatggtgtggccgagtatgttgtaatgagtgcaaaacggtttgtttctcttcagaggatacgatttgtttcctgtagtatccttcttgttgttgttgttggttttgtctccttgaaaggca

SEQ ID NO: 238509 - DNA, 981 bp, Cannabis indica
gaatgtttaaattgaatgttcaagtcaataaagttaatgcttctgcttatatgttgtgttcttttaatacttggcatgctagactttgtcacgtaaataaacgcataatcaagaacatgagtagtttaggcctaattcctaaattatctttaaatgactttgaaaaatgcgaattttgtagccaagccaagattactaaaacaccacataaatctgtgttagaaaaagaaaccgagcctctagatttaatccattctgatatttgtgaacttgatggaactttgactagaaatggtaaacgctactttatcacttttattgatgattgttctgactttacctatgtgtatttaatgaaaaataaaagtgaagctcttgatatgtttaagatatttgtggctgaaattgaaaatcaacttagtagaaaaatcaagaagtttcgtagcgatagaggcactgaatatgattccactgcttttattgaattttataactcacatggaatcatacacgataagactgcaccttattcacctgaaatgaatggcaaagctgaaagaaaaaatagaactcttactgaatctgttgttgctattttattgaattcgggtgctgcttctcattggtggggagaaattttattaactgtatgttatgtgcttaatagagttcctaaatctaaaagaaaattttctccatatgaaagtttgaaaaataaacaacccaatatctcatattttaaaacttggggttgtttggcatatgttagaattcctgatcctaagagaattaaattggctagtagagcatatgaatgtgtttttattggatatgctgttaatagtaaagcatatagattttatgatttaaaagcgcatactattttggaatctaatgatgctgattttttcgaacatagatttccatttaaattgagaaatagtgggggtgcatcatctagtaacatgtctgccattagga

SEQ ID NO: 238510 - DNA, 1620 bp, Cannabis indica
tagctaatgaattttttacttttggtaaaaatcttgataaatattttcttgttaaaaattgttattgtttctgatttgacgctaaactcttagttatggaagaagttaaaaatcttaataaaaatgaaaagtgaaagagttaatgaattctatgcgcacttttaaattaaatcagcaaatcaaacaaaaaaacaaataacacgatcatgaaatcgtgatatggattcttattttaatcgaaactatttttctcaaaagcttagcctaccttatataaagagttttttcgtaattgaacaatgtatatcttattactttatattgatgagaatatttgatttgttttttataatgcagtaatatttttttgtaaaaataaaaataaatttccatgctatatatagttgctaaaataggctgtcccctagctatatcacaagatttaattattaagatggccaagtacttttcaagattttcattaataattttattaattaaataagagttatatatatagaacacaaaacccccattatgaatactacttgatcaactaattaattgggtctttagacactttttcatcatcatcaaattccaattaagctcttaattatgtataaatatatctttaattagtactcctagctagtagtctatacacataaatatgagccaaattaatattccttttctaaatgattttaacaccacaaactttatacatgtatttctatttatgtatcaaataaattattataattattttatagtggcctcaattgcttttttggttcctaggtcagaatatatcacaaaaaaaagagaacttattctttcttgattaatcaagttttattaattaattagtgtagcgttataacccctaaactatattattctttccattaattacgtttcataattaatatatattaattgattagtggctatgttttattactatatcttaaacacgtatgcttgatcaatctcgatcatgagaaatatttttaagagtaatttgcacgtaaaattttttatgttttaatttttatacacttaatcttcttatcttattttttaatagcaaaactcccttaattaagtttacttttctttgcaaatttaaaattttagttagatattaccgttaaatactaactggattactactgtatcgacttcgagattttactgttacatatatataggtgtatacagtggtcatccagtttatatttaatggtaatatttaactggtgtgtcaaatttataatgaaaaataaacatcagggggtttgccaccaaaaaaaaagtagcttaagtgtataaaacttaaaacatgagagggtaattttgtcaacaaaaaaaaaataaggaggttaagtgtataaaatttaaaacataaggatgttttgctaacaaaaaaaaataaaaaaattaagtgtataaaaattaaaacataaaggaatttacgctgcaaattgccctattttcaaatgtataattatatcaatctttgtcactcattagaatctcgaaagcagctagactttatataatatatttatgcttaattatttgtgttttatacactttaaatttttttattta

SEQ ID NO: 238511 - DNA, 2703 bp, Cannabis indica
acatgtctatttctcaaatttgcacttagcatattatattgtgttgtgctctctaaagaaaattacagtaattgttcaatttgtttagtcagttaccaaggctccaccaagccataaaaaattctgtcaaaatgccaataccaaaagctttgtagacaaaattaaatgtttgaacagaggagctacttaatcaactaggatactgctatgggcaccatctcgtgttgttcacttattaattttaaatctgacccaacatattctaagtcataatattaaagttaatactgttattaaatttcaatcaacaaaataattaacaataatttgataaatacagaaggtgaatgacacctatgtaagttgtactttacaagtccactacagaccagatttcagctgcttatcacattttttttttctttctcacgattctgatcataagaatgacaatacatttttacaataaaaaaaattttaaaaaaaaaaagaaaaacccttcaattacaggacagaaaagtgttatataagggaatataaatagctcgatattcatgaactggcttaactgaggtgagagatatcaactccatctgggatcttaaatgtgtctgcagcaccaaacttcctatattcttctcctgatacagagtcatctccgttaccatcatcgtcttcatcatctccatgacttgatgaaggtgttgagggatcgcggaaacttctagacttacaatcctgtgtcgcaagcatgtttacctgaccaaggtgggagatttctacaacaactgtatcatcgttcacagggaggggttgcttccatggttccccatcaatcctcataaaagtgtggtctgcagcacctttgtgaaactcaaagcggattcgatgagcctataaccacaaaagaatgaatggaaacttgttagcatgataaacacagagtccactctgaaacagagcaaaaagctatcatgcatacaagttctgaacttagtcataaactattcccattatggcaagaaaactagcctcatatttcacttattacctgagcaagacgagttccgtgcccatttggagcaagcaaaacaagtccgtgccaagcatctctaaaaccaacgacctcaataaggccatcatctacatatggggcagtcaagtctctctgtaaaattatacataaaggcatttatcagattgaatctttactctgaagataaggttaactactcataaataagaaaaatagatgacatgtttgaacgaacatctcgaagcttcttgctgttaggtgtcccccaaggatttaatccgccagaaaagctaggcaagttgaggcacacaattgaccttatactgtaatgagaatagagcatagtcaaagaatggcatggtagcaatagtcaaaaaaggaatagaacaacacaagtattgatggtgaagaactagagtacaacatccttaaattaattacaaaaacaataaaagaactttaaactagtgtatgacaaaggggagatgacaacatacaaagatttagaagagcaaaaagtaggaaaaacaagtttcaagaagctatttgaacactaatacgatacactagataacaaataataagactcactttctctttgtcacagataagggtttgaacttttgaagatgaaaacttcaaagttattattcataacatgaagtaacattcacaaagtactcatgactgatgggtaagcaaaacaagaagaatctcaacctagcgcctaataatagaaaattttagtatggtagactacatggaccattttattatggcaccagaataaggttgtgctagaagtagtagttgattacaatatgaaacacaaatcctagaatatcatatatcaattcaattatggctaatatataaagaacaattacctctgaggaatggtgagctctacccaagaaccttgttttttcattatgctcacctttgctaattgagctatgttcctgtattatgaaaaatcatggcagtcattattttataatttatacaataatttctgtataatgttaaagcagacacctcatagtagcatatgtgtgcatgcaaatgaagagaataaaccacggcaatcaaaatgtaagccaagagagtcttggtcatgtttgagatctacatactcaccgagaagagtggtggaaaagagaagcgaaaaaccagccttgactgcccacaatcttggcataagtactctgttttggggataaaataaaataattagtagagcacaatagaactattcaagcatgcgctgtagttcatgtattagcaaattgtttgtcatgcatcaattacatgtgtaaaagtgagtagtgcttaaaagggacatataagttccgaattctttctctacaacaccagaaagaaagaaaagcagtggctaagaccatattacacatttctatgacaaagctaatatgtttaagatggagtattttatagattataagtgcatattattcaaccattgcattgacatcagtgtgccagaagtacctgattaattaattgattcttaaacttctcaggatgcaacttccgctcagagtgaaatgcatatgatacttgagcatccattcctatagagaacagatcataaatacttttcattaaaaatgtattgcataagaaaatcgtgatcaactacaaaa

SEQ ID NO: 238512 - DNA, 1222 bp, Cannabis indica
ttaaaaaaaatgaacatacatatattgcatttatcatcacttaattaaacctaattaaaaagaaaactaattatacatgcattctacgtaacatcaacctagtttatttatatatgaaatattttttttaaaacaatatatatgaaatatttaagtgataaagcttttaagttttattttatatttaatgtaataaataaaaaaaaaatggcacaattattatggtagtgtttgattaaatttttaattttaaattttttaattcacaaaaataaagtaaaatttttaagttttgtaaattttaatttttgtaaaaataatattgtgttctataacaattttttattttttaattttaaaaattagaaaacaaaagtagtgttctataaatttcttttttatttttattttttgaatttatttaagttgggtctaggtccagagtctgagtctgggttcgaggtcgaggtccagggtcggggttcgaggctaagtctgagttcagatccagggtcgggtccaagtttgggtccggaggcaggggcaggggttcgagtcagggtcagggttcgggtctagagtagaaggtccggggcaggggtctaagttagggtcagggtttaggtctggggttcaaggctggagcaggggtctgggttcgggtttggggtcgaggccgagtcctggtgtagggacggggctgcagttcgagtccagggcaagggtaggggtccgggtctgggtccaggtccatgtcaagggcaaaagtaattcttgtattattcggggccatgccggggtttgagtttgggttcagctcagggttcgagtccaggttcagggttcgagttaggggctagggttcaaattcagatctgggattaaggtccaagtccgagtccgagattggggtttggattcgactcagggttcagttctaagctgaggtccagtttgactcaaggtctgagtctgggttggggttcgggttcagggtttgggctggggtcgaggttcgggtccaagctggggtcggggtcaggattcaagtctgggatctgggtcagagtctcatagtcaaagtgtgagtcggaatctaaaatattgattaaggaaaaaaaataatctaaaaaaattgaaagtgattcttttcaagtgaaaataattttatagaatttgtttttagaaaatattataactttttaattaaaaaaattattaa

SEQ ID NO: 238513 - DNA, 1315 bp, Cannabis indica
gctaacattttggctatgtccaccattggaatcatgtggccttgtgccattagaggaaataagacgaagtgaagttgttgtttttgtagccattgaatttccaaaaagatagaatgagatggaaaactttagtatacgagatgcccttttatagtgtttcagaattttgtataaataggctccaatccaaattgccttattagtaatttggtgttgtaagctcatacgtatgcattttggattacgtgaaattgaaaagatacagtttggttcagtgacaaccagtacaagtgtggaccaattgtttcgctcatctctgcatcagtccataaatattgttttattttgctcgttctctttctagagtctctcactcacatacgtttctttctatcaattaattatacacaagtcaaatttgaacttttcttggagcaaaagaaatttgaactttttgtttgtttttttttttggacaaaatttagagaaatacacctttgagacacacgtatttgctctttttggacaaatttgtatattaattatgtgaccattttttttaaaaaaaaataaaaattagcaacactaaccaaaaacttttgggatttttttttacacttatgatacacacgtatttgctatgatatttaggagaattttttactctactttttttttcatgatcgtgtatattttagttacttaaaacattcaataaaatttttgaaaaattttaaaaaaattttaaaaaatttaacgtatcgaaacaaggttcacacaatttgttgcatgcatgcctattttattttatacacgtgtgaaataggttgtttgaactaatagcaaagccaactcaaaaatttaaaggggggaaatacactaaattttttttttttaattttctatttttaatggagatttacatgtaattttttagtaaaaaataaaaaaattgggggaccatgacaccctctggtccctagctctttcaacagtttgaaaagtagtgataagctagttttaggtgaattttatgaagtgtttagtaggtgtatttcagtttgctatgttcattttgtgcaaaattatgtttgttttctacttgtttctaagattaaatggtaaaatttagttatatgaattgaaaataaagaaaaaaaataattaaataagattaatataattaatgaattcaccatggaatttggagttctaagatataatgggtgaaaaattctaagttttggatgcttaacacgctccgtttggaatcgaatatcaactctaaggcttcaagctaaattttaactatgat

SEQ ID NO: 238514 - DNA, 568 bp, Cannabis indica
acttgattccgacttttaagattgcctcctagttggcatatgatgaataaaaaagaaagtataatagtttcttctaaaatttgaattgttccattcaatttatttagagcatcacgaatggataaacaagcaccccccacaaatacactctacattgtaaagtagaaattacacaatatatcggaaaattataaaagtttacttttttatggcataaataaataataatatgaggttataggtttttttttattttttttttacatttatatgggattttttatgccatatttttgtaagaaaatatggaaattccatattgttaaaacaatagaaagttttcgccggaaaagtcatcgtcaccagaaaaactgccgagaaaagtcattggtgctgaaaaagtcaccgaaaaagttagtgtcgctagaaaagttatcaaaaaagtcacagtcgccagataagtcactgaaaaagtgaccatcaccggaaaaggtcgctgggaaagtcaccagaagtagatgtctcagatataaataaaaataaaaccgattctataacataatgaata

SEQ ID NO: 238515 - DNA, 1086 bp, Cannabis indica
catgaaaaaattaatgaccttatagttcaagaacatgatttagtacatgttaaagtacgaaagaaaaaaatcttaattagtcaattataaatggaaatgagcacatgtccagaaaagcacaaatatgctcacatataaaaaatataactttggacacattacgacatgataatataaattagtataatatgataaaaaaataatgtgttaaaacacgatatagcaaagaaaaacacgaatgaactagttcaaaaaatacgacacgtgacaattgttaacaataattttataattaaaaatactaaaacaatgtaaaactagtatacatatatatttatttgagtatttatagataaatatttaaaatttaataattttattaatttatttatatgatttttataaaatattgttaaaaattatttaaatataattgaagctataaaatatacctagaaatttgattctaatatgaaaataggttgacttgtttaagaaaaatgggatggcacaaatatatcaggcctacggattatgttagacctaccctttcaaaatattgacagaacttgataggaggacgatgtacactctaagcaaagtgaagacaacttagagttacaattaaattaattttattgtattatccgagacgtaatatcaaataatgactaaggaagaaaatgaagtagtagtactagtattattggtcatgctttgtgaatgattgctaatatttttaaagttgttaatatgtttaggtggacaatttggtaaaaatattaaataagattggacggaagtcgatgaatcaataatctcaaatttcaatagtttgattataattattctttaaactttaggggatagttttatctcatgtgactggtgataagaattctaccgtctatgatttcgtaaaatatgctcttcgattagatggtgaactatcctggtattatattggttcgagaaagttttaacgtcgattgtaaatctctacttaataaattcataagtaattctaatcattatatgaaaaactcgaaactcgatttgatacatattaatttttggctaattagt

SEQ ID NO: 238516 - DNA, 1411 bp, Cannabis indica
tattaattttttaataaaataaataaaaaattaatatcatattaactaataaaaatcaccataattgttatatttaactaataatttaaataaacttactaattagattaaagataataatactgtaaaatcgatgaaactcgataatttaaaatatcatattgcaataacataaatattacattattagagaacaaacattgcattcatgcacgaaagaaattatattaaattaaatcaaacctaaaacacacacttgaaattaattaaattatattaattttgtgagttaccatattcgtctcacaagtatttgactaatgcatttcgaagctcaatgtgggcttccttatccttgattttttttatattttgtaagaaattcttgaaactgagcattatcatcttctaccatcttaacttttggacttggcacttcaactcgcttatcaattggtgcatttagatcacgttcatcttctattatcatattatgcataataatacatgaagtcattatatcatgtaaaatcgttttattctaaaaacgtgtcaatccagcaataatacaaatctagactgcaatactccaaatgcacgttcaacatcttttctacatgcttcttgtttcattacaaaaaaatttattttggacaacgtggatcatggatggtttgaacaagagtagaccattttagatatatatatatatatatatatcatcagctaaataatagcccatattgtactcttttcctttaataacataattagcgggtagagctctaccttgagcaagattagcaaaaagatgacatgcctctaatatattaatgccattattagatcctagtaagccaaaatatgcatgtcatatccagagatcatagtcaactactgcttcaagaataatagtcgggcacccactatgatcgacatatagtcctctccaagcagttgggcaatttttccatttccaatgcacacaatctaaacttcccagcattcctggaaaacctcgacgttcaccaatgtggaaaaatcttgcaacatcatgagtgttgggtgatcgaagatagtgggctccaaacacctcaacaacagcacggaaaattctcttcaagctttctaaagttgtagattctcatattttgatgtattcatcagtaacatctaccggtacaccgtatgctagcattcaaaatataactattactttttgcaagtctgataaccttagttgtctcattctatcccttcactggaagaagtaattatcatgtctttgtatagcatccaaaatacaaaagaataaaggatgacccattcgaaatcttcagtgaaacatcaaattggtaaattaagaattctctgtaaaatagtcgttgaaaagattattgtaaagcccgct

SEQ ID NO: 238517 - DNA, 544 bp, Cannabis indica
agggggcaaaattgctaattgacaaagacacatcatcattcaaatgaaataatgagacagaacctaacagaatgactaaatttctataaatgtaacagtttaggggaattgttaataagtcgtatattttaagggccaaaattaatattgtcaaaaattcagggaagaaaattgctaattattcactaggtaatatggtcgcacttcacgcgactattttaattcttttaatataaattggaaaataaaattttattaatataataaataataataagtaaaaaatatttcaatatattataatccgaagttatattatccaattatattttatttataagaaaataaaactctctgattgaacccaattaatcaaatctaatctaattataaaatatttgatatcaaattataattaactggattaaattgaatgtataagttagatcaaaattggattagttggatcctaattgaattaattggatcagttattgcatgttaatctcaaaattgagttaaaaattgatccagcctaattata

SEQ ID NO: 238518 - DNA, 1297 bp, Cannabis indica
attttgcaaaagttatcaattataaattttttttttgttaaatgataaaatagactttatattttctaaaataataaaaataggaccctaagctcaattttcaataattttatttttttaatataagacaatttgtaacacaaatagatacaaaaaaatataatcagttttgtcataacatctatagatcaaattattattaagtttattttgacaaaaaatcagttaagggtcctatttgtacaattttaaaaaatacaacatccattttgtcatttaacaaaacagaggatccaattattagtaatttttacaaaacacaggattcaaaatggtatttactcttcaaatattcccctataataaaaggaatgaacattctttggtaaaaattggtgtcacatattgtgttaaatcaatctaaatttaacgtatcaactaattttttaattattaaaaaattaaacttttaattgagtcaacaaaagtagttaatatatttaatataaattaaattagtagatgtgttaaatttaaattagtttaacgtaatatgggacaccaatttttaacagagaatctttattcatcataattaaagtggtcatgtttctgtgtaagagcatctccacccattggagtggtctatacaaattttatcaagaattttttgcagttaaaacctctcaactatcattctatttgtacttaaccctctaagctcaaattttgacggtaaaaccctccaaactacttaactgtttttaaaatttaaggtgtcatccattttctacagttaattgtcaacatagaatgcttatgtgtacattcttatacatatgacacatttatattagtacacctaatattattatttaaaaatataaaaatatttcaaattttttagtattttttattttttaaatattttatttttgtatataatttatttttttaactaaagaaaactaaaaggcaacacttaaaaaagtgttgtctcctagagtgttgctaaaaatataagtataaggcaacaattataaaagtgttactatatgttgtaacttaataaaaatatataaccacactaattataaaagtgttgtcatatatttatttatttttaaaattataatattatttcaaaatattgtaattattttttaaaataaatattgttttaattttattacatcaaattttacaatctatttttatatcataataaaaaatttaattttatataaatttaatttagtaataacacaatccgattatgttaaatattcaaatttat

SEQ ID NO: 238519 - DNA, 845 bp, Cannabis indica
atgttatcctaaagtgtgcacagaggacgtggcccttacacatggcacaatctagccatctcattaatctagtaaagaactgttgggatttattttaccaggatctaaatttactaacatgtatgtttcattaacaccctaaacatgaattctctaatacgataaaattaaacacataagagtttagaaaacacttacattgatgcagcggaataataaagactccttctgctcagatctctaacccttgttcctttatgtcgcagagtaataacaagatctgagcttgaatctctttctcttctttgggttggttaccatcgtcttccgcactatgattgagtacttgatttgctatgtgtgggcattgtactctatcactatggctcgaattgatgaagaacaatgaataaggtgcgaaatcactatagaaaggagtccctcatctactagtcaacaaagaatgaaaactaggtttaagttggtagaattgagttgttggatgagatgagagcatcatgttccttttatagtatttcaactagggtttaggattatgtggattaaaaaaagaataaaataatgggcaaaaattctcactaaatggccggccactaatgggcctcactagttacaattttgccacattatttcaacaacttattcttctttcaataataccatattttccaatttcattcctataaatatcaaaactatttatttaataattataattaattatcaaataaaatttctatttatattatttattaattagacctaagaaagtctctttcagtcaaaacgtcataatcaatctgaacgtgaaatttaaaagttct

SEQ ID NO: 238520 - DNA, 1108 bp, Cannabis indica
aatttcacaccacagctcggttcttaccccccttttccttttttgtagataaacccgggtgatttttggggtggtaagtactgagtagatgaggacttgttacaattactacacgaggaccatcctaggctccgtgcaagttcgtcttcatctagtgaaagttcatcatccagctttgacgagtgggaagtgacaagtgatgagtcaaaatctccacaacccatcccacaacaccattattacctcgaccaaattagtgatgacaactacggacgattcattgggaattgaattggggactaaggcgatatttacccacttctttgatatacaaggtctcagcaggggtttcgcacactttaccagttggtgagccaaaacctttaaagagacctttcgtgctggtggaaattgcagtcaatgttgcataatttccttcaccagaatgtccgcccaaggcttaaaaggtggcgcaaactaagcaaacttacaggaagtttcatccgaagattctcatttagctcagctaatgactttggctcgtgctacagacgagggttctgaagtggtgcctattggtgacaccgaggtgtagagggttaaggatcagggtgaaacccgtccagcccaagttgaggtactaatggaggaagaagttgatgctacccgtaaacccttcagtagatttggaaaatacaatgagttcgggctgcctattaccgcacgaggacaactttaaatagaaaacatccattacgttatagaggaatacaaggaagcccgcccatcctataattaagaaaggcctaaggacacgtgggtctctccccttctaccttaactgtaataaggttgacaaacttagatacaaatgggcttattgaaaatgtcgtagcctttcttccatttgatggccagctagcgaatgccttggggatgacctatatgcgtggtctgacccacatgctctgcaaggagctcttcttcctcttcatccatattttcaaagattagaaaaatattataaaatttgcccaacacaattttcaccgaaggggatcaaatacttggttgtattgtatatactttacacacaacaaaaatagga

SEQ ID NO: 238521 - DNA, 1260 bp, Cannabis indica
aataattctgttatatagccacattttatgtagaatagatataaaaataattatattttaataaaatatacacatataatttataaatttatttatgtaaaattaataattttattctaactaaattagaatatatatgtatatacactcaaaaataattttattataatatagtaatattaaggattgttttattgttatttttgttatattgatattaatatttttgggtgttttgatttttaatagttacaaattttatttaattattaaccttttaattaaatattatttgcttattgtattctttactgtacttctgatccagtgcatttcattatacttagtttgaataagtagattaattttccatagaaaagaatgtatatatgtaatttaataaatatggctttatagaactatttgatgaactagtcaaaaaaaaaaattaatttgaggaatatttattatgtatataaacataaatctattcaacaaaacaatgaaaaaaaaaaaaagctttgatgaatccactgagtgcaaaagaggtcatgagaaaagtcatgtactaaaactgtagaacatccaaaatatctcaaaaattctatcttcaaatataagggagctagtaacgagttacctttatattattttaattgatttgtcttattttattttaattctaatttcacttattttttgccccccctcccccccagttttgtaagttgttaaaaaaatttcttccaattgagattgcattggattcgatatgatttttatttcaatttcgtttaattactagcatattcctcaaactatcactccctctgtgtggtgtgataaccaaaacactgtgctcatggctgctaatcctgttctacatgcacgcacaaaacatataaaaattgatctatattttgtgcgtgacaaggctctacagcagcaaattcttgtcaagcatgtacctgctactgcacaaattgcagactgtcttaccaaacctatttccagctcgaagttttctgattttcgaaccaaactgagtgttgtgtctaaagccacactcagtttgcaggggctattaaggatataggttagttaagacagttagttagttaggtttttctgttatttgattagttgaatctgttatggttcaactcttctttgtatctgtatataaaacccctctgtaaccttttgtctaagatcaataacagaattaccttctttgttctctctttcttctttctctct

SEQ ID NO: 238522 - DNA, 2202 bp, Cannabis indica
tatattagataaatttaataaaaaggaacaaagagaaagttttcactggtctacatatatattatatgtatatattatcatcacgagggttttacaaagagaaaccaacagaactcagttggcagtatgcccacctcctccatagatcatatagtaatagcaatatgtatatatgttatatacagaaaagaaaatgaaagaaattaggaaaggaggtggacagaatgccaataaaatctgtgagaaactccttcttaaacccatatgaaaccaaaaccataatatcagaggtagcatcctatgtacatgagttatggaagagttgagagaaaagggcagatgggttctatttaagaggtggtgatgtgtggaaggaataaatgtagagagagacttaatttgtaagggtttagagagagagagtagatgggtaaataattgatattatttggtaaggagagagaatgaataataatattattaataattaatgagattggatggttcattctctcatagggagcatatttggaaggatcaaagaaaggatcatcatagttattctgcccctttctcctcgtttatgatgaaacacccttcacctcactccatcacacacactcttttttctttcttttccaccctttttccctcgtttttgatgccctacaaaagcacacacacatactctttctctctatatatatatttataaaaataaataaaatggaaaactttgagaaaatgatgagccaggtaactagggaattaagtgttccaaaaatgacaaaacttgagggaaaataagttttcagtaaccatagcttagcacctttaacaatagtttcttttggggaactcgtgagttgtcgtgagcgatctctatctatctatctattttatctattttttttatgtgacattaatattaagatgatggtgactataagtatgaggtgatgaaggccatctggaccgttgaatgagtaaatatgattgatgttgtgggagccatcggattaaactgtcaaatcgtaatagcatgataaatttatttacattttcatttaggggaatatttatttaagatcacaggttaattaaggttcttattttttaactttgatatatataatttatgtcttttaaagatcattacaaatttttcctaaactattgagattgttagatttaaggatttttatctaattttagtaagaaaagtctaacataaatgaaagttgaggagacatgatttggtacatatcaaagttcgagatccatgatttggtagatatcaaaatttgtggagcataatttagtatataaacaatcactgaataagtaaacttgaatgcaattggacaaaaatccttaaatccaataattttaatagttcagagagaatttttaacagcaagaaaagttcaaaaagcatgatttgatacatgccaaaatttaagggcaaaaatcctaattagcctaataataataataagggatatttgcggcgaaatctctttaacatttgtaattatatacatatgattttaataaaaaaatgacggtaaaaacgattttgttgcaatcatactatttttcaatcatcaaatgttaaatcaaaaacacatggcgatatattatagactacgtattaaataagctaaagaaataagtcgccacatgtttccgagcgctgacacttaacaaacttaattgaaacttaacagctaaaaaaatatacgactgcaacaaaatcctaagataagatagtactgccgctactttttttttgagtgtgccgctactttttttaattatgatcatatgtgtaataattacaaagtaagaagatttcaccgtaaatatccctaatcataataataatgataataattgttaactcaaaaatttagagtagacttctaagtcacacctgctcgctagattgacaagaataaataagtagataagtatttaatagagagacgtggcgaatttttagtagttcaccccttacatcgccatagtaatggggttacgtctacttcgagtttttatttctcacgagatggtaattacagcaatagactaagtgtcagaagctccaaattctagacagatagaatctagagagagaagctctgacccttgtgggtaattttctcaatgtgaaaatgagctaatggagctatcctttta

SEQ ID NO: 238523 - DNA, 773 bp, Cannabis indica
tacagtgtcccactaataatagttggcatcatagatcacgatatttttttttagaaaaattaataattcaataatatttactgatataatttattggatttgataaatatttagtattaaaatattcttattatattaataaaataataaaataataaagaatataaaatttggtgtaacttttagtgttgtgattggaattgataaaaaatttagtattgaaatagtagcttttaggaattaatttaataccaaatttgagttttaccattagagatggccttagtaatcataaaataagagtaatgttattgttttttctttaataagaaaaaagaggaaatgttaaacttaaacatactctccaacgttataaaaaaaaatactttatatactattgtttaacttttttttacgctatgtttggtaagaaggagagagagttaaatggatggaaagttgatgaaggatggagaatataagggagggagaggagagtaatgatccttttatattgtttggtaggaaggatgaagtgattgaaggatagataattattaatttataaaattactattttattcttataattattttttaataatatttgttgagggcatttatgtaatttacaataattaaagaggaagagtttcaatccttccattattggagggattacaaatgggaaacttacaaaaatactggaatttgagtgaatttttacaaaattaatgtcacacggaattttttttcaaaaataccgtgttttt

SEQ ID NO: 238524 - DNA, 509 bp, Cannabis indica
atttaagctacaaaatgaagtctggttggagaaatattacatcaagtttagcttatgcaaccttcttttttttttttgaaaatagcttatgcaaccttcttgaagctgtcttaccattgaaatattttaaaataaagtgttaaaaataatatgaaagaaagataaataatattttttaagtgactagtgatttttgcaccccaaaaaatttcaccagtaaagatcttcttctgttaatagtattttttattattattattaaaaaacattatcataatttttcgaaaagtacgtatcatgtacataatgcaattcatacaccacatattcctaaaaacattaacttaaaatccgtaaaaataaaagtgccacgtgaccaatatattatttgacatatactctgtattttttaagaacgatttaaaagaaaataataaagatgaaatcattaatgacataagagcaaaagtaaaaccaaaaacaaaatagtattcaaaagaaaaataaga

SEQ ID NO: 238525 - DNA, 705 bp, Cannabis indica
atattatgatattaaaaaaaactaaaaactaaaataaaattaacatacgtgacttgacacgtaacatctatctagtatatatatattagctcaaacatgctcaagaatcgttattatttcaaatatataaaattgaagtcattaattaattgagatttttttatttttacacttcaaaacatttttttctttatatttttacggaattccacatagaaattcctatgaaaactaacggagcaacttaaattgtaacttaaatccgtatagcaacatacatagaaactactgtagacaccacttgagaaattcaaaccgtaaattaaaaaaaaaaagtaaaaaataatatacgaagtaattctcctattttaatttattttttattttaaaaactaattctttaatatgagaattttaatccaaattacagactcactcacaagtttttatttttgaaagggtcatcacaaatttttttttttttttaggagttactagggtaatcagtcatcacaactcaagttcaagtcttagttattaaataacttttttacgagaaatttaagaaagaaagggctaaatttggtaaatttaataatgtgtagcgccagatcccctttcagaaagattcaaatccaaatggcagtctcttaactttattaacaaacccaacaataattattattttttcattttataaacact

SEQ ID NO: 238526 - DNA, 1026 bp, Cannabis indica
acacaaatcatgattagcttgataaatttctcggggaatttgaatgcaaacaacatctcttcaataaagtcccattcaaccgtatcataggctttctgcaagtccaatttgatcatacaactcggcttcccattcttcctcccatagtgtcttataaggtcctgacaaatcatgatgttatgcccaataaaccttccttggataaaaccactttgattctgagagacaatgtcaggtaagactgttttcaaccttttgcatatcaattttgtagctgccttgtagataacattgcagcaggcaataggtctataatccacaactgaattggggcacttattttttggaataagagtcaaaacagttgagtttatttccctaagaagcttgcctgactgcaaaaaggatgaaatagcctcatagatttcagtaccaatcaagtcccaattttcttggaagaaataactggaatatccatctggaccaggagctttattaccaggaatgtcaaagataacttgtttgacttcttccaatgagaaactctgaagaagcaaatcagcttgattatccgaaacactcttcccctgtctaataatagagagcaacacctgccttctattttgcattttactaccaagcaacatcttataataatcaagaaacatagcagaaataagctgaggatcatcagtccttaccccttgtacatctgagacagacaggatgcaaattctggctccttctagcacgaatactgttatgataaaaagctgagtttgtatccccatctttgagccatgtcaccttttgccttctgctgtaaaaaaacacatgtatgcatcttgtgtagttgcaaactgttctcgggcttcagcttcatggacttttaaattttcatcaaaaggttgttgttgcaaggcattttggcaatcttgtaagttggatttttgctctctctgcagcagcagccaagtcacaaactgtgttttgttcagctgtttaaacacagctttcaatctcttc

SEQ ID NO: 238527 - DNA, 930 bp, Cannabis indica
acttttttagaacgccattgaagtatagttttttttagatgtgctaagagatgctctaagatggaatttaattgggaaaaatataaaaataagaatgagaatgaaattatgaatataaatgaaataaaatcaaatttaaaatacattaaaaaattgataaaaaattataattttttttatcttgcattagaatggtgattcctttcagatttaaaagttatttcattaaaatgacatactaatactttaaaatgtaaccaaataaaaaattagaataaaattatttcttttctattatattctattttattacttccaaccaaaaataaccaatttttcatagtggtattctttaacaatttaacacatggctagtttctttctatctaacttgagggtaagttggaaatgctcaatttaacacatggctagtttctttctatctaacttgagggtaagttggaaatgctaccaataaataataatcaagattgcataataaataatatgagctactcaatatatttggcatgtctccctctctgtccctaatatagggtttaggctattgttatatcttcttataacaatagggttcaacatatcacttaagtgatactttatgaatatgttgtaagcaatttttaatatttaatataaataattgcggcataagtacttaaaattttatatttgtaacgggcataaatttaataattttttagcggtataaatacacaatattagtaaaatgtaatttttatcaaattttatctgtacaaactctattaatattttaaacatgagacatgtaaaattcaaattctaaattattagttcttgagggaaatatgtagttcatggtatttccaaaaattaactctagttacaaagttaagacactaaaaaatacttaagtcgctaaaaaaa

SEQ ID NO: 238528 - DNA, 843 bp, Cannabis indica
atatatatataaaaatatttaataatggtaaaacctaattattctcaccactttctctttcttgatcaattaaaagtctcaatcaatatactaacttatttatcagccaatataaaaaattaaataataataaaaaaataaaattgaatcttcttttccccttttccgcctctttctctttttataataataaaatataaaatataaaataaatataaatatagtataatgataaagttgtaacatttagaaaaccctaaaaaaaaactctttctctcatttatctctcttctcgtttcttctttgccgtctgaagctcggaactgaagcaaggcttcaacgtttaactcaccaccatccgacgatgaagtagctctaccagcagacgacagaggagctccaccagtggaggacgcacccttcggaacctcgagccaagcttttccctcaccggacgatggaactttgcaagtcactttctggtttctccgctgcacaagcaggccactaagagcttaatcgtctctctcgtttgtctctctgtggttagccattttaaacctgaccttctatagtaatttttcgattctctgtttctctctctcttttcgttgtgcaggtgtgcaacggcagtttggggttcgtgaggcaaggtggtggtatggggtttgtggccgacgatggtggcctgaaagttatggacgacgatggtggtctgggggtaatggacgacggcgggcagtttcatactggatctaattaattttaactttttaggtttctttttttttgttccaaagtgtgttcataccattatttatatttgttaatgtttgaatcata

SEQ ID NO: 238529 - DNA, 2277 bp, Cannabis indica
acccaacaaattaggggccaaaggctggaagcccaactgcccaagcaggacactagcaaaggaaaaggtccttatatctcgggcggaggacatgaatacgggttggaggaacgtccgactaactatgtataatcgcccaaacaggatggaccatctaatgccaggcttgaggatcaaaccatcagtcgactagtcgatgatcaagtttttcatagtcactaccttggacgagacgaccataataacttctgacctagacttgaggggaggagagatgatgtaccttcttgaccagttgggggatcttaggcacaggtgggcctacaaaattaggacaaaatagtccaggtttatggtcataaccaatatgtcaaccaatgataaggccaaaaaaggtctcatataaacatactctaacaagaatggcgacagagccaaaagtgggcttaataatgaaaaccgtcaatggaggcatgattatcgctagggcagcaccccaataattacaatcaaggtaacagccagattgatgataatcctcccaggccgataaggtccaccagccaaaacttaaacaagaggcctaaggctgactccgtcttccaaaggatgggacccaggcctggaaatgaccttcaaaatgacttaaattgaagaagaggaaattgggacgaacattttgtcccctcgcataataatcagcctattaacatggataactacatcccacagaaagagataacttcgtacccttcaaattcccaagggaccaacaagtgacacagatcggtcaacaagtaggccaagttgatctagggttacaagctcaattgtatcaacttaagagcctaatataaagcctgaccgccccaaaactcactgacctataacacaatcagatgagaggttcaccatttattgcatagatcaatgccttagacctaccgaccaagtttagaatgccaacttggaagatgtataccaggaaggatgatccattgtctcacattaagtactttgagatgcaaacagacttgcaaggagtaaagggcgacattaggtgttgaatttttccaacaacattagtagaggcttcccataagtggtactttaagctaacttctagaacgcccttgtctcagagttctacacccaattctcctcctctcaaaaactcctcgctcacctagaagacctggtaaaagtgaagcaaataccaagagagcctccaaaagattatatcagtcgattcatgactgaggcaacaaaggtgaaggggcttaccgaagaggtaagattagtcgcagtgctaggagatatcaagcccagaggtgaggtatggaaagatataaataggcttactacaggttcaatggaagaatttctggatcgagcgtatggatttataaagctcgaagaatcagccaggcaagtggacaatgtcgggcagagcaaagtcaacccgagtcacaaaccctccacaattatatcccatacatccattcagcctaaccagaccttccagccttaaactatcaagaacaacaataatggtagtaaaaggtctaataacgagaataaccaaaataatgggaagaaggggaagtataacgtcgatcagtgaaacccccaagaaaaaccttcaaagttcactaccttcactattctcaccaatgctcgggagaccgcctttattgaaacctagtcagttgtaccgtacaagagatctcctccaatcaagaaagatatgagcaagagggataccaccaagtactaccaatttcacaaagattttagccacgttgctaatgagtgcaacaacctgaaggaggaaattaaattcctcattagaaaaaataatatgcagatacatcggtatattaagaccgaccgtgattgttcaaaaggccacccaatagaacaataaccagaattacttgatgcccccaccagtggacaggcatttacaaatgattattgggcccccacaaattgctagagacttgagaaaagtaagagagatatactcagaccatccagtatgaacaaaaagatgaagaagtattggtcgtggaagaatgaaagccaaaacagccgcacaaagatgaaacaattgtatcattcagtgaggaagatgatgctcgtgttgtctacactcataacaaccctctggtcatcgagtgcagaatgccaacatgatagtggctcggtccatgattgacaaatgggcaaaaattactagaatggccagccacttaatggaccactttctagtta

SEQ ID NO: 238530 - DNA, 733 bp, Cannabis indica
gaagagtagtactattattgaagataaaagacagacttttcaatccgaggttgaagaagaagaagaaaaagatacactcatacaaaaaacaagagcataatgctaaagagaggataagaaggatgaagattagtgagacttacatggcccttggttccttgcttcctagtactcgactgtcaaagctcaaggtataatttcagtgttttatttatgagcactagctactattatagagagtggtgtctaattagaactaataccttgcgattggttaacgatattacataaaagtcattatattgaattatataaaatttaatacttaaatgcatcaatatagcgatatgacactttagatagtgctaggcaccactaccttttagtatttgtctttatttatagatattttgtgtgtatggagaactttagggattgattgattcatgatttaaaaaatgtaattttcaaataaaattttaaattttgtggctaaaaatatgtttctcaaaatattcgaagtgtacacttgatggaagagaattatagccttattttgtcgaaaagtggagagaaaagagtagagatcagaataagatataatttggtgcatgttaggcattataactaaaaaactattttttatttttaaaaaattaaaaattattttttgaaaacaatttggctcgtttggccttgtttttttaaaacagttttcagaaaacaaagttac

SEQ ID NO: 238531 - DNA, 958 bp, Cannabis indica
gggcgacatcacttattaattttacttattaatcaatactttgaatattataattttgtaaatacgggtttggttagcctgtttgtacacttagttagggatgtgcagaaagtcatccaatccaattacaaccgaccgaatcgatccaataaaatcggatatccaatcataattagatcatatcggatgtaaattttgaaaatccaattggatcggacaaccgatccaatagataaccgaccaatcgatccaattatcatctaatagtcatccaattatatttatatttttttaaaatacatttataattttatatatttaatatattttatttaaaaatatttattaattgatttaatattcatttaacacatgatattaaagaaaaaaaccttaaatttaaaatattcattctcatctacctaaactctaataaaattgtcaatgcatattgaataaattttacttttagtggttttattatgaaatcaatgagaattaggttggactaaactaatatttattatgtatgttggattagtaagttttaaattatatatatatatttttatatatatatcaattttttttaatgaaatcaacttaaatggtagctaaaataaattggataaatccaattcaatccaaataaaaaacaactcaatgtgtctaacggttggagttgatccaatccaacacatctattggatcgaatcggatgactcaatttgattggatgaacaaaatttaatatccgataaataattaaattggatcatgggtccaaaatttgaaaaaaaattatataaaaaattaataaggttaaaacttaatacaattttattaattagttatcatcaaataaaagatataatttatttcatatatatataatttaaaaattttttaaacacgccgaggtgcgaattgttcactagtttgcaccataattaagatg

SEQ ID NO: 238532 - DNA, 2101 bp, Cannabis indica
tcgcaggtcctggcgcaagtctaagtccttgttttggtctgggtctgggtatcgatctcggtctaagtccgtattcgtgatcggttccgcgtctagatccagttttgggtccgttcgaattcctattctcgggtcatgattcctgttctttttctaattttgggtctcaggtccgactctgggtttgggtcctggtctggaaatggttccaagtttgggtcttgataccattccaatttcaagacacctactacaggttgggtcccagccccgggtcattggtcaggatttggatcccaatttggggtcccggtctcgttctaatttagatcttgggtcccggtccgtgtccgtgtccttgtccggttctgggaccaagacctggtttgagtccttgttcccactccgagtcttgggtcctgattctggttctaattttgagtttgggtccccaatctaggtctgggtcctaggtccatgtctgagtctccaatccaggtctgggtcttgggttcgggtatgggtccaagtccgtgtcttggttcgggttcatgtcctgaggggttcgggtctgggtccaagtccgtgtattggttcgggttcgtgtcctgagtcttgatttgagttttgattcgggtcagattcctgttcctagactcaaacccagacttgattgaagttcaagtttcagtttttgttcccgagtgtgggtctgggtatgtgttcgggttcttatttgagtttgagtttgggttcgggttctggtctaaggccctgatccagacaccgactacgggttgggtccaagcatggagtcccacatcctaagtcttgaggtgggtcctaggtccaggttttgttctagggttgggtcacggatccggatccaagttctggtctcggtttgggtcccaattctcgggtcacagtccaccatctatgttcaagtcctaggtcctggtgcgggtggaaggttgggtctcgagtcccagtctgagtccaggttccagttttggttcgggtccgatttcgtgtcccaatcctaatgtgggtttgagttttaggtgccaggtccgagtctggttcttaggtcctaggtcaagccccggttttcgggtttggatctgggtctgggtcccggtttgggtccaggtctcggtcttggtttaggtcccaagtcacaggtcccagttctggtccaagtcccggtatgggttctagtcttagtttggatttcggtttgggtcctattactgtcccaggtctgggttctagtcttagaccaggtttgattccaatttcgagtgtgggatcgagtctggatcccagtctaggtccgagtccgagtctgggtacggatccggtcttcagtcaggttctaagtttgggtttgggtccgcgttcggggttgtgtcccggtagtcaggtcttaggttctgggtctagggtcgggtcctgtgtctccagtctggtgtcaagttttgggtcccggtcccagttctggggcctagtttcgtgtccaagtcccccacttaggttttgatccttggtctaggtccgggtctaggttcgggttgtggcctaggtcccgcatctaggtccggatcctaggtccaagtctaggtctaagttcaggtttgggtttggatctcgagtttggctccgagtctaggtcccagtacgggttcaaattttagtctgggtctgcgtcccggtctgagtccaggtccctgttcgggtccgagttagtgtcccgatccgagtcctagtcaatgtctaagtctcggactaggttttggtctgggttttggtctaggttcaggtccttagtcttggtctaggtttgggttggggtccagggtttcgatctcggtatgggtatgggtctgggcccatgtccaggttagggtttaggttttagtgtttagggatttagggtttagagtttagggtttagggcttagggtttacggctaagtgtatagagtttaggatttagggtttaaggtttagggtttagagtttaaggttccagttccaatttcgagtcatagggtacgatttaaggttcaggttgttggatattattttaccaggatct

SEQ ID NO: 238533 - DNA, 923 bp, Cannabis indica
ttagacaaaagtccttaaatttaagaatctcaatagttcagggggaatttttaacggccaaaaaagttcagggggcatgatttggtatatgtcaaagttcgggggaaaaattgctaattagccaaataaaaatagtattctgagcttaatttcaatatttggttttaatgtaactaatttgaaaataatttctaacacgaacaaataaaaaaaaaatataactaattttgttataaaaattgtaaatggagttacattaacttttatttaaacaaaaatctgtttataatattattttatatcattttgaaaaatacaacatctaaaataaaatttacctaattataattaatgaaaaatatacataataattaatgagatttcttttctttttctttttttaaaaaggaaaaaataatggtcaaaactctacaatgttcgtagaaggggtgtaaaatgaaatagtattttaaatattattattattattattattattatattaataataaaaataatgacattgagaatgagaatgagaatgagtgagtgtcttaattaaaaatcttcatctctcttcagttgtccatttttccatttctgaatccttctctgttgtttttcttcctcaatttcactccaaaaaagggaataagcaaaccctaaattacttctctgccgccgcaccagtcagctcatgatcaccactattctctgcagcaaaaatgagctcaaatttcggtacacacaaatctatctcattctcaattttttcttaataattcgctctttatctcaattttttaattttattttgtttgggaatatgatgtatttataacaattgggccatgcacatgcctctgttggaaacttgtttgcaagttcagttcttgaaaattgcggaagtagcttctgataat

SEQ ID NO: 238534 - DNA, 1042 bp, Cannabis indica
ttatttatttgattacaatgttcattactgagttaaaccaaacattataataccattcttattacaattcttattccattacattaccattcacattacaattaccattcccaatacattacattgcatcaaaacaaacaccaccttaattaaaaactaggcaagaataaaacttatttaagaatgaatgaatcatgaatctttattgataagaatagttagtagtacataattaaataagtctaagaatacaacttaatacatcgaacaattacaagagagttgagacaaatattatttatagtaaacaatatttataggtgttggtggagttgtatagcctttttgatggtttttgtaggcacaaccatgtattcaacttctgttgatgacaaggctactactttttgttggttagctttttagtctaatgtagccctcgagagtagtaaacataaaacttgttaggtgccttctaatgtctaggtttgttgcaaaatttgagcccacacaatcaattatttcttccttgaactagttctctttactaaacaccagtatttagagtacgttgcaggtacctcatagtccatttcaatgcttcctaatgtttagtgcatgggtctgaaatgtacttgctcaccacactcatgagctagatcacctcttgaatacaccatggagtacatgagactcttaacacaacttgcataggaaaccttgctcatcttggctcaatctgcacatgttttttggtaactgagatgcagaaaacttgaaatgttgagcaaggggtgttacaaatggtttgcacttgatcatgctaaatttattcaatactttttgtacataggaagcttgagaaagtattatcatgccagacttaggtttcttttatgcctatcccaaggattctcttcgctttatcccaatctttcatctcaaactcatcactgagtttccttttaagtctgtcatttctgcctttgctttgcttaagatttagtatatcatccacatgaagtgtaaatatgtttcgatt

SEQ ID NO: 238535 - DNA, 1578 bp, Cannabis indica
ggaaagaagtactttaaagatctaatctcaatgtcattttttcaaccatcaaataacaataaggagccaatttttctcatgcatgatcttatacatgatttggcaatatttgtttctggtgagttttgttatatgatgaataatatcaataaatgttctcacaaggttcgtcatttttcgtacttccaaaaatgtgcaaaagttgaggagcctaaggaatttgaggagttatttaaagctaaacgcatgcgcaccataatgtggcaacaagattcaagtgatgatcatgtaaagatgttaaatattgagcacttggacaagtcattcccagacttgagagtattatccatagaggacaagtcagtttcaagctatagagcattcttcgtagagggcaagtcattctcaggcatgagagtactgccactcccaggcaatttgaagtatttaagatatttaaagttagattgccctattgtagagatacctaatacaatatgtgagttgtataatttggagactctattgttagagcagtgtgttaaagttactcgactaccgaatgacataggaaatttgatcaagttgcgacatcttagtgttcattggaatttgttagagatgccattgcagttgggaaagctacaaaatctgcaaacacttaaaagatttgttgtgggaagacatagagattgtggtggcattaagctgttgaaagagtttcaacatctacacgggagtctttctattcagggactagaaaatgtgagtagccttgaggaagtttcagatgctgcagcaccattattaaagagtaagaagtttcttagtcacctatctttgaaatgggatcaagagtttgaacctgaacttgatgacttgcacaaagaaaaggagctactcagtgccctccagcctcatccaaaccttaagcaacttgagattcggaattacaaaggcaacaattttccaaattggatgggagatcatcgctgcttgtctaatttagtaagtttggagatgataaattgttctaattgcagcttcttgccattgttgggacaactgccttctctcaaagatctttggattgattgttgtgatgtggtgagaatagattcagagttttattattctacaagtctcgattcttctgttgcaatacaaacaaagccattctttagatctttggagaccttgaagtttagtagattggaaaagttggaagagtggtcatttattgaaggtggagtttttcctcgtcttaagaatctttgttttgaggtttgtaataaactcaaggtgacattgttaggagactattttccgtcattgacagagcttgtagtaattaattgtgaagaactaataccattaatactcccaagagctcaactcatgcaggcccctttgatcactttaaagaagattgcatttaggtattgtttcaacttgacacacttagacaaggcggcctttcagcacctcacctcccttgagaacttggaaattggatactttcgtaacctccgatgtttgccaaaagaactacccacttctctttctgaactacacatt

SEQ ID NO: 238536 - DNA, 1276 bp, Cannabis indica
tacaaccttttgtaggttagatttccaactaacacaatctccataaacagtaaatacaaaccctgtgaataactttctagtgtctaagcaacctgcataatctgaatcaacatatccagttaccaattctttgaattttctagtgctatcataggttaaaccagtgttcaatgtgccttttatgtacctcattacccatttcaaagcagtccagtgaacatttcctggattagcaacaagctgcctacacaacttgcataaagaattttactcattttctctttctctggatctgttgatggtgtatgggagctagacaatttaaaatgttgagctagaggtgttgaaacccactttggaaatgtccattccaaatttgtttaacactttctgcaggtagctcttttgggaaggaatgataacatttgatgcaggtctttgaatgtcaattccaagtattttcttagcagaaccaagatctttcattttaaactcttgactaagtttcagtttaagcttgtttatctctgatttttctttaccaaatattagaagagaaatttatgccagattgcgttaatttgattttatttgcagttttagctccgtttataataatatagcatataccgcttacttttttttttaaaaaaaattgacacgtataccaattgttttgttatacatttaaattattcttttgtttccttttctttgtgtgtcagaaccttttttttaagtaaacgtcaactcatgcatgtgggctgcttgtgtgtcattattttaattttgtagcttacacataacacacacttctcacttccacctcatcacaattttactagtgtcagccatgaaattactattataccctctctaccttaatgtatgtagttaactaaaatttaattaaataagattcaataaacaacttaatttatcctttactattttttttttttcaaatttaaaagttattacatagtaaattatattctcacaaatttcttttataatacctttggatttctgtaaataaaatcaattttaagtataatagtaacccataaaattagttggtatattaggtttattcaaatataaattttagttacttttttttgttaataatttatataaaaaaaaatgaaatgttacttctatcttgttcattttttttaatatcagaatatatgtatattttccacaactcaaaatatgatttaaaattgctaaaaagaaaaagtaacctcatggtatcttaaataattaaata

SEQ ID NO: 238537 - DNA, 1027 bp, Cannabis indica
tcattgtaataaaacgctactttaatgttaaacacatacatgcacatgcacatgtacatacaaaataaattatcttgcaaagaaacaaaaaattaaacatacgaacatacaaagaaatatatgtatttttgttttgttcactaaaaatgaatataaatataaattgtaatcaaaacattcatatgtaattttataaaaatatatattaataatacaaaatatataaagttattatgacgatcatgaaataataaaaacaagtaaattataatgaagaagaaaatttctaaattactggttataatattattaatttatttccttcaatatcaaggtatgggtttttttattatgagaatatattcctataccaaaagaatatattcccaattgttggagagcatatatataaccataaaaattccttaaaaaaaacatgcacactcagtttatactttatatattgattattggtatttgttattaatagtgttgaacactactactgcattagcaaattcttttcataaattctttccttatttatggccaccaaagacaaagaatctcatgtagcggggagaacaagttgccttgctcatgtagtgtatgtttctactctttgtcgattgtaccgtggttaatttgcatgatgagaccatctcctacgtccttgtcatttggctgcagctcaatgctgctgggtgaagtatgacgtttcctggaccggtgcatcctttctttccaagctgctcgtaattatacgcgttgtctaattgcgcgcatgctggaccatttggggagtaaggaatgaaaaggtttggaaaaataagtcttctaatgcatgcctctttccttttgcatttgctattagttaccttgacaattatgacatcgaagatatattttttagtgaagagtaagttagattttcggtatgcatgaataataaggtaattctctcatcaattcaattgcactatataaattaatagaccgaaaaaataaaacgggaagtaatattttt

SEQ ID NO: 238538 - DNA, 880 bp, Cannabis indica
ctcattacatttctctaaatttgaagcaaatctgtctggaaactgcacatacttgataaatctgtaaattcacgtcgtttaggaagactaagcatttaactagcaggcagtttcttctaattcccattgcggtcttcatacaaccataactcatgacgtattttgaggtctttcaaatcaaatcttgctttgttggtatccttggactttcccttgatacttaaaagagttctaagtatattgtcgcacacattttcttgatatgaattatgttgagattatgtctgagagacatgtccttccaatactctagttcaaagaatatactcttctttgaccaatttagctcagctacaaaatgtttacgcttagctctaccaaattgtttatgttttctaagcaaacaaaaatgtatcggctcgaggtgagctaaaacatttacccctaaaagttctgaaggaggtggtcgtttctcaaattttctatcttattttttactttttcgtcttaattcatccatttcaagaaaccgtctgtgcccaacataattaatatttctacgcaatctaatggaagggatgtgttcgttacaagtggggcacaccttgtaccctttggtgctctaaccagacatcaaagcatacactgagaagtcattaatggtctacaaaacagtagcacgtattgtaaacacagtcccattataagcatctcgagcttggacacctgactcccataactctttctattcatcaattaatggtctcatgaaaatatccatgtcttttctaggcgtagtgcgccctatcaattgagactacatcaaaaaattttgctttcatgcacttccaaggggataagttatacgggactaagataa

SEQ ID NO: 238539 - DNA, 1169 bp, Cannabis indica
aattttatttttattttcatttcatttgttgattttgtttgtctgggcaagagctaaggctggatctaggatccgagtccagcgtttatgccgagtccagggtcaggggctaggtttgggattcgggtcagggtcggggtctaggctctgggtccaaggtctgagtctgggtcagggtcggggtctgggattcaggttgaggtcgggattggggatgggtccacatccgggttgagtccagtgccaaatttgggtctaaggttcggggtcagggttggggtcgaggtcaaggttagggtccagggtcttggttgaggacagggtaggggtcgagtccaaggtataggttcgaggtcctggtctgggtcaagcattgggtctagggtccaggtcagggctgaggaccagagcctgaacaggggtcaagttcgggtccggggtttggggtcctaagccagggtccgggtccggtccggggtccaagtctgggtttaggtcaaggtcgaggctggggtcctggcctgagactagggctaggatccatggttcgggtttgtgtaacaccctactagattaagcgtgttatcataatttttacattattgcacacctttactaatcaaagggtttattgtaattttttataatactagactgatattgacaatagaaaagatatcataaacttaccgttatatcctttttaagtcaatatcacttagttattcttagatcaattgatctcaatcttgagatggttaagctttaatttagcctaattgtattattcgagttctttgacttattcgttactcgtttacctgtcggactagagaactcgggagtgcaattgagttagaattttaatcaaagatatggaatctataaattttataaatactagtaaaataaatagttttcttagagcatggctaaacgagttaatggtggagcacttatttcagtaattataatagtttactgaaatattatttacaaggagctaagtgttttaagggtaaaatacatcgaagagtaaaacaataaatatatgcaaactatatgtagagaatcattagttatttagattgaaacaatagataattataacgtatctataattagtatatagagcgttcaatataattaagagtataattccaaattta

SEQ ID NO: 238540 - DNA, 1039 bp, Cannabis indica
gggatagattttgcatttcaaaacacagcttcataagttggctagccttaaagagccgtttgtctaccttggacagactttgtcgacttaatcataccaactcttccttgtgcttgttgtgtagtagtggagtggagagccattctcacttttttttttattgtatttatagcagtttggtggttcatcaaatttggctttggactggtttctagttagaaaaaagagctccatgatgtcttaaagtggatttagaaggaaaaagttcctagaagtaaaagaaaggttcttttgagtgtcattacagccacaatttaattcatttggcatgctagaaacaaggtgctttgggagtaaaaactttctactgttaatgtcacttttaattgtattgctaatagtgtttgtgctaaagtgaactctttaaaactaagaacttgagtaaaatagatagtgagtgggtgaaagttttaacaaaaactttgtaagttatattgtaattgttgttgttgagtttaataaatttttctgaattaaaaaaaaatagtaaaaaaaaatgtaactgtaaagatttgtaataacaaattggaaacttgttattgcagaacacagatttacagtagcagaaaagaaataatatagtgcagaatattaaaacttaacacaagagacttatatggtaaacacaaatttacagtagcagaacataaataatatagtacagatttgcagtagcctagggaatgataattgacatcaaccattattggatgtataatgcctttaatgaacttatatttgtatagtacaatatgttagctatagtaaattattatatgttgacaaaatttgcactatgtatacacatggtcagcaaataataattgattattatagagagctttatattaatatatatcaatctcacataaaaaagtatgtactaaaacatgcatcatcatgaattgttcataacactacaaaaataaactagtatgtaaaagctttgaatgaatattgttcataacacaaaacactc

SEQ ID NO: 238541 - DNA, 1394 bp, Cannabis indica
atcaaacaactaccattaatattcaaaccaaatttgatcaatctatctttgatctaaagcctctttttcagagtaatcaaacaataaatttatacttggaacactattcgatccccaaataggactagtgtaatgccacctgccatcatcaaattcttcaacaaatttgtacaatccaacaatactatagttttacattgcaagtctactgcaacaaacacattcatgagctcatcttaatttgttgtggaaaattgtattccagtactagggtggaaggtttgtagctccactaattctttcctttcaagtaaacattatgaatcgatctatttgactcacaagttatctttctttttttcttgcccaaaaaaacttgcccatagcacatttgttccaaaaatcaacatctctaaatccatgacccacatgttttttagtcttacaagttttagtccaagcaacttggataggccccttataatcaactttacccttctataagaaagctcggtaaaattgattgattctcttaataactatctttagtaatatcactatttgggaccaaggtatttaaagaaagtagaacagagtttattagaacacaccttctagcaaatgataagtttctggagttttgaagacgaagtctctgcatcaacttatctaccaagcattgacaatcaacttttgttacacacatgttgctaattttatccccaaatagttaaaaagtagagatcctctcataaaactagtcattccagccaatcttttccaaacctcatccttcaaggaaaggaccataaatggtagacttacctttgttcgctagtgagcccaaatctttctaagaaaaaataaaagggaaatttgacattccatgctaaaaaagggaacatggtgtttaattgtacctaattataacacatagcaaacatataccaatctttcacttttcttccaaaaatacccttctcaattcaaacttcccacattccctctacctacattctctctcttctttccctctcccaaacacacgacaacccacacccagaccaacggacggacgcacgaacccagaccacgaaacccacgaaccccaatcgcagacgaccaccagacgacgacgaacccacgacgacgacgaacccacgaacccacgaacccacggccaccagacgaccagaccacgaactgaacccttgaacccacgacaacccagacgaaccatcgaacccactccaatcgaccccatcgacaaacgcccgagcgaacaaggagacccagtcgaatcccacgaaccccaattgcagcaatccaggtaagtttttgtggaatttttcttgaatttctcctttaaaatgcatacatttgtggttgaatct

SEQ ID NO: 238542 - DNA, 686 bp, Cannabis indica
ctacttgtagtgaaattgtatatagctggtttgactgtgatcttgggaggttgttcaacaggttgacttgtgggtggggaatgtggcacttgaagtcggtaaagaccttcagttagggtaccccgaagaagtgcttgcttcgtgttcttgtcctttacaagacaacaaatatcatcaaattcaatggttacattattgtgcttagtgaattgagatatacttaacaggttcttggtaagacttgggacatgtaaaatatctttgagaagtaaagatttgtgaggaaatttggtgggaatggaagaacaaccaattttatttatggagagattagaaccattaccaactaccacttttgccttgcctttgtagtctgttgagttggtgagagtttcggatgtattggagatgtggtgagttgccccactgtccaggtaccatgctcctgaggtgtcatttgttgctgcagtttcgaataatagagcttggggtgagtcattaggtgcagtcaatgatgatccttggtttgggggagggccattgaatgtaatatcgaacctatgataacatttgagacccgtatggccagctctgccacataactggcagattggtctgtttccccttccccctcgattgccatagtttccacggcctcctcgattgcccctgtagcctcttgatga

SEQ ID NO: 238543 - DNA, 906 bp, Cannabis indica
gaatgaaaacataggaaaatgaatgagagtggaaatgggaataggaatagaaatagaaatggaataaaatttaaattacatgctgaaaagtttaaatgcaaccaaacaaaggaatgagatgaaaattgtttcctttccattccattctatttcagtacctccaaccaaacaccacctaagagtttgaaatactcgagcataactcaattaaaacatgctgaaagtttaaggtatgagattcaaacctcagctgagccaatttaacaaatgggtaactactaactcttttgtaaaaaaaaacaaatcaagattttgaaataaatcagaacacaaaatgaatttcacttgaagttaatgcaacaaaacgcaaaactggataaatggaacaaatatgtcaaaacaggaaacgaaaatgacaactgtggctcaaaaatcaaaatataatttgtatagattttagttgtttctaaaatatttagtataaaacacacacacacacaagaactcgtttaaaacataaaagaaacagatacatctcaatataatccaccacagataggaaaacaatcccttggttgattcagtaaaataacctgaaatttagatgtagttgaaaactttactgcaaaagttaacagaaaacagaccgaacaagctcttgttgccaaaaaaaacacatatatccaatatagacaaagtacttgccaaacatgcatgtaagagaagatacttccaaataaatttaataataaaaaaaaacagttcatggattgcaattttcttaccataacagcagataataacaaggtatgcacgttaaaatgtactcgtaaatttttatcacatatagcaataaccttcattatctttttgttagacatagctagtgtaaatttaatcatacta

SEQ ID NO: 238544 - DNA, 577 bp, Cannabis indica
ccctttctttggatatattgatatgtctagttttaaaaatggctcttaaccttttaaatatcttggaatggcaattagctcaaaaagaatttctaaagcagattgtgaaggtttagtggagaaaatgacaaccaaaatcaaaacttagagttcgaggaacctttcttaagcaggaagaatggttctcatcaactctatcttgttgtgtaacacttattggtcccaaattgttattttatcaaaagcagtaattcaaaagattacacaaatttgtcgtgcttatctttggaaatgagtgggcatgagcaatggaaatggaaaagttgcatgggatgatctttgtaaacctaagaaagatggtggcttgggtttcaaagatatagttttatggaatctatgtgctattggtaaacatgtgtggctatttgacaatttttgagtaaaatgggttaatgaggtgtatctcaaaaattaagattggtgggactaccaaatccctttagaggctagttggtattgaaaaagaatagttcaaaccaaggaaataataaaagaagtcttctcccaaaaagacttt

SEQ ID NO: 238545 - DNA, 798 bp, Cannabis indica
gaaaatgagcaaagtgataagctagaataattaaatccacttagaatgcaaattcaatgtaaatgtcatagaggaatgcattagtaattaaattttgtcaacccgaaatataaatgaacatatgatttttccaaacctatatgttatgggctctcaagattaaattaacatattcctatgcaaatctaaacttagagaacacaaattaagtatcaatttcccatgggtcatacaaggtaaatattatattctcataccatctacaaatcacatttttctaaggtgataatcttgcatcattcaagtatttccactagtcttattttttccaaaatcaagattagctaacaatctacaattggtgatcaagcaaaagtaggtagacaaacattaagtatccttgaatgaacaaaacttcattacaaaaaatgttcataaaatatcaacaaaattcacaatccaagtttattgaaagttttaactaaaagaaattagttcatgctcaaaaatacaaaaatacccaaaataaaaataaagaagtataaaaataaaatacaaaagattaaacgagtagaaaaaactatatggatggctcctccttcttccttgtgccctcattttcttcttcttcttcttcttctttttctttcattcttcttggtattttcaataatggtggctgccaagaattgtgttccccctaaatggtgattaggctaggttatcttctcccccttttctaaaaaaatatctttcattaaaatcaatttcgcatgtgccctaggaattttctagaga

SEQ ID NO: 238546 - DNA, 1715 bp, Cannabis indica
ggagtagctacaacatctttaatgatataaaattatatactaattaaaaattcaccttcatggacataacttgtaattatttatgtaggtataataaattgacctcacaaggatacaacctctctaagtctggccaattcaaagtattctcccaggtccacatgaggctcaccaattactggttgaccaattctcgaccccgtttccccagcataatatcggggaccaaagtcagtcgtagtgtgcaggggctgctccacattgataaaaccctctgtatgaggtgccaatggcagatctaccctgggcgacagaggccggtcattgggttcagccaggttagcagggtcaactagaccagttgtgttagtcaagtttgttgggtttgctgggctggtaggattggctacatccgttgggtttgtggaaactccagtattggctggaacacaaacatcaggattaacagtcatggggtcttgaggaagacccaatgaggtagaagttatagtcggagttctccttgttatagccatggtgattgatcagatcaatagacaatgctcttaataaaagtaccaaattgttgacctcaaatttggccaactgacagtagagtcatatatatgatcgaaatcactacgtgtacacaattagaataagtaaataaataggacacaataattttatagatgttcgacccctttatttatcgggtaacgacctactccctttttagttgtattgatatgagagataataccacttagatcacaagtgttgtgagttctacagtggctctctatgtattacaatagtgagaatgtgaggcagttctcaagtagatgagattagggaacttagtctctacaacaatgctaatgacgtgtagaagagagtgagagctaggctttcaagtacttgaactcaatagcctaggaatgagaacctagcaatgagaacttaagagcttttaggtctagcctagtactctttatataggagagagcttactaaagatagaggttgatatcccttaaaattaagaaatatcacatatttattatacattaaataaataagaaaataacttattaattatagccctaaagaatataaataattgaagttaaacccctattttttgtgggttgtttgaggccaattcgtagctgaaaatgttatccaggttgaaagctacagaggcaccaaaagtgtctgccagaggagaagctagccgacctaccctttactggaggttggccgacctatgttggcattatggccagccaagggtggtccgaccagacacccatggttggccagtttgttgtctttttatcctgcttaagtatttggacttttcgtcaactaatacgttgtgcatagtgactcagtcctcttactaacaagttatactctacgtggcatcgatcttgcctatgtggacatgccacgtcacgcgaacaaaaattaggataacaaaaatacctaagttatatttctgaaactccgtaggtacctggatgttaaatgtcaaatctttatccacgcattattttttattggtatatttaaactaattttttaaaaaaaataaaaatttaatgacgtggacaatcagagtatgtcacatggcaatttacttaacacttaacagctaggtacctaaaaaagttctaaaaaatataacttaggtattattaccgccaaaa

SEQ ID NO: 238547 - DNA, 1098 bp, Cannabis indica
tttttgctatatgcaaaacgcactcgttttcttcaaagaaggctgcccacaaccacgtaaaatgacacgtcgttgtccatagtgtagaaaacgacacgttattttcaatgaaggctggctgctcacacgggaaaacgacacgtcgttttccacaagaggaaaaatgacacgttgttttatggatctgaaggctgcctcacaagacgaaaaacgacatgttgttttctacaggggaaaaatgtcgtttgaacaaacgacagcaaccacaaaacttgaaaaatgacacgttgttttccacaagggaaaatgacatgtcatttggctgtatcttcaacctccagccgggtcaattttgacccgtttccagccacgcgggttcgacagacccgacccaaacccaatcagaaaagacaattgcgacgataaaattacgtgttttcaaatctaaaaagttctaaatcgaataataaagagatccacgcagattttatgcacgaaaatacgaaaaaaaatgtagactttaatttcaaaaggtgttctcgggtccgaacgtgttcttcaaaaaaaatttctagattttgttgtttattcaaatcatattcatgaacaaaatcactataaaccatgacatgtatatgataatgcaaaaaatattcaaaataaacaccaaaaatgaaaatgaaaatttttcttaatcacgacgaagaactgaaattttatttatatatgtatactcaaatatagttattatattgcttaaaaaatatgataaatagatggaataagatattctaatcaatgttatgcaataaaatcaagaattagttgagtattatatataaacatatatagaggaaatatatacatatatatcgtatatataaatatatattatatatatatatgaagataaatataaacgtgaatatatataaagataaattaagtatgaatgtatatatataattaggattatataatataaaagtatatatgtaagtatatacaatttatattacaaatgaagaagcccatatgtatatatatgaacaaaactcaaataaaattaaggcaaaaatatataatccgctctgatac

SEQ ID NO: 238548 - DNA, 556 bp, Cannabis indica
catttctccagtctctaccgtaacctaagacattgttaatacacagcgcaatgtgacaacatgacctgtccatgaagatagctccagtccatatttcttgaattctggtgaatatcctggcctcaccttagtcactcctccgttatctgacaagaattttcagtcatggcgttgtgatttcaagctttttgttagtgtgcgaaacaaaaatgtcttcctcaaatgtaccttccacaaccaccggtcgacgatcctttgcatcatcattggcttcgctgtaatcagatggtgatgttatggattctccactccgccacacctgacattaaaagcagtattatgtcttggccacggctgctaagatgtggaggaaactcaattcgagatatgatcaaggtaatggtcctcgcattttcaaactcaggaaagcgctaatcactctgcatcaaggcgatgactctataagttcttattttaacaaacttaaatgcatgtgggatgagatctaagaacttcatctatgaattccttgtgcctatttgaagacagcatagac

SEQ ID NO: 238549 - DNA, 1174 bp, Cannabis indica
tctcgctatgtttaatgcgaggcagttatgtgttattacatttgtttggctcaagtggatgaaaattctcttcttgtctgtatactccgaggcaagcacatgtctcatcaatctcggtttaatagttattatccttgtcttgcttaagactatatagttaacgagttttgaatattatctatcatacttttatttaataataacgagttatttaatatgcatttaatgatataatattattatatcattagagttgattcatattccttctataggacacatgtcagcttatggagtgtagccaaattttgagtataacaattgccccctaaaaatactttttaattaaaaagaacttttcaaaataattacaggggtataattgtattaacccatttttgaaaggcatgctttgggtttttggtggttcgaaacttcaaggcacattattagcattaaatactctgactgttctcatttgtaatgttcccatccattagatcagatctcttttgatctaatggtggtctataacagggtataaaaatcaaaagtaacaatttattttgccattttcgcatttcagaccttcaaatcttttctgtaaatcacgattactccccttccaatttgcatgcccttattatcactcacatatttcttgcgcatttcactcgatctcaactactgtcccaaagaccttcaaaactcaaattcacgattttctgaatctcaatcgctaggctcttcttcgcccagaaattctaacctcaagtcattgttgctttttcaccatgtgacttagattttaaaatcatgacttcattggttcaaaaatccaagactctacagtcacctttgaggctgaattgatcgagtccaaggtcagatccataggatcttatgttggcgagatattaaggtcttgtggcatcaaatacgagaaaggttgctaagttaggtccgttgcttcaggggggtttagtatttttcccctgaacgtgtaatttgagaagaaggctgcagtaccagcgagctatctaacataggtgcttggagcctagagcacataagagccggagcagtactccctctcaaggattactacaaggacttttgcaattatcttgaaacttttcccctttcagctgattctgagttcttataggatttt

SEQ ID NO: 238550 - DNA, 1483 bp, Cannabis indica
tctctctctcatcccttgctcacgcatcactctccctctagagggtgattgtgtgttttcccaatctcaatcacaatgtcttatgagttgagtacacattgtgatcagaaaattatattcatttgattgaatctaatagtccactctattcctggagtgttgaggctgacttggaagaccttaatgtgaacttttcaacaagtcttactagattaaatgatcgtttcattaatacaaaaagatagcaagaaaaccctaataggcaactagaggtaaaatctctaaactaataattaagtttgtgttatgtattattgtgttgagatccggggtttatggttcatattagattcaacaacttttttgtattaaatatgttcttattatcttccgttgcgactctaatatgaaccctaaaaaccaatagacgtatgacttggcacacagagctctgcttatctgattttgattttatcttgagcatccgtctacgagagctatgaacatagacaagtcaaattcacaacttcatattttcattttttttggtaaagtgacttagtcacaaatcaggtagtttcgagtccctattctgcaaaacagtatcatcttcgagaactgatgaacagttttaccagaacaaagaaattgactaatggatgtaaaaatatcagttatgcatcaaaaaatacatcctcaacatgttttctcactcatccagtgtccaggatgatgtcatatgtcaacctgagcgctgatattagagtagtcttcagtaaaacgtccataactcactcaataatgatttgattggtgcaattcaatttgtgttttgaagctatttcaatgaactatcaagatgcgtctcacactaccactgtaattctgaaaatatcaagtccaaatttcatccttaagagagttacgaatttcaactacaacttacctgaaagtgggtctcacagacgcgattcaagctccgaaaattgacgactgaccttaagagtcaattttaccattagatcatcatcaacggtcaaaattagattaaatgtatttttttcttcacattttttgaatattttattattatttagtaagaccttattcccaatgtaaggggagctcatctagctcaattttcacattcagaaaagtatccttaaggtcagagcatctctctctaattatcctctctagaaattaaagctttcagacttagccaattcccttgtaattctcgtaaaaaaaactcgaagtagacgtagctctattaccgtcacaacatagggagtcaactactataaatttcgtgtctctctatttactctatttatctcttttttatctcgccaatctagcaagcaaattttgactactttttagcgtcaacacataaatatatataaactaggcaactaaactgcgcgaataaattttttatttttattattattgtgattacaaaatattagtactgaat

SEQ ID NO: 238551 - DNA, 823 bp, Cannabis indica
ttgacaagatgtgtcaagagtttgggatcactaggcatagaatcgtagtgaagacctcatagcataatggtgttgctaaaaggatgaaccgaaccttgttgagcaaagttagatgtttactgttcagttttaggttagaaaaaccattttggggggaagccttaacaaccgcaacttaccttgttaacataagcctaaatagagttatagaccttaagaaaccttatgaaatgtggtacaacaaaacccccaacataatgcatacatttgggtgtactgcatatatgtacaccaatctattgacaagctggaacctatgtccgtgaagggaactttcctaggttatgccttaggaaccaaggggcatagaatctacatttccaggattggcaaaccaaaggttttgattgctagaaatattgtttttaatgagttacaatatcctcacttgacctctgaaaagagtagtgtgtcttcgtgtgttacatgaaaaatagaaaacaaagacaccataagtgtggaagtggagtacgaaacgaagatcccgaaagaaggatcacatgtagaagatagaatggaactagaagactatgcacatacggaagctgttgtggagccaaaaaaacaagataatgaagaccaaatagaggtaccagaaggattcggatagacaggtctagaaggttatcagttggcttgagatagaacccggagagagattcaacctccatacaaggtttgcagaagcatacataatagcaatttgcactggcggtagtttaacaaactaaaattgaaaagcatggaagctatgaagagacaa

SEQ ID NO: 238552 - DNA, 603 bp, Cannabis indica
catggtgatatttgtatacactaataacactgaaatagctatagtactaagggtgttagtacattgcagggtttttaagggaggttaatgtgtaaccaacacgagtaccaagggatatagagtgcatgtggtacaacactcagtaactcccggaagtacgataatggccttaccaacacgagtacagagtcgatactctagtgcatgtggcacatcggtcgtacttcctttgagaacattcttaaccatttggtgagccttacatataggctcaggacgacttaagttcaaagtcgttaccgtattgcttatgtatgttttatgcgtatcttactgggtctgtcgactcatcaatttgataccttgtgtatgtaaaagaaaagccaagttagaggagcagtgagttggggctcggcaaggatggtacatatcgcggcaatgcaacttggagagtttcgatcatactgctttttgagttattttgttgtcgccccgtagtttgtaaaaaaaataataaatactatgtaactacattatggtatatatgtatttttcaacaatgttctaatatgagatcccgacctacaaagttttacatattta

SEQ ID NO: 238553 - DNA, 1154 bp, Cannabis indica
ttacatagaacactttattgccaaaaaatagacgcaatttaaattacccattatttcgatccaaatagtcaaagatcgtctatagatgatctacatcgagtagggacaaatttaccattctacccttcaatgtattttatccttaaaacacttagctatttgtaaatgatatttctataaactaatataattattaaaatgaggcatcaatcatttatcgcgttaagccaagcttgaaggaaatcatcgtttcacttctagaagttataaaagctatatattccatatctatgattagcgctcccactcaattgtactaccatctttaacgaacaaattaaagaacacaaattatacatttaagctagaacctaaccatctcaggattaagatctattgatctaagatcaactaagtgatattgacttagatagatataacggtaagtttatgataccttatccaatgtcaatatcgatccagtccgatgtatactccatacatttgatactagcatactttgctaatgtcctggaaagggcataacacttatccaaggtgtaagtaaactttattgctgattatcatgtcagtgtaaatccagtgtactgacaaatcatgagacttcaactttgaaacatataattatgattatattccactgtgttgactgctgaaacttattttaccaagatctagatctactaacatgtatgtttgattattaactataatttaacaccctaaatatgaattcccaatacgataaaataaacacatataaagtttagaaaaccttatattgatggcatcagaataatatgtctccttctactcagatctttaacccttgttccttttgtcgcagagtagtaacaagatttgagcctggatctccttctctttcattttggttaaccaccgtcttccgcactatgattgactacttgacttgctatgtgagggcatggtactaaaggcttgaattgatagaagaacatcaagaaggattcgaaatcactatagaaggagtccctcatctactagttgtctaacagagttagaaaactaggtttagattggttgtaggttggatgagaatgagagcatcatgttcctttgatagtattgcaactagggtttaggatttaatt

SEQ ID NO: 238554 - DNA, 1241 bp, Cannabis indica
aagaaatgttactactgcaagaaagaagggcattttagagatgatttcttggctttgaaggctaagtcaaagagagagaatcaacacaagttcaagaaatatggtgttgctgatgttgcagatggctatgtgtcatcagatgcacttgttgtgtctagctcaagatcaagtgaatggatcttagattcagggtgctcatttcacatgacaccaaataaagaactgtttgattcaaaattggaggatcacaagggtacagttctgttggggaacaacaaggcttgtgagatacaagggattggcacaattcagttgaagaatcatgatggaatcatgaaaagtctgcagcatgtgaggtatgtgccagatcttaaaagaaaccttctttctattggaatgtttgatagattaggttttgttgtcaaaattgagaatggagtaatgaaaattgaccaagggtcagaaactgtgttcaagggaacacttaagaatggtttatattttttggatatcaacactacaacagggagtgctgcacctgctgtaaattcagaaaagctgagtcatgtcaagctttggcatctcagattaggacatgttagtcaaagaggacttgaggagttgaataagcaaggtctgttcaagaagaaattgacagaaggacttgagttttgtgatgaatgtgtgttagggaaatcatgcaggctgaagtttcctaaggctgaacacaacaccactgaaaagcttggttatgtgcactcagacctttggggaccctctagaattcaaactaaaggaggagctcactatttcataagcatggttgatgatttcagtagaaaagtgtggattcatctactgaaaagcaaggatgaagcactgcctacatttgacacttggaaaaggctgctggaaaatcaaacagggaacaaaatcaaggtattgaggactgataatggccttgagttctgttctaatgagtttaatgaattgtgtagcaggttgggaatccaaaggcatagaacagtgatcaaaacacctcagcaaaatggtgttgctgagagaatgaacagaactctgcttgaaagagtaagatgcatgttgctgagtgctggaatggacagatcattttggggagaagccatcaaaactgcatgctatttaatcaacagatcaccctcagtgcctaacaactttaaaactcctcaagaaatgtggacaggtaaagctcctaacctaga

SEQ ID NO: 238555 - DNA, 1313 bp, Cannabis indica
gtggatggatctccgtggacgttcaataaaacacaatttgtgtttacaaaattaaagcgaagggaggatccgcggtctgttgtgattaataatttggatttgtgggttcaagtttatgacttgcagtatggatttaaatctcactatgtatttgtaaaaacaagatatgtttccaagaggagggtgaattggaaatttaaactaatttcggtaacttaagacttttaacacaaaactatgcaattaatctcttaatgaaataaatgcaagtaatatggcaagtaataatatatatatatagcaaataatcaaacttgtaaagtaaagagtttaagggtaggaaattgcaaactctcaaattttacaagattcggtagaactatactacctacgtccttggtcttcaaagttatggatctagctttgagttccactatcgagctaagttaacaggcttgactaacccttacaaccgagaatttttcactaaggtatttccaaaccttttacaatagttttgtaccgccaagaactatcaatctctttctcggattgttgtagcgacaatctctctctaatcgagtttgttgacgcagtttatcgtcaactgatctaagaagatcgtaaaataaaagaggaccacggtgaatttatctgactaataaaaccgcaataaattaaatggacaccagggatttatagtagttcactcccatgtcacgatgctaatgaggctacgtctacttgtaattttattgattagattcgaaacactagagttatgttctcaagagtgtgtggataaaaatgcagccaaggatttctaggtaaaatcttaatcgagatttgtgaatataagactcatgggagacttgatattcatgaatctgatctaaattaatggttgtaaagttcttggaacaaaaaactaataatttgtaaggaaatgtgtgtatcaatggtgttttgaggtctggcgtcgcctgagtatgatggactcaatgaacaagatgaaggaatcaatctggtgttcttggttgttgtcaagtgaactttaaggggaatgttacgcaaagaaagatttgaaaaagagagaaaaggggtccaaaaagaagatcaagaagaagattactttctcaacctcctacttgatgtatatataggctagagggtttgttagtgatccccacacatcgggggcatctcattaacaaatcccatataccactatttttcatgaataaaatattacaagtaaataaatatctttaacaattctcttgtttctatgcaaatatcccacaaatattaga

SEQ ID NO: 238556 - DNA, 721 bp, Cannabis indica
tgaacatatttacatacatagccacaagcttctgggcttttactctcgtctcgaggagaccaacaagacctattttctattgatgaatcagttgcctgaccccattttgtttttgcttgtcgttaatcccttggacgtaacaatttagcactctatctattttgaagaggaggtactccccctcctcttgtattatctattgcattattgctggttatttcaacattcgagcagctagcagcctattgcattgtacttccctcttcagtttctgatatctgattcagcgcctgaaaggcattgcttaattgggtttcctcaactttttgttttcctttttccttcctcgccttactaacttgttgaaagccatcaacatcaattactggttcttttgttgtggctgctgcatcttttctcccatctgccttgactacccattgctggtttgtttcccgcttacgacagtcattatacaatgtccgatacctttgcaatggccacacatgactggtttccactcatgcaactattacagaaatatcacaaccaatttcatcctcaaaccaaatcatttctggtaggtttgattaatggtgacttcaataaggactctaggatagttcagcttgtttctctgttttgtgacagcatcaacctgcaatggtttgcccagttgccctactatcttaaaaagcaacttttctccccaatatttcaa

SEQ ID NO: 238557 - DNA, 771 bp, Cannabis indica
tatatatgttacatatctcacatatataacatatatatactttaatatacatgtaagatatatattatatatacacataatatatattatacatgcatgtctcgtataatctcacaaatatatattatattacatgctctacatatatatacatataataacatgatacaaattcaaatatcatatattagatatcactatatatattaatatgatatacacaaatgatcatatatatgtcatatatatacaactcacatatatatcatatatatattacatgctctatatatacatataataacatgatacaaattcaaatatcatatactagatatcactaccatgcccacccatgaatagtattcacacaaaatctcttatccttgtattctcacaatcttgatttatctcctcttccattgaaaatggataagcttttgattgttagagattttactacaatgaaacataaatcaagatatatacaactcaattgtaaaaataatacaaggactaaaataagatattgattaaaaatatattacaatacgcacatatacactatatattgcatttatatatgaaaagtagaagaagaagattacaacacatgtaatataataatatatgtatatacactcactcacaaccttgagtatagattagtagggatcaccatgatttgaacaaggtattacacctttgtccaaaaacttatttctctctatctctaagtactataagagaactctcatagaagtagctttg

SEQ ID NO: 238558 - DNA, 4367 bp, Cannabis indica
tttcagcatctagaagaaattttttagtataatttttttttcatattcatgtacgttataggtatttaagatatcctacaaaattttgaaaaattcggaataatttacaatataaaaaacaatgttcaaacagtctattttacactcgtataaaataaaatagtcacgcgtgcaacacagtgtttgaatatagttttctaacgtatatgaccatgagaaaaaatttgactaaaaaattatttcggatgctaaaacacatagatgtacattaatatatctattttaagggagtgcattgtaaaattttccaactaaaattattgcaagttgtaaagtaataaaatgcacttttttttattatctaattttgtttttctttctagtcccccatttcaaagagcaaggccaacaacaatagtccagcccccaaaataaaagaaataaataaaaaataggcattagtttagcgaattacagctcaccaaaaaattagatttaaaaaaatagtaaaaataatttaaaaaaacaaaaacgaataataaaaatcacactttcccaccctccttactcaactctcactcatcttcttcatccttttccttctcatcttcttctctctctcctccttctcctccggcgaattttctgccggtacggacgtccctaactagtcgccgagaagaaaaatgcgactcttacttctcttggttcttcttctccatatctactcccacgattccattgctgcccgcgtaccggagtacaaggctcttctctcttttcgagcctccatctccgacgactcacaatctcctctagccacttggaacgcctccacaagtcactgcacttggtatggcgtcacgtgcgactctcgtcgtcatgtgactgccctcgacttatcggggcttaacctctccggtacactttcgccagacctcgctcacctccggtttctctctaatctctctgttgctgccaaccagttctttggttcgattcctcccgagatctcagtggttactgggttaaggcttcttaacttgtctaacaatgtcttcaacgggacttttcctactgagctcgcgcagctcaagaaccttcagattctggacctttataacaataatatgaccggagatttgcctctcgacgtcgttcagcttccgaatcttcgccatttgcatttgggaggtaattatttcagtggtagcattccgcgggagtatggtcagtgggagtttctcgagtacttggcggtttcgggcaatgagctcagtggcgcgataccgccggagatcggaaacttgaccagtcttagggaactctacattggctattacaatagctacgaaggtggtttgcccgccgagatcgggaacttatcttccttggttcgtttcgatggggcgaactgtggattatccggcgagatcccaccagaagtgggaaggcttcaaaatctcgatactctatttcttcaggtgaatggcctatctgggtcattgacgacagagctgggaaccttgaagagcttgaaatccatggacttgtcgaacaacatgctttctggcgagattccaccgtcatttgcggacctgaagaacttgacgctgttgaatctcttccgaaacaagctccacggagccattcctgagtttattggagagttgccagaccttgaagttttgcagttgtgggagaacaacttcacaggaagtattccccaaggtctggggaagaacgggaagcttcagcttctcgacctttcgtccaacaagttgactggaactcttcctccttatatgtgctctgggaacaagcttcagactctgattaccttgggaaatttcctctttggtccgatccctgagtcccttggtaggtgtgaatcgttgagtcggataagaatgggcgagaactttctcaatgggtctattccgaaggggcttttaggcttgcccaagctcacccaggtggagttgcaggacaaccttctctccggggactttcctgagacccataccgtcgctggtagcctgggccaaatcagtctctctaacaaccagctttctgggtctttacctcccaccatcggaaacttctctggcgttcagaaacttcttctcgatggcaacaagttttcaggtcgaatcccacctgaaatcgggagactgcagcaagtttctaagatagatttcagtcataacaagttctcaggtacaattgctccacagattagccattgtaaactgttgacatttgttgatcttagtagaaatgagctttctggtgagattcctaacgagattactggtatgaggattctaaattatctcaacctttcgagaaatcatctagttgggagtatcccatcatcaatagccagtatgcaaagcttaacatcggttgatttttcgtataacaatctctctggtttggttccgggaactggtcaatttagttacttcaactacacttcatttgttggcaaccctgatctttgtggcccatatttgggggcttgtaaagatgggattgctgatggaacccatcaacctcatgtcaaaggctcactctcttcctcattgaagctccttttagtcattggattgcttgtttgttcaattgctttcgcagttgctgctatcatcaaggcccggtcattgaagaaggcgagtgagtctcgggcttggaaactcactgcgtttcagcgcctagatttcaccgttgatgacgttttggattgcttaaaagaagacaacatcataggcaaaggaggagctgggatagtttacaaaggagctatgcctaacggagataatgtggccgtgaaaagacttccagcaatgagcagagggtcttcccacgaccatggtttcaatgctgagattcaaactcttggtagaattcgacaccgccacattgttagattattgggattttgctcaaatcatgaaaccaatcttttggtttacgagtacatgccaaatggaagcttaggtgaagttcttcatggcaagaagggaggtcacttgcattgggatacaaggtataagatcgccatagaagctgctaaaggtctttgctatcttcatcatgattgctcgccgctgattgtccaccgagatgtcaaatcaaacaacatccttttggatacaagttttgaagctcatgtcgctgattttggccttgccaagtttctccaggactcgggaacatctgagtgcatgtctgccatcgctggttcctacggatatattgcccctgtatgattgccttcctcattttttcttttagttctgttttctgtaacatgtacttaataatcagtgccttccaatttttaattatgttaaggatctttaaagccaaagactgacttttgagttttgaccgactcacacattgatttaatgtagatactagatagcattaatgttgtttctgaattttcttagtcctgtgctgaaatttgactctggggttttcggaaatgaggcttttctattcactcaattaatgatttgaaactgttgttttgacatgaaagtaaaatggtgtagtaggcatggtacttttgaaagcagaatttcttgaccaattacctaccaaatcatagcataatcaagcactgttaatgtttttggctgaagtgaaaattttaattattatggttttgtttgactgcagaatatgcatacacattgaaggttgacgaaaagagtgatgtgtacagctttggtgtagtccttttagaacttgttagtggtaggaaacctgtgggagaattcggagatggagtggacatagttcaatgggttagaaaaatgacagattcaaacaaggaaggtgtactcaaaatccttgacccgaggctcccttcagttcccatccatgaagtaatgcatgttttctatgtagccatgctctgtgttgaagaacaagctgttgagcgcccaacaatgagagaagttgttcaaattctaacagagcttccaaaggcacctagctcgaaacagggagactcaacaacaacaacaacaacaacaatggcaacagagtcttcttcccctcctccacctccacctccttttcctcctcatcgctctgctgttggcggttacgaatcttcatctcctaccaacacaacaagagacaatcaacagccgccccaatcaccaccgcctgatcttctcagtatttgatgaaaagggaatagagtgtttgttctatatattccatggatgtccttagttttttctttttttttttcttagtatctgctttcttttagtttattatattatggggttggggggatatgtttgctctaactgttaaggtgttaaatcttttcaagcttt

SEQ ID NO: 238559 - DNA, 2375 bp, Cannabis indica
aaagagttttatttagggcataaaacccaacatctagtggatgctttttgtaaccgattctccccttctcaaaaatgttagatcgtgcccaataatttggtggatgtcaagcaataggaagacaagcccgttaaggcctacattcaatttttcttagtggtagctgctaagaccaaaagtcttagtgaggatgcaagggttatggcactcgcagccacgctcaaggagatgagtcctctgttgtccaaaccttcgtctcaaagtggtatacaccatgaactacttcttatctagagcagatggctttatcaaacttgaagaagccatcacccaagcaaatgactcaaagggtggcaagaagaagttgccagacactaaaccccctaaaactaaggcatagggaaatggggaaaagggaggatcaaacagaggaaagagagccaacaacagtggtaagcaaggaaaatccccaaaaagaaagaagccaaaaactaggggcaagcccttgagagattatgagcctcgcttcaccccctactccattctcttggcaccaagagaggagatcaatatggccactcaatcaacagtatcgtattgcaaacctcttcctttcaaagagtcggggaagagggacatgaataagttttatcgttaccacaataattacggtcatgacactaatgagtgtaaccagttgcgggacgagatataatttctcattagatagaaagatgtcgcttttttagtgatatgtacgactttaatctccagctaagggtaatgctccactctagcctgggccagttgcaagtaggttgaagattgtcattggatgccccacttagttgagaattcaaggaaggacgatagagaatcatcaaacatcttgttcaagcaagccctactcaggatggattaaccttagaagacctagagccatgcaaacaactcatgtatggtttcagtggagccaaatttcaccatgtggcaagatcaagctgccactcacagtcagcacaaccctaaaccaagctaccatcatacccacattcatagtcccagagtgaagcctccgtacaacgtgatgctcaaaaggccaaccctttacaacttcgagccatctcctcaatttaacacatgtccgtcaagttcccaacgggactggtattggttgtctctgtggtaactaagtaactgctcacgagtgttacaacacatcatttttcacactccaagaagacctactttgatgatacaacctcagaggggacaaacaagaccttctctgcttttataacactagggggtgagcaaggcctctctcgcataatttagagagacaacaaagacctctgaagatctaactatagagatggctgagacaacacctaatgccacttgaatgtgcgtccaagacagagacgacattaatccctattttggggaaatcaacttcagagttgttctaactgaggaacttagagaacttcccctcaacacatcaaacccgaccaaggttgtcaagattggagcaaacctgatggaggtcttgagtgagatgtccacaagctaaaggacaagtggaagcaggaaaccaaactcttaaggatatgctaaaaatgcctagagcaagcaaaagggaattggcatgaacaactacctgaattacaatggccctattgaacaacagaaaagacaacaacttgttagacaccctttgatctagcctacgagtacaaagccatgatacccatacagctcagacccccatcccactgaagacttacataccactagcaaacgaatcatcaactgttggacaaatccttggatggaatggaagagatcagagaaagatctaagcttagaaaggtggtgtatcaccaaagagtttcaaaacaaaacaactcagaggttaaagataggaaacttaagcctagagacatgggtgttttgacatgtattcttgaatacaatagatgcaatagcgggagtactcgggtctaattgggaaggaccacatgtcgtggttgaagcacttgaacccagaacttacaagttgacacactatgactaaaacttgaatccagtgctcgtaccaaggtattggaacatggtgcatctgttagaaattattttaccaggatctagatttactaacaagtatgttggattaacaacctaatatgaattctaaaataatgaaaagaaacacatataaagttagaaaaccttacagtgggtgcagcggaataatatgactccttccgttcaaatctctagcccttcgattcctttctgttagcagagcatcaccaagatctgaacctcggatcttcttttcttgcttctttgatgtagaatttccatag

SEQ ID NO: 238560 - DNA, 1290 bp, Cannabis indica
gaggggagtatttttgggggtttttcaaaaaaatttggcatatttttttatagtgtaaaaatgtattggtttaaaaaaataaaattttaaatttaataagtatagaaaaatcaaatttcccaaatgtacatggatggtgtggcgctcgataaaaacctagtttacaccagcatatgatattttctgatgcataatggcaccaataaaagcatgttttactggcgcaaatgccaattccactgacaaaaactcttttacctaccgagattcgcagatagctttacgcctacttttgctagggcaaaaatacaccggtaaaaataacatttcttgtaatgagttttaatgcaattatctaatttatcttctttatatttaattgacaagttgaattaaataatttataatctgattaagatttacaaaaatatctttatatttctatatttctatgacaaaattatgttaaaagtatctctataactcttttttttagtgtagcgaaatggtattttacaatcagttaatagcttaatagctttaaggtcctaagttcgaaccgatgacctctccctttttctcctccctccctcaccactaaactagccttagtggcttaatatctctataactcaaacttgcaagagtgtgagctattttgtttcctctaaatagcctctactccttaactaaaaagttgataattaattgattattttctaacttatcaaataatataatgatatatcatattagtaacttgattaagatttactaaatatttagatcaataattaagatttttttctcaaatgttgacatgtttcaaattatgctccttaactaaaaagttgataattaattgattattttctaacttatcaaataatataatgatatatcatattagtaacttgattaagatttactaaatatttagttcaataattatgatttttttctcaaattttgacatgtatctaatgttcctgaaactttcatgccataattaaaaactcttccaaactattaaattgttggatttaagaatttaagtctaattctgttcaattttattaatggatgcgtgattgtttatgtacttttaaattgtgtcccctaaaatttaacatgtacaaaatcgtactctctaaactttcgtctatgccagatgcatgcttgttagtaaaattgaacggaagttctcactacaagaataatggttaataccaacgccactattaccaacgcctaaaagtcctcattaaaaatgagggtatcaataacgac

SEQ ID NO: 238561 - DNA, 1088 bp, Cannabis indica
attttattctaattgcgagcactaacatagccaaatggcagctctcaggcatgcatgttcttggatccctcggggtgtgttttaacttgttttttttatggtgagtaatatttcagatgtcccaggaccccaaaacctcatttcaacgtcctctaatatgggagaccactaccaccaattgcggccagagagtggtaatggttggtcatggattatggaaagtcatggatggtgtttcttgcttatttcaatcatacggattctagaaaactactttagtcatattggttcttggccaaatacttaggcgagcactgctacaatttttgccaaaaaatgcagcgatcgcataagggggctatggagccttgtgtgattttttttttacttttatttgatacatggatgttgaaaatacaatttggccaaagaaactcccactcctatgtggtggccaactactgccaccacttgtaccaaaaatgtggcagtggtaggccaagtggtttccacaccacttggtagcttttctctcttggttttgatatgttattgatgaaaatgtatttttggaaaaaaaaatatcatccccattccttatggctgaccactgccacaatttgtgccataaagatggtagtgttcggataggcttgtattttggtgagaaatagtttctttcacttgtgttgcactccttagtgttgagagaacacatttggacaagttctctttggtgctttctaggtggctggggcacctacagcagcaaaaacatccatgatagacaaaggaatcgacttgccaaaagtaggagaaaaagatttaccaatggaaggcacagacaaaatcttgtctcgatcaagaatcgcaagaaaaccctttgcaccaccctgttgatcaaactctgatagggtaaagtgtgtttcaaacccttggccttggcagagtttacaatccaatcatatatgagagagggaagatagatactcgcaccagtccccaagggaaagaagaaattcccagtgttataattgacggtggatatatgtgaattggcccaccaattcgaaagagcaatcttgtga

SEQ ID NO: 238562 - DNA, 1479 bp, Cannabis indica
aactttgtagaaaatttgcatgatagtgacgctcgtaaggtttgttgattgcccacagaactatataactcaagcatacatcatgtgtacattcttgaagtttctgtctgaaacctatatattgtgtgatgcctaatacaatagcatttgtaggaacatggtaagcaaatatcatgttcgggtactgaatctacttgtgacagatattcttacttttgttttccaaaatcgcaatcttatctactattgttttttagttgattttcaatgcaggtgctttaagtttttttttttctttcttttttctttttgcagtatcttccaaggtttcaaggtgaaaatcttgaacataacaagactatattcgagaaagtcaatgaaatggcagccagaaaggcgtgcactcctgcgcagttagcattggcctgggttcatcaccaaggagatgatgtaattcccatccctggaactaccaagattgaaaatttcaaccaaaacattggagccttatcagtgaaattgacaccagcggaaatggctgagcttgaatcttacgcttcagcagacgctgtaaagggtgacaggtacgggttttccgcaggaacttggaaggagtctgaaactccacccctatcttcatggaaaaccaagtgaaaacacgtcctttcccatctcatattgtattgccttctaaatcagtgacatttgtgaacatgtctagagtatattacagaataattagttttctgccaagcgagtatcaaacttttgtcttacctatttgtaaagtttttgaactttcatgtttattttagagaataaagtggccttatgagattttgtattcccagtttaatattatatattttatttgtgttaattttctggggttatttgagacttgagagaggaaactcctttgaggccttaagagaaagagagttatggatggctttgggccctattttcgctaatatttctaatccttttctctctaaaagaaaggtttgtaatctgatactatcacaaacagattcaatcaacttgaatgttgaaacaaacaagatcaatgttggaacaatatcatagaataaaacaacaaagacagtgtcaaaacaatgaaaacaaatgttcaaacaagtaaagaataccaccagattaatacttgttcaaccaatatcaaatcggtctccgtggctccactatgatgaagaatctgtaacaaccaatgatcgtggaagcttcagtctaaacactactttgatcattaaatctcaagtaagaaccaatattcattttgcattagagttcttgaacaaacactcaagcctcaaaactcttctcatttcccttacaaatttctcaatgtgtttccctatttttctctctcaatctcaactcccaaaactttgtcttctgtcataatccacaacagtagtcgcagacacaacatatatgtaaaattcagagatgaatttt

SEQ ID NO: 238563 - DNA, 1025 bp, Cannabis indica
tatgtaaatattttgaactcctctactaatcatattgattgtattataacttttaatgacaatattactactcatgtttcatgctactatggctccccttatagttttgacaaaacacactcttggttgttgttagaaagaattttagataatgctcctttacttccttggttgattttaggagatttcaacgattacttatctttaaatgacaggtctagcagctcaaatcccccttcttatgctatgactcattttcaaaactttgttaataaattctcccttttgcctcttaatccggttggttccaagtatacttggaagcatggtagtgtttgtgagaggctagattggggtgttgttaaccacaaatggcaaaatactttccccaacaccactctctttcatcttggtttctatggatcggatcatagagttattaagataactctcaatgatgcgagtatgatgtctccgaaacataaacgatttttgtttgaaaacttttggctcacggaatcgtccttttatgaaactgttaaggaaagttggaagcattgtccttctaatcaaactcctctaacccttaacactttccttcttaagcagcaaatgtgtgtggatgatatcaaaagctggaacgctggttttaacagtctttctcgtaggattagtgctttagaaaattcaattaatgccattcattccaacctgcccctatccagagacaagattcacgaggcttctgccttacaatctcagctggactcccttctttattagaatgagattctctggaagcagcgatctaaaattcattggcttcaagcaggtgataaaaacaccaaatactttcacagtaaagccactgctaggagaaagactaatttcattcgaaagcttaagtgtgatgatggaagagtggtcacttctgttgacgatatctctagggaagtgtcctcctatttcaataacctttttaagtcgcaggagtccaatagtgaagctactcagtacctcctatc

SEQ ID NO: 238564 - DNA, 598 bp, Cannabis indica
atatatattacatattaagtcatatacatataatatgataatagctaaataagcaacactttgagacagtaggagatttgtctgaccaaattaattcattcctatacttccatattgcccaacatgtctttgcaaccaagcttcttttctccccatccaactgagttaaaatcgaagcaaaccagttggcaaaagagcctactactgtcaaatttacaccagtagcaagctgttgccaacacgccatttacaaaagaatagtccaccaaacaatgatagatagtttcgttagtaactttgcacacagggaaggtgacatcgacgggcacatgtctagatcgaagtccattttttgtaggcaaacagttagtggcagcacgccataacaaatctttcactttcggagggacactaagcttccaaagagtgtttcaaaagatggaattatcatcctgtgcattcaactctttctcaattgcaagaacttacatattgattttactgagaaatgactcgagctttccaactccaataccatacatcatgtaaacgacttgaagataaggagatactaagaatcagattagcatctcgttac

SEQ ID NO: 238565 - DNA, 3172 bp, Cannabis indica
gaaccgtcactcatctgggtgggtggaggacggacaggaacgccgatggacggcgacgacgacaagaccagctccgacggcactacgcttcgagccctaggttgcattctccttcagatttgctttccagaagtttcttctctagtgttgtaacaattagtattggaaaaatagcatgtttgattagtgatagtagggtcggaatattcccaccctccaaaacaaatgtgaaagtctcccttcattcagctttctgctggagaatttccgttcgctattatggttcgtttattaggtcgtattgtattatattaaattagattatatatcatatttttatacaatactgtattaagctttaatttatactaaaatattatatatttaggtttctataaaagttaatgccacatataattttacataaaaatagtgtataaaatacaatttaatataatattttacaatacaatacagtgtaatacggcgtaccaaacgaactcttagtatagtcattttacaacattatggggtttacacaaaattctagaggcatactcgccgtcagggccggccctgagtataggcgccggccctgagtataggcgagctaggcctgtgtttaggcccctctagcttagagtctcaaaaaaaattgtcccattttaaaattatacatttttttacttattttgaaaaaatattatatattttttgtctaaataaagacctcaaaacatttttttcttatgctcactaaatttcaaggccaactctgcttgctggtggtatttttttttttttcctaacttaaaatttttataaatatttgtgttggaagaaggtatgcactaatattgttatttaattaaaagttataatataattacataataattaattacacaaacgatgacttaatctaacttttgtcgtttaactgcatgctctgtcccaaatttaaaaatgaaatattctattaagtacattgcaaaccagaaactctaacttagcagcatagtcctccttatcctcctctgcacatgattcactatttgtttttggccaaatacagacatgcagtgacccatgtaacttaaatcctcaatatttctcaatatctttctatattataataaataaactagaattaaaactttggtagacacagtacagacacctatatattggttagatacaattgtttaaaatatatttattgctcaattatcgatatcagatcaagaagaaacatcaaatttatatttatataattttatatatatatactgttcataaaaacagataagaagattccagtagatattgtagaaagaatgaaattattattaggaacatgtatatgatcacaatcggtcttttccaatcatgcccacttgttcaacccctcttcaagtcccagctgtataactttttctcttccaaatatatcccttctccattgggacccactttctccattgaccaatcttgttcctttatggtgattctggtttttgattgggggagcaaaacgactgtcgttttgatatgaaagaatttgtcttctttttgtttttttcttttttctcattcaactttccaagcataaagaaataagcaaaactcagatgacccagttgggtttaagctctctaatgatcctgagctccctgtctgagacgacaatggagttgatgccaatgaagacaagggtggagaagaagaagaagatgatgaaagtgatgatagagatgtagaagaagatataattggcttgaaaataaacaaagcatgccttaaacctggactgaaaagccaatcatgaacatcccaataaacctcaactcttaacttgttgatatgaatcgattcattacctctgaacttccattgaagatgcttgacatgaattaaaagatgcccatctagtttgatttccatttctggctcaaccccacttgggaaattgccattgttgacagctctgttcctgcactctattgagatctcatgaagtctacccttttcgtggaatttagctctggttaagaattttttcttgccaaaaacatgttctttcctcgaaaccaatatgggatcgatcaaagaaggtctagaaccagttttcttgtaagcttctttccttaagtcaccaagaagcaagactacttcttggtcacaaacaactgcaacatagtaatctgaatttggctctgtttcaccattgaactttacattcctcaggtcccagaaaatgtcgactggtttattatccactacaaaacgctttgacccatttttcctccagaagtaccatggcttaagctccactttgcagttgtattgggtttctttatctgggctttctactgatactgataagccatggagtaaaagattcttacaccaagtgactgtaattaagcggctgtgattagcaatcttggttctgtaaatggacataacaacactttgacctgacctggttactgctgctggatcatcactcagcttctcagttgatgaaaaacaagcaggaattcctattgggtcttgcatagtttttgtgtttgacaaaaagagaagtctaaacttggacaaagaagagaaaaaagaagaagaagagtgggtgaaaagatgaggatgagaaattttggaggagaattaaagtgtgtgagagggaaaactataacatggggagagtgagaggtcttagtcacaagatgaatcaagccacagatggtgccagatatgttcttggcagcattcatggaattaaaatattattccaaactggcagtgagtgagagtgagtgaataactaccctttttatattcaattctctcaactctgcttcccattacttacctggattttcctcattcattttcttttcttattatttttttcattgataatactattctaatattgctgctttcaaacaatgacaacttttttgaatcctaggtggctttgcttatgttatacttctataaaatatagggtaagtttttagtgcacttcctaaatgaactttgtcttttagttctttctcttttcctgatcatagtctagttgttaaagactacctataaagttttagaaaatttcggaagataatatttactttctatcaaagcatggtagaaaaaaaaaaaaaaaaaa

SEQ ID NO: 238566 - DNA, 1389 bp, Cannabis indica
taataaaataaagaaaaaaatatgaaaaatttactttgggatgatcttgtccattgatgatgatctgacaatgaaaattaacttttaataaaaatcgtcaatttttggagattgaatctcgtccgttggatcgatttcgggtaacctgttgaaaaaattgcacttgtcttgggcacgaattttggacttgaaatatgcaaaattgtgatatggatatgagacatgacttgaaagatatttaaaagagctttaaaaatcaacttgaatcacatcaattagatcaatattgagggagttatggtcattttattgaagactgttagcacccaacgcccaagttaacatcctgacatcaacctggacgatgagtaagtgaaaaaacgtcccagacttgtattttttgatgcataagtgattttttgacatcacttagccaatttcttaattttggtgaagttgttcaccaattcttggagatgcgctttttggtgaaattaagtagcctcaaatctccccgatcttgtcaatattccaccttgttgaaaggataaaatatcaaagtatgaatttcaaatgtcacaatctgtagcttttgtttactatagaaagatagtcatatgctcgagatagaattagaatgtgataagcagaacccaacgcaccaggccatatgtcaacttaggtgttggatgcttcttgggtggcttcccggggctagttttgatacctcttaggaatttgagatcgcgaacaaggtttctactctgtttgacaaaaataagaagaatgcccgaaccaaaatttgtgtttgaggagtggaaacatgcaaacgaggttgtatgtcaacctgggcacagggcctagtgctcatgttaacttgggcgttgggtccttgtttcaacccccaaaggatcttgtttgctccctgagatcacttgtatcttccttatttctaaaataaaaaaaattcgtctagagcacttttcgggagaaatgactggaaatagcccaagttgacaaatgtctacccagacactgggcccaataccagtgtcaacctgggtgatgggtctagattttttttccactgaatggtcccatttgattcctaaaaacatttgaatctcagttattaatgaataggggtgttcatcaaactgcttaaactgctcaaactgcccgcactgtaaaaaaatacagtttgaaattctttgtgatgcggtcgtggtttggatatttcttaaaaagacagtgtggtgtagtttgcagatttgaattgttaaaatgctgttcaaaccgcaccacaccgcacattataaaaatactattttttatatttatttaggtccaatatgtgaatgtccaacccaaaacccactaattattgta

SEQ ID NO: 238567 - DNA, 1307 bp, Cannabis indica
tggtaaaacacctaaatccagccccaaaactctttacagagcacaaaagtaacgaaataccatgacaaatttatggatcatcatcttactaccaagtgttgatatacaaaacctctctctctctttcgttaccatgctcatctttatttttaagacttaacaagtagctttcatgaattttatgactttgttatgaaattatgtgttgtttgttctaaattttatgatattttatgatgtttttcttcctattcttgaggtgtacgccttgatacgcctcgtgggactaagggaaaatgcctcagtacccaattccgttttccaaaaatttgggggcggctaatggtttagattggtgctactacagaatcaaagcatgactgttaaaaaagaccatttggagatgtaataagttaattttatttctgaaaaagtggttaattttatttctgaaaaagtaacctgactcaaaaaagagaaagctcaatggagaagaaaagggtcatctaccatccaagaaagaaaaacatacctaatttaagctaataggaactctcaaaatatcagccaagcacactcacaaacaacaccagaaaactctctttatttctcaaaccccagcctcaattagagaagccaattcaagatagcgaaatctcccaagagtctaaaactaattactttcccactgaaaaccaactacttatactcaaactaactactgctctaaaagaaacataacaacctacaatacaactcctaacagaacataaccactaacacactaagctaataacaacttagatattagttagttatccctcttctcacataagtgaacctcattggagatctatcataagctcaatgttctatctgtttaatagaaaagctgaaaaaatttaaggccagattttagatcccaaaaaatgcaaaggattcacaaattaaatcagctttattactcttgtcaataacgataaacaagtaattaataaattcataatcacttagctgagagaaaatggaatttcatgtgagaagtattgctcaagtattgccatcatatattgcaaggtattatatgtttgtttttttaacgccgggctagatgataaaaaaaaaatataaaatacagtcttgattccatcaaatacatacaagcaataatcttggtatcaacaattctgaaatcaataatcagtagatactgggatcataaatctaatttgtaattattttaggagtaaatttacaaagcaatactccttctactaacctacgatcttggaatttttattagtgat

SEQ ID NO: 238568 - DNA, 917 bp, Cannabis indica
ggtcatcttaaccatagtatatatagttgatacaatatatatatttatatatatatagcatagtagcagcagcacaagtttggcagtatcttacacgcctccaccagctttcaataaattttacactttcattcattcataggatagatggatatagtagatacattaatatttatatataatgcatataaatgaatgtgtatatataacgtgtctgtaaatgtttatttcttgcacctcaactgatccctactatgctactaccattattactactctactaagactagatcacaatgtgacatccaatcacaaatattgggtggcactaattagtttgagtacaaattcagtggcaaaaagctaaacgacttttctatatatatgaaaggaacaagaaatatcagcaacttaagctcctaactaaaaaagtatgcttgtagttgtagatgtttaaaataaataagagtgatttatgagaatatataagtgggtatcacaatttttcctctataatatatctacttaatttgttggggaccacatgtaattaactcaataaatacttatatttcaaaatatttatgcaaaaatcatgctgcacaaataactataattaaaaaaaaaaatactaaagtttgccaaactaattatttccaatcctttggtttcaaatatttatgcaaagatattttatgttaaacattatgacaaatcttaaacactgagtcaaagtttaatgaatgtgtattttatgaatttaattactcttaattatccttactttaggtacttatttttcttaaatttttggtttggactttaatatattttctctaaatgtgtagatttgtacttaatacgattttatgatagagtgagatctttgtaactaactttttgattatgttctcatc
